United States Patent Application Publication US 2014/0057251 A1 - sequence listing, part 65

SEQ ID NO: 100813 - DNA, 1040 bp, Cannabis sativa
atatataaataaatatatttgtaaatatatattcaaataaaattttatggaatagctagctagtatatatttaatataacaaagattttttggcaattgaagcaatgtatgtatgcataaatttaattatgagtaagagtaccccaaaagaaaattctctaattagggggaaaaatcaataggaccccaagtcaataaaattaatgaaacacacatatatatagtgagagagagagagaggggttggctgacctccttggacatattaaagcaagccattaatgaagagtatgtagcagaggttttataagtaatataagaagtagtggtagtgattatttttggtatgtgagaaatgatggagttggggaatgaataaaatgaagtgtgagttggtgatataaatagagaaaggaaggggtggcatcaacggctcagatttcatttcccaaaaagtactatactactggggacacctcatcatctcaaatttaaccaatatctgcattttcttaattaatttattacactcatcacaaaatgatatctaccttagctaaggggtcattaaaagaagtgggtttttttttaatttatttttgcttcaattttatttgtcattttcttggtgaatagaattgcttgaaaacttatatatccatttttttgatagtgacagatttgacattacaatatatcctacagtctttgagcattttagtacaaaaattgactcataatttttaattaattattgactgttattttttgtttcttgatagtaatattaataaattcttgtgctccccagctaatttcttgatgacactattgatctatgttgtaataaaatcaatattaattcattaacgacaatatgttggctaagttatatatctatattctatagcttgcattttaaaaaaatatattaaatattatatatgggaagtctctaatttttaataacatcatattgtgttatagaaaaaaataaattaaataattatgcctcaattatggcttgtaggttagttaat

SEQ ID NO: 100814 - DNA, 821 bp, Cannabis sativa
tccagaaggtatggaagttaacaagtctttataaattcatttcaaaatatattgcactaacttgcagggacattcttcatgtggctggtactaaactcatggccaatgagttgcaattctttctttgtttgctttggaagatttgacatagcaagaatgagttccttcatcacaggagggttgtggtgccagcttctcaaattcatgcagcagttgattttttagaacaataccaacaacacaacgcacaacaaagctccttcaaggcttctacggtcactacagcgccaaacaatgaagttccttcaggttttcaactgaaactttcagttgatgcagcccagaatgtagcagctaacaaaactggtcttggctctatataacactcatggggacttgatgttgactgtagcatcaccttggaatggaactcaatcagctctgctaatggaggcccatgcactttctttggctctatcctggtgccaaagatacaacataaatctggattatattgtatctgattgtaaaacacttgtggattatatttgtaatgatactatacatcatctgcttttcttcaaaaaattctctctttgaataggtttgcaacaaatattagtaacttgctgtcttttttccctaatgctactctcaggcacatcccaagacgggaaaatgaggatgctcattgtcttgcaaagtatactcaaaatttctatatgtaatctgtatcctgtactctttgttttcatttatggaatggatacatttcttcgttaaaaaaaaatatatttttttgaaagaaaaacatgacatta

SEQ ID NO: 100815 - DNA, 688 bp, Cannabis sativa
agtattaggccacttctacaattggctctgtacaagtgctctaccgatgcactacttttcaaacatcttagaaaagtttttaatttaattttttttatagttattaatattgaatttgtttgagacatattgtaaaattctaaaagattaaaaagaaattaaaacagattcaatacgttacaattttttttttattttatatacgtgtgaaatatattgtttgatttttattttcgctgtgttaaatttttttaatgttttaaaaattttataaaatgtcttaaataattataacgtaaacgactatataaaaaattattctaaatgctaaaataaataaaaatacatccataaatttattttatggggtgcattatgaaattttataagtaatatttaaagtttcattagagaaagatacataaacgaatttggagatctctttcttttgtgtgaacttgtaagcacgtacgtggacagctttagacatggagaaaaggacataaaggtatttttatcttttctatttttaaaaaaataaagctccatccagcttgatcttgtaaattggtgttttttttctttttctaaaagaatatattttattttcggatcccaaatactattttttaactttttttttttcaaatttacgatttgggtttctaaagtggttgcagtgctagtt

SEQ ID NO: 100816 - DNA, 970 bp, Cannabis sativa
cttcctttcgggccagttagcgaaaaattttagggctaaagtttggttgtttctctcactaacatttacaaatttcgcccacccccggtttaacacttgttctcttatcgactcaaacatagggtgaatgccgattcttagatttctaaggtcaccaatgtcaatagccctatcttcaatgaatggcctattcttcaattctagatagcgctcttgtgcttcggcacttacaaaccttccccaatctacattggattgcctcgatgacctaggtgggttggatgaagaggcacctttctcactcactcttgatcttttgggtcccattctcactcaattctcttaacactcaagaaaaataaaattcggcagcacttccccttaaatttcctcttttctgggtgaatacccaatcacaaattactcactctttcaatcacaaacaatttttcatcaacaataagccaaacacaccaatttttcacaagattctcaaaatttttaaaattatctaaaaaaaattcatagataatcataagaaattacttacattgatgaagacctccttcactctacctcaattgatgaagacattgtaagttcttgaggtataaggtgatgaatagtggatttttgaaattgagtgagaattagggatttgagtgtggcttttaaaggaaaagatggattgatgagagaaatagggttttgaagtgattagggatgaatgattaagaaattaatggaagaaaaatggtttttgtgagatgagattaaagatttaaggtaatggggatggataaatcagaatggagaagttagggttgaagaatgggtgttttggggttgaaattttgagatggcctatttatccacgtctgggcattcttgtcgcggccacatatggcttcaccgcagcgagatagcgagtgtagaaccccccctttctgccaagagtatttcgtcgcga

SEQ ID NO: 100817 - DNA, 654 bp, Cannabis sativa
tatgattctttataacagtatgatgtactggaatattacgagatatctagcatcactattttaaagagcattagtggtgtctagcaccttcctacatgccaatatcgctattgatttaactaagtataatgtctcatataatttaatataataacttttagggagtatcgctaacctttcgcaacgcgacatgtcaaaaaagtgctaagcaccaccggtgcctcatagcaatattcactagctactgtatagtatgttgtaaatgattagtaattttttataataattattagttaaaatatataaaatttaatatttaattattagcatctcatggaataattactaacaagcatctatataaatatagacaatgatggagttagactaatactctttagtatttttcaataatagtgtgtcaacttatcccttaagaaaaatactaaaacttagaaataatttaatttaatatttttttatattgttattatagtaattatgtattaaatttaatataatttaatttaataattattataaaatattgttaactagaatacaagtgcactactctagtacgttatcacaatcctgtatcttttcattaatacaagttcaatttactaaagagaatctgaagaaaacgacagt

SEQ ID NO: 100818 - DNA, 2280 bp, Cannabis sativa
tgtattttagttgcgatttagattcttcaattagttgctatgtgggttgatatgagaatttttgtaaaaaaaatatataaaaaaaaattactttaaagtgtaaaaataaaaaaaaaattctcttaaaactattagatatcgaattcaaaagagaaaaatcatgataaaaaaaattatatactctatatttgtatattaattagtttattgttttatttacaacaatacaagaaaaatcacaataaaaagtattataaaatagcatcatgcacaggacaaaaaataaaattatgtatatgagaaaaataaaaataaaaatgaaggactaaattatattaaataattaaattatttttggtatgtaattacacccaatttttataaggtatgagaattagagagagtaattgaagccttcaaattaattttaattacacaattattgtgtaattatgtgtccaaaaaaatacattaaactgtgtaattacttccaattacatctaatttcaattttcatatgacttttcaaacacccaaattataacgagatttttacaccacatattgaaatttttaattttttttcttttttactgtggggcggcggaatttttttcaaaaatactgagtttttatttttcaaaaatactgtgtaatttttatattgtgtactgtgttaagtcttcactgttgttctatggttgttttttagttgttttactgttatttttaattgttctattttgttgttttatggtgattttaggctgttttataaaaaaaaaaaagatttttgtaagaaaaattcgtgtggtaataaaattataaatttttgtcgaaaatctaatatttttgtaaaaaattcaaattataaactatattgatgacccaattaaatattgtgctcttcttaaatatattattagtagtaataatattaatttgagtattccctaaagaaagaaaaggagaatttcttagctacgtgacaaggcgctaccccaccaattgatgatattgttatccaaatagataagagaggttttgaacaatattatgtttcttgttcaagactactactattcttaaacgaatactacttctctttttcattttcttgttcgtatgacccaatatataagtcttaagtctgaccccatctcgattgatttataatatttatagaagaaatgttaaaaaaaaaggctaatgcctgataattatgtcactaagtatcatatatacatggtttagtataataaattttataaaatatcagtaaaccataccaaaagcaatactctctttctattgtatttatatatgcccttttcaaaggagtactttgtagtttgtcccttgtaaaacgtaatgattattttattgtgctaatatagagagagaagaacaaatcgtcatttatcgttttttggtacaattatagagatgagagaggggaagtggacatgtacactcggataactaaaatgctatatcggaggattgtatatattattatgggaagacattgtaatctgtgattatatatatgtttcaactcaacaagatgcccttataacccaattctgcaaataataataataataatatataccctatttacataaatatatattagatgcaattcacacgtatatttaattctatttttaatttttattttaattatatatatctttaattatataattaattttatttttagattgttcaataaataattttattatttattaaaaaatatttaatttaaatactatttataaacaaaatataatatatttaaaatttattattaattataattttagtttaatcataatactattacttttgcaatacttttttttttattttttttagaaatgttattcactttttctatttttttaaataataatagaaatatatttttttagtgacgacatcacaatagtgattctttaagaaacatagatacttttttctattttattagtaacatatcacaaagattaagttttatgcttaatttttctatctaacgaaaaatatttatatgggatgggtttctccattggctgaaaaaaaaaaataaaaaaagagcttatccagcaaagaaaaataagataaaaaaagttgggtttgacttagatatttttatacaaacatatttttgatataatattgtagagaatggggaataaaatttattaattttatttttggcatatttaattgacgaaaatattttattatttattgtatattttcgactgg

SEQ ID NO: 100819 - DNA, 784 bp, Cannabis sativa
cctaattaactctctagtaaagtaacaccactattttcttcttttcatgatccatctctcagtagcaaagagaaatacagattaaaaaaaaacaacataatcatagttgatactttgttccattagagcaagtactataatgaattctaaattgtttcaaagattttctaattctacaacacatacacatgagaaagtcccaaaagttatgctcattttttatgtatgaggattgcaattttctttttcttttttttttttaaaatagtctgcaatacaaatcactcacttaagacattaataaattctaaataaagtgtacacatttcacccttaaataaaagttattcataatgatttatgataatctatttagaatgcaaatgtgctaactttctgtagtttacgttcttcaaattttattattcattaatattttcacacattaaaatattctttcaaaagaaaaaaataatgaaatctattatgagaaattttttaattcttctactgttggttgaatagtgaaaaataaaaaaatcaattatgtttacacattcatctaaaaattgaagaaataaatttctaaaattgaattccaaatattgggtatatttattgtaaatacgggtacaagtgatcaataaaagaaataaaattgaataaatattgatatttggattatatataatatattctatactttttttttattattctcttttatttttactttcttttttaaagtatatcatttttacctctttttttttaaatattgtac

SEQ ID NO: 100820 - DNA, 648 bp, Cannabis sativa
gttcttggtggtgatagtttatggtgagatattacactactagaaaaaataggttttagagacagttttttgggacatacaatgttacttttgacaaaatttactaccaacattgttacaagtgatgtcgtaagggagaaaattaaccgacgatataaaacaaccttacaccgttggttattaataactgatggcatatggaggtcctattgatatattcaacatagttactaaattaaccactaaatttcatataaaacctattattttcacacatatatatattttattttatttttatgaatttattttaattaaatataaatttcatacaaaaaaattaaattaaccatataactaaatgtgtatagatacacacacattattcaaaaaaaaaaaatgtgtatagatacattattctaagtaaatatattacacaaatatttcaaaattagtccaagtatttacaagttattatctaattcaacatagaaaaatagagggaaaaagttaacaagttatctaattactacaagccttcgtgaatcaccccaagcaattgttttatccactgtcgttgtaacagtaacaactcagtttttgtatcgtatgttttcttttcccaaaactataaaaaaaaaatatttt

SEQ ID NO: 100821 - DNA, 1079 bp, Cannabis sativa
  modified_base (736)..(748): a, c, t, g, unknown or other
catgacactctatcactataggccgactatgaagaacgatgaaggaggcttgaaaactgtatagaatgtatctctcatctactagttgtctggaagagaaaattatgtttgatttgatttggttgaagaaggcaatagttcagtagttggatgaaatgagagcatcgtgttcttttatagtgtttcaactcagtcttaaagttgaattatatggattaaaaaagaataaaattttaagtaaaaattattaaaatggctggccacttaagaaccgctttgtagttataagaattacaaggaaactgtggaactcacaacataaggaataccccaatcccaatatcagtagggatttagaatcatcaataactggagttacatatattccatctttttacatatatattcaatctatatttattattctacatttataagattgatcatgtatgccttagcttcattttagtttattattctacatttataagattaatcatgtatgccttagcttcattttagtctgctgataggttggctgtagggttgaacatcaggcgggtttactgagttttagatttgcgggtttcaagttaaaaaaataaaaccgaacccgaacctgaatagggcacgagttaccggttggcgggtttcgattgatcggattggcggattgactcggtcaaatctttaaaaaaattaattttttattcaaataattatttttttatttttnnnnnnnnnnnnnttaaacatatataatataacaacaaaacattactattataatatacaaaacatgcacaatttcaatactattatgaacaacaataccttcatatatataatttggtggtttaattttgtagtttctaccaacaactattaagtattgacacatagacagaataatgagaatcaaatttaaacctaaaaactatatatatataataatttggtggttagtgttatttttaaggtatttttattttttaattaataatttaatatatatataaactgtaataaaaaaataaaaatatatataacatatttaaattgcgggttggcgggttcaa

SEQ ID NO: 100822 - DNA, 1003 bp, Cannabis sativa
gccctgtttagtcacaactatttctaacttcacctttttggacacttgttggctcattctgagtttcaatgtctagtctacattttattatttatttgtccatattctgatagagatgtgaagaagtaagtaacaattttcttatcgtttttctttgtttgcatgctttgaattttcatgataggccatgtacttggagcttgaatgaatttgttcgaagaaagaagttatcttttcttgatgagttaccacaatttgttctttctccggcggctgagaatcgtcgtgataaaactgaatggggtatatttttgagacatattaaagataataacaaggtaagcaatgatccaagtgtttatgcgttgcataagagttcaaaactcccaaaatgctttagttggttcctacaattactttttaaatgatcaagtatttaaaaagtttagggatattgtaacaaagatgataaaaagatagaaaaacttgtgttgttttacaataatgaggataagtttgtggttgaagtacgatctttggttgctaatttcttagcttttgattattggtgataatcagataatgttgaaataattttataccattaaactctattgacaagtaattctctagttatgccattgttagtcaaaatgcaatgaatgcacactcaaaatccgtttcttttagaaaataacttttggatgtttaattcacaaatgatagtttccttttgttgagtgacaaagtgaagtaattcattacacaaaatattttctctctccatttattccattttttttaatttcttctaatatttattgttgaaggaaaagctggtttatctagattggctctaggtttgatttattaaacctaaataggctaggtttggcttagaatctagaaacattttatttctttttgttttctcactgatgttgtttgtaatgggtttttttaacttctctgtagagatatttgataagccaccaaattaaac

SEQ ID NO: 100823 - DNA, 1639 bp, Cannabis sativa
  modified_base (1221)..(1230): a, c, t, g, unknown or other
cttcaacatactcttggctcaccaccaagatatcgcccagcttggagacaggttccccagcctcgttgtaactgccaaaagggagtacttaggttccatcttcttcttcttatccttcaatgtcagaggatccagcaggacaaacctcgtctttatcttcaatctctcagactttaatgtccccgattacaactttagcctcctcgctcggaggcctaacctgctctactcgcgccattgcaaacaaccgagcgaaatgggggtcagactccaaagctttcctcgtggtttattttgtccttgccattattctatggttggacgacaaattcaatttagatgtgtgccttgtaacaataataaatattctggtatgacagtatgcctagccgatggagctgattgaccttctagtaatgtgtcaacaacaccaagttggaccctatacgtccaggaagcaggaagatagtgtctctaactttttttcagttcctaaatagatcaattgtacccttctccacttatctggtcaggatattgatgatgttgcaccataggctctggagattctgaatggtcactactgacctcctaatcttcaaaacttgaagttgaagagctttcactagacgaagaggaatctacacttagctgaggatgattcttgtagagaaaataaagaagatcatggtggatatgatgttcatctccccaaaatgctcaaagatcattgtaagagctttcgagagagaataagttattctcgctcacaagttaatacgacaaaaatgggagtaggttattaccaactttaaggtgtcgaacctctctaaaatccagtattttctttactttaaattatttactttctattatttaattattctcaatcgatttattttgattcattgttattggctaaaagcaaagtcaacaaagtctatttttaatttaacttttaattaattaattaattaattaacatgtgatcaacatatgtcttttagttggcattttacaaatctagttagtacataaaaatgaaaaggacttcgctgtaaaaaaaataataacagaaaagactgtaactgtaattataaataggctaattaggatttttgcctctgaattttgacatgtaccaaatcatgcctcctgaactttcaagatcgttaaaaatgccccttgaacaattaaaattgttggatttaaggatttttnnnnnnnnnnattcaattttactatttcagtgattgcttatatattaaaccatgctccccagactttgatatctactaaatcatgtctttcgaactttgacatgtactaaattatggccactgaactttcatccatgttagactttcttactaaaattgaaaaaagtccttaaatccaacaatctcaatagttcacgggatatttttaacgaccttaaaagttcacgaggcatgatttgatacatgtcaaagttcaggggcaaaaatcttaattagccttataagtaatgattttttatttattgaagcgtttatatattacaatgcataatttaaaactcgaattcagaacctccaacacaccctcctaattgccactttaacttaactcaagtggtataaataataaggtttggcta

SEQ ID NO: 100824 - DNA, 532 bp, Cannabis sativa
gataatgccgctatttaccctatatattaaggatcttgacataacatatatataaaaatgacccccttggcgagtagatcacgaatatataacctgctagcccaattaagcactaacctcataaaaaaaagatactcccaaaggaaaatcctattacgaaaatgtagtgagttgacaaaaatgacttagttagtgatcgatatatttctcatgactctgattccaactgtaccaatcatttctcaaatggtcgtcgaagttggttgtaatattgactcaaagttttcaacatcaaaactttgcacgacttgtatgagtgcatctaagtttcaattgttacccaaagtgaggtgtgagatcaccatagcgcgcaacccagtgggtggtggatctaataagctttctcggtggtggtttgtgtggagtttttgaataataaaagaaaaagaacaagctgtcaagggagatagaagaaaaaagattcatttgactcatgtgatcagtcccactataaaataatatatatatatat

SEQ ID NO: 100825 - DNA, 1161 bp, Cannabis sativa
agagcaatacaattgagttgcctagattttaaatttgatactggtgttcttaaaatacatggcatatatgacattttcttcatcgttgaaactatcatccaagagactatcaaggcacactctctaaccaaaacagggtaaaatagttcaagttactgaagttgtactaatacccaagctcctaaagtcgttgattgcttctctaaaccccaatcaaatttattaatgatataagcctagagacaaaagcaaaacactataattgggatagaaacccatgcaaaataactctacagctacaatgatattaatggctagtcacacaagcaaacaaactgatcaatcaaacataattcagatcatggttctacaaggaatgacaatgcatcactatatgagctaccaaaacaaaatggtggggaataacttagaaaacatatccataggcagtattgtatcagaaaaaaaaagaagccagagattcaaagctaataagtataaatataaatatataggttgtgtgagtcatttctttaggcttagcctatataatctactgttaatccaccttctgctacaaatttgatgaaggaaagatagcaaccagctccaacccttctcttcatcgatctctcagttccatgcattttgttccatccacaacagacaaaaattagcattgcaatgaaattagagtatccgagtcaaatttaacagttgttattgtaatcacatagcaacctttaaaattctcataattttgattgaaacaagctaaagcaagacaaacgacgaaccccattattcttttcatcatcacaataaatgataattagacctcagcctaaatttaatgcataacacactcttcatatttacaagggacccttttccccaaggataagaatattaacaagagaatgtaatacatattcaaattggtagtaacagttactaattgacattcttatagaagaataaatgaattaactaatggataatgaacagtgctaatcagggcatttctatcaattaattttctccatggctgtttttgagcagtaaggattagcaattaccgacttcagacttcataacctttcgtttcacaatccttcaaatattgcaatgagaattcagttaaagattgaattgcaaaga

SEQ ID NO: 100826 - DNA, 838 bp, Cannabis sativa
  modified_base (197)..(201): a, c, t, g, unknown or other
attttaaaatataagtctcaattcaatatttaataaattttatatacgcgaatgcatagcaaataaatatggatttagaagagagaattctaattaacagattgaaatattgaatttgataaggaggaaattacactctataccttttttatattagtctcttttatttttatcttttttttaaagtctattatttnnnnntctttttttaaacattgtatcaattttgtctctgtcacttcaagatacttttcatgtgagtttcttatgtcagggtattttgggtacaatatatatataaaaaaggtatgttttaattaaatataaaactataggtaaatttgattaattgattaataagagtggtatctttcaacttacctctgttttgagtccgaatatgaatatttggttggataaaagtaaatattatgcattgcaagaggtactgtcaaatttagaatgatatcacattctatgtgaaatgttaaaagatttatgtggtgttaaaaattgtgttgaatttaacatagaacattgttattagacactaaaccaaaccatgacatgacacaccacttcactagttatttagcaccaaaatgcccctttaatagttttataagacttagaccaccgagttagtgatctagatgacaaaatactttactcttagatggtatttagttgaagataatgaaatagaatggaaaggaaaaaaaacaatctttattctatatatttgtttggttgcatattaaagtgttggaatgtcattctaatggaatagtctttccaccattttagtggaatgacaattccattttgaaatggaagg

SEQ ID NO: 100827 - DNA, 507 bp, Cannabis sativa
tatcaacactattagtaacaaaaaagttacttttagaaaaagcaagaaaacaaaataataattaaaaaaatagaaagcatcaactacattagaattaactgacatggcatgtcagtaatagtagtaacgttattattgtaaatttgatacaaaaaatttatattattgtaaattttcctaatatctattattaccaattaagaagtattctatatataaatatatataatattatccatacttctagagtgaatacatttccaatacaaaactaattgataaggcatcctcagaagcacaacgagataatgggccaagactacacagagagatgggcctcaaatccatctttgatgcaggatatctacatctataatcggatgtcaccagattaggaagggcacctcacccaagtagaaagaatcagtcaacaccacttgaagggtactgttgagctcaaaaaataatcaaccgacagtgcgatcgtataaatctaatgtttaccac

SEQ ID NO: 100828 - DNA, 1261 bp, Cannabis sativa
aattaccaggtataccataagccataggttactgagatacccccgaccatttcttgagatgccaaatcaatcctttatactttgagtgtgccttttctgcaggtgaggtcaatttagttatttttgcactttcaccacactgaaaagatcttctatctttcagatgagcgacctgtcagacagccaaatgctcgactcaggaggtggggctttcactgacgaacagaataaaagcgacaacttcataccagcctcaatatctgacgaagaggttcctgttgctaaagctgcaaatttgggaccattatcttctgacaagatagagaggatggttcaggaactcactgaaccagggacaatcgagattcgcgatagtgaattcacggtgtctgcccgggaacatctcatccattcgaggcatgcccctgacatcgaagtcgaggagatgggggaagattgggaggttcctgatcgtgagttaggggaagaagagaatgtcaagggaagcgagacagattcggttgatatcaccgagttaaacgaacccttttcatgcgaggatctagtctcacgagttacaaaattagacctccatacattcacgaggttgaatttgttgcgactcagtaccatgcgtcctcgcacatcccaaaggcctcatcttcctttcaccaattctgcgattatccccacagaggacgtggttgtctcagttcccattctttgatgtcgggtatcaataccctttcaccctttcataatagctatcctcagacgttatgacgtctctcccttccaataaacctcgcataactatcacatagccttagggttttaagcgatgtatatggaatatggtcggagggagccctcgatggaggatttcagttatttttatgataaaaagtgtgggtcacgataatggtttttacagccacttctgaaatcaatggggtagaaagcatgatttccaatatgggggatttgaaatcaaagtggttttacgtttttagagtaccaggggttaggagttcactgtttgtaattgattcatgaattgaaacgagcaacaaatgccaaggtctataatgaacttcaaaatctcctttgttattgattcttttttcaaaatgaacttcttagcattgaatttacttttatatctttatatttctccatgttgcctaatgaatattattggtgaaaaaacctatgcttaattaatgttctccaccatattaggtaactttactaaagataa

SEQ ID NO: 100829 - DNA, 581 bp, Cannabis sativa
tatcattaatttcgtataaacaattttttttttccatttaaattcattgataattcttttagttgcttttataggatcaattgtcgtggtgtgcatgtataacaattttaaaaaaaaaaaaaaaaatctcatatcaaatttaaaatgtcatactattattacttaatcatatttattatatctcctaacaaaattgggataaaattgaaccacaagatcatgattaaagataaattcacggaattgcaatttaaatacaaatagaaaatagagcatttcgtaaaagaaaaaaatagtgaattgaattttttcttagagcatcttcaaccatactccttagttaaaataaggagtgtgtcttaaaaaaaattactttaaccatgaaaaaataggagtattttaaatgtaggtaactccttactattttgctaaatttttttaatattattttaaaaaagacattgaattgcatttaaatcctttgaagtataagaaataatatttttatagtgattcttccctcatacaaataactaaacatttaatttttaaataataacataaacatttgattaacttaa

SEQ ID NO: 100830 - DNA, 551 bp, Cannabis sativa
gaccgatgtacagccctagttaccatcatacactcataatgattgaaaaattggttgatagaagaataaaaattaaataaccaaatgagaatctggttagggagttttatgctaactttgatgatagcattttgaacaagaaaagtaagtttctttatctttgcttatatttggggaaatcgatttcgttttgcccttccactattagttgtgtcttaaaaatcaaaactattttccatactattttcaatgaggattataagccttcttttaaagacatagtatttgagatcacatgcaactttgattttttttggaatggaaaggagttacctgtcatagtgctcactgagttctatagaggtcttcacaaaattgcattgtcaaattggtggggaaattcacacatctctactatcaactataacatagccaggtttctatttgtgttgtcgagcaaaattcacaacaccaaatgtatatgatattattaatgacaagaagaaaattatatgaagaacaattgcgagtattcaacctagagtggcaag

SEQ ID NO: 100831 - DNA, 573 bp, Cannabis sativa
tcatcaggacggtttttcctatttcatcttcgccttttgggtttgggtaagtctcgcctccaaaggcgagacttttgggcttcagatgggctcgggcccatctcccgtctggatcgggcattcttacatggaagggctttggtctaggcgattctcacttgattattccttagaattaccatgtgtcatccttccaaaaacacagataacaataactattctatatcaaattacattattgttttaaggtaattttcacttttatacaaataaatctactatattacaaagatcaaagaatgtgaagaaaaaaaaatgtaattacataattttatataattttataaatatttataattaaatatatttgtctataattttaatagttgattatcttcaactgattttttttttttaaaaaaaaaaacgatgacgtgaattcaattgggaactatttgtgaattatgagtataattggttgaaaaaataaagagtgaattaaatctaaagattttgttgaatgaaattgatctatgagaatactcaacaaaaagtagttcattcttagatgga

SEQ ID NO: 100832 - DNA, 1028 bp, Cannabis sativa
atatacaactagctaactagttaccatgtaaacaaggattcgaccatattgctagaaattaaggagagtccaataagtcacaaaatattattatgtattaataatatatccctttattttattatagaactatatatattttttgaccttcccaagcaagtctgaccaatacatataagctttccaaaaaaaatacatttataaattataacatctgtgaagatataaaaagagaaatgttaaaagatattattgatacctaacactttttttagtattttattgttattggtgtaattaattaatgaattttatataatttatataatatctttcaaagaatatcgcaaactaatcccaaagaaatacgtttagaatgtgctagacacaatatgtcttgttcattaacatttcagaaatacttagccataattagagcagttatttggatttgaggaaaaaaaaaatcaaccgcaaaaaaatacgtttagaaggtcttagagtgtcgaatttaacaatgatcataagaaaatttatacatacaagttccaataaccacgtttcaatattaaactatcaataataataaatgggatataaaaatccatgcactctaagaaagtctatatatatatatatttagagtattgctattaggcactagtggtgtctagcacttgacatgtcgcgttgcgattggctagcgataccctctaaaagttattatattaaattatatgggtctcgatacttagttggaccaataacgatattgattcataggagggtgttaggcaccactggtgccttttagcatttctcatatatttatgagcattgctattgggcatcagtagtgcctaccaccgatactctctaaaaattattatattaaactatataggattcgatactaaattaaatcaatagcgatattgacacgtaagagagtgtttggcagccctagtttcttttagctatttatatatataacattaattagttagccctagcgtatatcgtgatat

SEQ ID NO: 100833 - DNA, 929 bp, Cannabis sativa
gttcaaatttaaattgttattttttgtttaaaattatgttcatactgtgcttaactcatatttttctttaattttttatattgtattatctctgtaaaggatttagtttataaaagtttgtagattgtttttgtatatttttagttaaatttttatcttttatattattttaatttaaatttatcgttgttattttatccaaaataatgtttattgcaagaaaaataaaaataaaaatatgatatatatattttttaattttgttgaatgttttttttttataaaaaaaaaatacatgatatagtgacacgcattaaaagttgctgtaatttttaaagtttcacgttaaatgactttaaaaggctatagtaactcgtactaagagactctaaaataatttagtgacctcattgaagtgtcactatatactacttttacagtcacccacattagtgacgcgcaatgaaatgtcactataacaatttagagtctctcattgtgtgtcactaaaatctatttttatagtagtgtaagtcaaaaaagggaataggggtcccctaaccgctggaaagaggccccctctggatggctgtcaaaggaatctaacgatccataaagacaggcatcgagtgcaaaatatccaagcaacacagggaaatcaaaggaaaaatgttaatagaagtgcgaaagccgcttcaaactactagaaaagggcgtgcgaaaaaccctccatttttgactctcttctcaaaaaaaaagagagaaaataatgcatacacaacaaaagtagtagacaagtaaaatatacaatgacagaagacacgccatcggatgcccatcgaaggggcatcacgtcaacagcaatcatggccataatttcaaggaaaccaaacaaagcagatgaatagactgttgggaattattttacc

SEQ ID NO: 100834 - DNA, 518 bp, Cannabis sativa
attgtgaactattgctttgctgttgcttttcatgggatggcttatgtaccccctacactgtccattagctgttgttgacatgttgtagtagtagtagtatgactttaccattagcttatttgagaacttggcgaactgaaatttgtgacattttataggtcctgatggactaaaagtttggagaaaataaggatatatggagcaattagttatggttgcaagcctcagaaattagtatggtcaatattatttttttttgtgcaaagtttaagttattggaaacaatattacaatagtttgatacttacttaggtacagttgactgtttaatttatttttttcattgtgggtttgttggatgtaatttgagatcctgaaaaacaagatgaagaacagaaaagaaaagaatgacaatagtttgattcttatatagtaatcaaaatacacatctctctgcatgcatatatactttttaagtgatttatgcgacttgaaccttattgtgctatttttgtgtg

SEQ ID NO: 100835 - DNA, 546 bp, Cannabis sativa
  modified_base (519)..(520): a, c, t, g, unknown or other
ttatagaatatcgctaattaatcgcaaagtgatacgtttaaaacatattagacatcattggtgtctaatagtaatatttatatataaaatattgtgaaaatttatgtaactaaagttttacattggttaataaaaaagattatgagtgtataagaatggatactgttttattagtacgaggtttttaggaagatgttcaaaaattaaaattatgaggatttagtctcaaagcggataaactcgtactaatgtgagagttaaggtgaggtggtagcctaacaaaagtagaaggacgggccaaacaagtggtattggattaggagcccaacactggtaaattcctttatttgttttggtatttagaaaagtttttagtcaaaaattttttatgattgtatacgttttagttatataggatcacgtgtaaatttttagaaaatttcaaatagtttatattgccaaaaataagattcaaagagttacttattgattaccacacatataaaaaaataatcacanntgtaataaaatatttaaatcttattt

SEQ ID NO: 100836 - DNA, 590 bp, Cannabis sativa
actagaccaccacacacacgcgccgccgtcgctgtcaccatcagtccaacggaccgagcttgcggcgggtgtgatgtcactatattttttggagaaatttttttattaatttattattttttatgtaattaattaaaacagttttttaacgtgtttaattaataaggaaacaaagatattttcttgtcctgattttcatagtatcgttcccacaatctcacattctaatgttctcttctgaaatgtctatcttcccgttactaccttctgtgaattatctatataatgcatcagaactaatgggagaaatacatctttttctcatagaaaaatatatacagttatatacgattctattataaatgtattccggacagtagtacggttattgggtgtgctattttgacggttctctatcgtgcaataaagctcttatatattgttttcgactaggctattttatccaggagacgacgagaatgatagtctgcttagacagttttggacagtgccgcatgtcttaaagagagcgacctagtccacgactcatgtgaaattacttatcaaattattatatttattattcaaaa

SEQ ID NO: 100837 - DNA, 927 bp, Cannabis sativa
aagctctctttagcattcactcctgtaaaagcccggggttagatagatttgggtctggcttctacaaggatctctggaatgaaataggagatgatgtttctcaagcaattctggactttttctcttccgggagaatgccctattccttaaatgagactgtaatatttttaattcttaaggtgcagaatccttcttcagcaaaggattatagaccgatctcctgctacaacacaatctataaatgtatctcaaaaatgatttgttctagactctcagaagttctgccttcagttgtcaacagcaatcagggtgcgtttatcaaaaatagactcctggctcataatatcatgatctttcaagaccttctaaagggcaatactaggaagaatatatcggctaggtgtataatgaaaattgacctcagcaaggcctatgataaggtggactagaattttgtggaagacttgctcaggctcttctacttcccgtctcagtttatcaagtggattatgatttgcctgaagggtactagctatcatctgcttctcaatggtagaatccaaggtagcttcaaagggaaaaaaggtctctgtcaaggtgatccgatgtcccctcttctttttgttctaataatggattatcttacgaggttgttaagaacctactcaggtcaaaagggctttggattccatcctttatgtaagaatctccgattgactaacctgtgttttgcagatgacctgattatcttttgtaaaggtaattctaaatcggtgagacttttgagtgaagctttcaataaattctgcaatgatactggtttttcagctaacacctctaaatcgcatatctattttggaggggttagtgatgaggagaaagccaaaattctggatttggttcaaatagaagagggtagtttccctc

SEQ ID NO: 100838 - DNA, 915 bp, Cannabis sativa
tacctattaatatgtgttatattaattgaagagaaaacattagcataaataataattaattgtggagtaaaatttgaattaatattgaagtatttgaattaataaaattaagaagaaaaggaaaacaaatatattatatagtactatatattaaaaagaaaatgtgattataactaagtcttaatacatacaaaaataaaaaaaaaaaataaaaaaagtgtaattaaggaggccaatatatttgtgtgcattagtattgctaaacaacacactcatctttaaatattattccctctttcacaataataatgtttagtagtttattattagaagtagaacacctctccaatgagttgtccttaattggggtactcctcttcactttcatactcttctccttcaccttcaatgggtctttcttggtccttattttattagtcctcatctgcaaattaataacatcaacacattaatcatgatcatgattattattttttaagataataagataaagataagaggggtaattaagtatacctttttttgtggatcttctgtaagcaatttattattcaaatagttagcgaattaatattttatacattgtgaagatttgttgcgccacaattttgttggctttgatgccttttaaagcttttgcgcttatttttatagcttgcccctaattatttatgattaattgttccattttttcatgagaaataaaagttttcaaaggaagttttgcggtattgagcaccacgagcttagtttgaataggtgttgttatattgtcagaagataatatagtccatgttgcgttgagcaaacccctcaaacattagtcatagtgggtacattaaaaacattattcgttgtttatttcattattttgtttacttccaaagaaaattt

SEQ ID NO: 100839 - DNA, 1266 bp, Cannabis sativa
  modified_base (1066)..(1079): a, c, t, g, unknown or other
acctagattgggatcgatacccgaacccagacccaactcagacctagacttgtgccaggacttgtgacctagaacctggaacccagcacctgtgacccgggacctagaccagatctcagagatataccaaaacttggacccagacccagaccaagacccgaacccagacctgggccaaaacccaaacccagatctagacccagacctagacccagacccagacacagacccagactcgtaccaaaactcagacacgaacccgagactcaaacttgaacccgggactcggacttggatcgagccttgaacctgtactgggactagaacccgattgggaccaggacagggacttgggacctgagactcggacttgggacctgagaaccaaaccgtgacctagattggggacctgggccccaaacccgaacctggaccaagacctagaccaaggatccagacctagatgggggacttggacccaaaactgggcccgaccgggaccgagacccaaaacttcacccaaaactcaagacacaggactcaaccttggacccaaaacctaggaactgactactgggacacaactctgaacccaaacccaaaccaagaccgagatatgaatctagacctaaggctttatcctgacccatagtcagtatttgaatttaggacccaaacccagatccgtaccaagactcggacctgaacccgaactgggatccaaacccgatcttagactcggaattggaatcggaccaggactgggatgagaacccagacctgggactataacaggacccaaacctaaaccaaaacttagaccaaaacacacttcggtacttggacccagactgggacccatgatctggaacctaaaccaagaccgggacctggacccagaccaagacccaaacctaaaaattggggccaaacccaggacccaagaaccaaactcagacttgggacccaaaacctaaacccaaactaggatgggactcgaacccaaatcgggacctagactcggacaggaacctgagacatgaacccgaaccagaacacaaacttnnnnnnnnnnnnnnacctaggacccgaacatagatgggggacctagacctaggaattggtcccccaagtcgggaccagaacttgggcctcagaacttgaattgcaatttgggacctgaccatagacccaaacctggacgtaggacccacctcgggacttgggatctgggactcgatgcttggactcgacccgtacctcgtg

SEQ ID NO: 100840 - DNA, 917 bp, Cannabis sativa
caattgaaatcgaaagccctaacacttactcactattaatttccttattaatttacttgcttcctactttcgctatttgtcttatttttctaaatttaattgtatctcaaatttttattcaaccaaatagaagtaaaagttttattttaatgtacttaactacaatcctcgtgggatcaacttcactcctggtgagtctattacttgttatgatacatacacttgcatgcaaaataccacaccaacgactaatggataccctagagttgaataagaccgaccttgatcaaagttaattatgttggttgttagggttcatatcaaagtcgcaaaaaaaatcaaatttagtttttaaataaaaaaaaaatactgaaacaggtactgaaaaaacaactagaacacaccatgataatctaaatattgtacaaggtccaattagggttaggaccaaaagcatgggtatcccaaacagttctagaagaaaatcaaatgatggcatacaaggcgatcaacaatccatactttacggaggtcgggaccataatgagcgaacgtgtcacttgaggtcagaattggcctcttgggtaggaacatcatcttacacaagaaaaactcacacttctgcttcacatatactttacacacatagatgctaagcccattaactattgatcactaacaatatatataagctaacacaacaaagaactatccaatcgactcaaattttaataaaacttataaaaaataatgtaagcccaaataaaagtctaatataccttccatctagcatcttttaagtttttagattgatttaatttatgttctcttcattattattttcatgaactatttttcaatattttgaaacctttttataagttaggtcaatttttttttcttaactttctgaattt

SEQ ID NO: 100841 - DNA, 701 bp, Cannabis sativa
tattttatgcaatatttttatgtaaaattttatgtgatattaatttttattggcagctaaatatatagtataaattaaagtttaacacaatattatataaaaatttaatatataattaaatttaatataagaaaatacaatacaatataatttaatactatgtttgaaaccaccctatgagtaattaaatagcatagaaaacatatatatatatacttgatcactctatagaaataattgaaaaataacatagattggtattgctatactaatcacataaatgttccattaaaatagtcttttaaaaaatattaggctactaactatatgagctaaaaaattaattgtcaactcataatttaataaaataattaaaatattaataatataagcttaagataaaatcgttacataagtgaacagtgcagtgccacgtcaagtgaaaaagctgagtgggatcgatctaaccatatacccctctaattcctcagtcacgtcttaacaaatcaacaaattacatgtgcacttatttattgcaaggtatatatcagatgtatactacttctatttcaaaattggtctcgttttaatttatggtggactaatatatatatacattaccatgtgtaaatatattatcaactacatctgctagatatataaagattatggtggactaataactcaattttttatatgag

SEQ ID NO: 100842 - DNA, 515 bp, Cannabis sativa
tataaaactgtcgactaaatcgttggctatagtaaaactgttagtttttagccgtcggcgattcccatacttcaatttcacccgtttcacatctgaaatttcattttccgcatgcatcttagattttaaatttttattttttccatcttaaattttatttccctcctcttaatatataaatcccgcaaaaaaatcatctcttatttttttaaagtcatttataaatttcatttcatttcatttctcggctctcttttctctgcgaccacgagccacactctacgtccctctcctccactctctctcgctatgtccctctccttcgctctcttgtgacaacaaaaaggtaaacacaatattctcttattcattattttaatttctattagtcatgatttggtttgttaatctagatctgtgtgtgttcaaaataagtttcgaagcttgcaaatcgaagaaagtttcgagaattgtcaagtgaaaagcaatcagaaacttgtaaaagaaaatttcaa

SEQ ID NO: 100843 - DNA, 550 bp, Cannabis sativa
gtaacggttagtatgaatatgcaagaagttcaaatattaattatactattgtgtagtgttctcttctcatattaaagatcaaatacggttacttttgaattaatacctgaaatttaagagattatatagcacacagcttatgaaaatactaaaattgatgtcacagatataataatacccgatcagcgaataagctctctttcttatttgtcttgaacaaagccagttgaaactcttcctacaacacaggtgtaaagcgaacgagttaaagactacttaatcttaatcactttttaaaccacaaaggaagataacaaaccttgttaattaatccatcatcgatcacagcactgctgatcttcttaaaaagttcataaagcgcttcaatttcgcttacactgactgcattcaatagacataattttccattgtcaatagttagaaacagtgcaaataatttccaatgattccatactttaaattctttctttctacattcaataagcaaagaatattcattgattactcctactttatactctctctctct

SEQ ID NO: 100844 - DNA, 996 bp, Cannabis sativa
gtagggaacttcccaaggcgggggtgaagatgtggatcctcaacttggggacccaagcagcaatgttggacctgtggaagaactagaagaaatcgagattgatccagatatctcggctaggaagctaaaaattttggaaaaggtttgttgctcgaagtagaatcaacattgataaaatttttaagagtaaacctggacgttttttgctggtgacatgaggatatggtcggaattgatccttctataatgtggcacgtcctaaatattgatccaaacttctgacctgttcagcaaaagtgaaggctattggacaaagatcaagcagtagccctgaaggaagaggtagagaagctacgcaaccataatttcataattgaagctttctacccagcttgggttgcaaatcccgtactggtgcccaagccgaacaaaaaatggcgagtatgtactgatttcacagacctcaagaaggcatgcccaaaagactattttccacatccaagaatcgattagcttgtggatgcaacagctgggcacaaaatattaagcttcatggacgcttaataggggtacaatcaaatcaaaatgcatccatcggaccaagaacatacaagtttccgaatagatatgggtctatattgctacaaagtcatgccatttggtctcaaaaatgctggagccacatacccaagattggtagacaagatgtttaaagaccagatcggaggaaacatggaagtatatgtgcacgatatgctcctcaaatctaggaaggcggggggcatatagatgacctggactaatgcttcgaagtcctcaggaagtacaacatgaaactaaatctcttacagttctccttcagagtaatttcaggaaagtttttggactttattgtcgatgcccgaggaattgaagccaatccatagaagattcaagccctcctggatatgaagtccccaacaagaaccaagaaagtacaaagtttgattggtcgga

SEQ ID NO: 100845 - DNA, 587 bp, Cannabis sativa
  modified_base (61)..(62): a, c, t, g, unknown or other
cgctcttccgatctttctttattgatattgaataaaatggattacattgaaatagagtttnntttagggcataaaactcaacaccttcttcttccccttttaaattacgcccctaaacgacgattattcgagcttgcccaagattatgtgtcacacagattacccagatggagatttcggctgaggaagtctccgatagttcaattcaattatgaatttctcttctgcgacaataactccaagcatctgtggcagctgcttctcctctttcaattgaaacccatgtttttggtatttcctccaaaaatcaatcaattcatttttttattctacgactttcatttttgtagctttgacccaaaaatcaatcgcttctttttcttcttctctctctcagaaatctttgctatcttttgatattggagggttggaattcaaatctttgttaccttagaatggagatggacacaactaaattttccttggagcggtctttcgatgccgatttcacctaggctcgacaaccaaaagggattttatgatgaaggtaactctgtctgtatctcttactcttttttttttttttt

SEQ ID NO: 100846 - DNA, 943 bp, Cannabis sativa
  modified_base (757)..(762): a, c, t, g, unknown or other
ttttatcatttaaaataatttttttttttatgatctacattaatgttttttttgagatttactaaaaaaaatattgaatatttctcatttttatttgaggggggacgatttgatagttttcaaaatttagggggtaaagtttctaatttataaagacacgtcagcatttaaacggaataataggacaaaaccttactgaaggactaaatttctgtatatgcaaaagttcaagagaagttcttaacaagctgtatattttaagggccaaaatcaatattgtcgaaagttcagtgggcgaaattgccaattattctaagtattatgtatagttttacattattaatatatatttttacaaactaacgtttataacaacataagccaataaaacatcattatttaaaacaggaacaaaggtaggaatttatctttaggaggggggccaaaaggtaaaaaataattttaaaaggagtttacatattttttataaaacaaaataaattgaagaggttgatcttattaactaattgataaaataaaatattatattgactttcgatttataagagtagaatggaataaaaaagttaaagtatattattattaaaaaaagcgtaattgcggcctaaaatacttaagtttatctctcggttgcagataattaatacctaagtttaatttttaacggtaataatacctataggtacttaactgttaagtgtcaagttattatctacgtgtcattttcttattagtnnnnnnaaattaattttaaataaaaaaataaatttattaacctagaccaatcaggaactgccacgtagccattgactaacacttaatgatcatgtacctactaaagttccaaaaatataacttaggcattattaccgtcaaaaaataaacttgaatatttatctataaccagaaattaaacttaagt

SEQ ID NO: 100847 - DNA, 657 bp, Cannabis sativa
  modified_base (459)..(460): a, c, t, g, unknown or other
atgaagaaacaaatagaaaaggaaaaaaaaaccattaaacctagatctgaacctctctctcctcttttttgcatccatcaactacgcttctacccccatcaagcttgactgtttcttggcatcgacgagcaaacaaaggccacgaatagggatgcacaatggacatggaattggcggggagtgctcccctcgtccctatccccgcttatttcccattggggatagggtgggaaatctcctaaaagggcagggtcagtgcggggaatttcctaaaataaataaagtttacaataaaaatttaaatatataaaaatattaaattacataaaaattaaaattttacacattaattattattcaataaattaattatctaaaacacaatttaaaatttacgaaaagaatactaatatactaaacaaatgtaaacatacattataaattataaaatattattannaatataaaataaaatactaaatgggtccctgccggggcgggaagtgtgatcctcgtccctgccccatttaacattcggggacaaaaagtaatccccgtccctgttttccatttagacgggaaattcctgcccctaatggggcgggtcccagcggggtcccatccccatcgagaaaatgtgcatccctagccacgaat

SEQ ID NO: 100848 - DNA, 704 bp, Cannabis sativa
aaaattggaaaaactgcatgtgcaaattagtttgaaaaaaggtcaaaaatcgcaccacccgcaccgcgaacactcctattataggtagagagtgagcactcctaaacttggtatttctttaaaattgagaaaagactacaagtttaataagacaagaaatattctattttacataaatttttcgaacaagtggagtaacgttgttctaaatttattttattaatgtttttagttttatattactttttatgtatgggtatgtgtgtatatattaatattgtatatttaaaataaataaaatatatttaaagatggaataaaaaataatgaatagataattgatagatagtgtgatgtaaaagtttatagtaaaataaactaagtagaatttagtaaaggatagagaagaaaactatgcaccaaacaaaactagaataccacattttaaaataaaaaatatctacaggagattagatcatttaattctctcgatagataacgacagcacacaaataattaactaaaataaagctgaactcttttgtaaactttttctttatttccaataacatggctgctatgaactttccaatcataaaattattccacgacattgccaacttgtttaagattttaatatctacaatatcacatgggaaaataaacaaataaatctacgaatctttttctttttcatttgatga

SEQ ID NO: 100849 - DNA, 804 bp, Cannabis sativa
taatcttacataatataattaacataatatatatttaaatattttatatgtaaatcatgttaattttacataacacatttttatttttgatgaacttataatctatttgaccacaaaaattaataaataaaaaataggttcaaattagtcattttgaaacctatcataaatttgatgatagattaatacattgactaattgcatgctaacatattaatgatttttttattacatcacatattaaaatttttccttttttttaatgtgggattaatttttttaaaaaaatactgtgtttttttttttcaaaaatagtgtattttttatactaggtactatgttaagtttcctctattgttataatatttttttttaattattttattttgtgtttcactattgttttataaaaaaaaaaacaatatatttgaaaaaaattctatgtgatataattgttgtaaaagttaattaaaattctattatttttataagtttccttaatatatagtagaaattacgtaaattatggaatttttttagtgtttatttttttatgacataattaaataatgcatttggtgtatgaattttgtattttgtttacatttttgttgaatttttatgtatatttttgtaaataaaaccaattttatcatattttatagttttttcgtatctcactgcaaacaattactttgacaaagctaagtcagtttctcgtccacttctaagttctcatcatcggtgctgatctccaccacccttctctcattcagtaaacatgaagaggaggaatcataaccc

SEQ ID NO: 100850 - DNA, 614 bp, Cannabis sativa
aaaatggtcattttattatgtaagacccataattttttaccatcatcaaataatatattcaaaatcaaaaacaacattcgagtttcttgtataatttattatcaaataagagtaactaaatattacaattaagtatgtatactaactaattagtaaccttattatttgatacttaaaagctacttgatagtatctaaataagtctattttatcgaataattttgatagactttttgcaaaatttgtaagaaaactaaatagtatcttaaacattagtttcattacaaaacttttttttagctaccattatgttacattgttgtttaaaatactttatattaatttttttagtaacatttttattacctttaatcagatataataaagtataagcacttatcctataacttattagtaaaattagtatatataatcattttaaaggaatatagcatcatctccaaattggttactaaaatgattgtagcaaggttcaaggaggtgcttcttttagtaatttctgaaacacaaagtatttttttatcgaatagactgattattgacaatattttggtggcttttgagttgggtcatgcaataaaaaataaagccac

SEQ ID NO: 100851 - DNA, 543 bp, Cannabis sativa
tttttttaaacattgtaactatatacatatacttttgagaaacaaaaaatgagagtaaatatactgtccatttatttatcaaaagtgaatagacctatgtagatttcataaactcagtgatgtattgtgcccattcatctcgtacttcattgatctcatcctttgtgtaagaggtctttccaccacactaaaacaaaaataaatattgcacaaattaattacactacataacattagaacttaaataataaacatattatatggacttacattagaagttaaccatcgcattgaatcttcatttatgacgaagtctttcatcatcctcaaaacatagaatccacattgtaatgatcctaatggttgacgaggacacttaattgttttcctcatgacttccttagcttttgtattattggtgcgcaaatatcgaaagagattacgcaataaaaatacaaacagtaaaacattgttaactttaaattatttaagagtatatataataaataaattaaattaccgagaaatgagggatttaatagc

SEQ ID NO: 100852 - DNA, 1008 bp, Cannabis sativa
gttcttcctcaaattcttttagtttctagctgaatttactcccaagctcaacttagaagccttgaggtaagtctttgttgcatgttttccctaaattctagggctgaacatttatacccgtaaatctgaaaacccgaccacccgccccgacccgctaccgaaaatagccgaaaattttgaaacccgtgtggtcgggtcgggtctaacccgaaaatacacagcacgggtgtcgggttcgaattttaaaacaatgcatttatttagtcgggttgtaacctgatacccgacctgtacgaaattactttcgtagactgtgatatgccagccaattttgatatgccttactggcatttaagccgaccttcaaatttcattgtttgtttctttgtttctttaattataaatgttggatttatatgtttgccatgtctgtgtttgtttgaaacgtgctacagggaaataatagaatcaatgggatttgaatatatatggtggccataggctcatagcattgatttcaatatacatgaatatacagaaatcggcggacaatgactgtgatgcaagaccatcgatttcaatatacataatttatatccagatgtacatgaatataaattataatttatatcatatataatgcaattttttatttaaacttatatgctttaattcaataaagctcaaaaaaatgttaaaaatagaaaaaaaaaattaaaaattaagtagttatatttgggcccaaaaatgaatcattcagattaatctaataaaacccgaacccgacgacattaaactcgccaaacctgacccgaaacccgccatacccgaccacccgaaactcgggttcggttacaaatttcaaacacccgaaatccgaaaattcgaacccgaccacccgaaaacccgaaaacccgacccgtgtggagccctactaaattcttttacttttaagttagttttggttggggttttggtttttcaagggggctgcaagttgtttggtga

SEQ ID NO: 100853 - DNA, 1434 bp, Cannabis sativa
  modified_base (1385)..(1391): a, c, t, g, unknown or other
gctaaaagatcagattagatcaaatagctttgatgtaagttaatacggtaacaaacacattttcgatcaataaatgaataaagatgtttatttcaaacttcaaattgattcgaattcactagcatgttgttttaccatccagtgcgtacaaaaggtttggtcgaacccaaaaacccgaatagacaaaagagcatacttggaaaaaattataaatgaccaagagtcataagtttgctcggtcacttcgggggcacctatacctgtacaaagcatttggtaaaaataaaacaaacacgattgcttgatgattataaacagatgacgaaattcattaaagatcacaaaagcacgtaaaactgggattaaaagctgcccgaccagcctgttgtctgaaaaatgaaaaataattccaagttcaaagaccgcttggccggttacgttgtcattaaaatggccttatgttcggacaaatataaaaaaaaaaaagattaaaagagaagtattcagacggctggaggcccaagctccttctacgaggcttctaggctggtaggagctagagcatctgctatctcagcgaggggcaagtccacgttctgaccagaagtagaagtggttgcctcggaatctccattggccacctgggaagcacagtactcgagatacatgtctttggcatcacccaggtaatcaaaatttgcctgaggattagccttccaaaagtcatagaaaatctcgagaccagctgtctctaaggcattcaccttccctttaagcctctctactttagtgttaacctcctcctcctaggacttcttctctgcctccatcctgcggaaggtagttcaaagaacctccctttcttcctgaaggttgttaacttcttgggacaaggaggtcatggcagcttaaagttgatcagaagcctcaaatccttggtcagctcagccaccttcttctcggtagcaagaagcttttttttacttcacccagttccattcagacggccccgagttgaaccctggcttcatcagcgtccttcctagccaagtccacttttgccctcatggtgttggacatggcagtgttctttgaggcagctgacttagctcaggaagaaacgtaagccatcttcagactagtctgcataaggcaaaaaacattaaaatctaaaccaagaaggattaaaggaatctgtgaaggaagactcacccttgtaaactccttcaggactccttccatcaacagctctagagaaggctcgttgtcaacaccggccatttgctcatttaccttagggaccaatcgattcatgttgtgggtgagcatatccttacctctcttagtctctggatgaagtgattgttggaattattttactaggnnnnnnnatctactcacaagtattttgtttaacatcctaaatatgaacat

SEQ ID NO: 100854 - DNA, 819 bp, Cannabis sativa
ccgatcatatgccttcgccatatccaacttcaaagcaactttcgatccatttcgaaaacgatttttcctcatcacatggagactctcataccccacaatagcattatcatggataagccgccccttaacaaacgcgctctgagaatcagagactacatgaccaagagtggaacgcatcctattaaccaagcattttgaaacaatcttatagattacattgcataaactaataggcctaaattcctcaatcctttgcggcttatcaacttccgggatcaatgctactaccgtatcattaagacatttcaaatcagccccctgattcagcacattcaaacatgtagcaataacatcttccttcagtttagaccaaaatttctgataaaaaagtgcgggaggtccatccacacccggtgccttagtaggattcatttccttcactgctttcaccacttcttcccctgtaaattcgaccactaaatcctcattcatagccgaagtcacttttggctgaatcacccccagaacctcctgaaatacatcttcattaatctcggaactagtaaataaccttgtataataatcctccacaatcttacacaccacctccttatcatcttgccaaatgcccatggaatcttgcaatcctttaatttcattctttttccggcgagaggatgctttgtgatgaaagtactttgtgtttctgtccccccattgcaaccataaagctcgactccgctgtctccaatattgctcatccttctccatcaacccatttagtttatcctccatttgttgaatcaactcccacacatc

SEQ ID NO: 100855 - DNA, 665 bp, Cannabis sativa
aattctggttcagtgcaggaaagaacaaaaattctataactcaaccaaatcaaccctaattcgaaccaagctttccagacctattttatgcaaccgagagaacataaccaagcaataaaacaactacaaaacctcaaaatcaaattacaccattaatgagccaagctttagttcaaaaactcaaagcttgctcaaacaacaaaccagccaacacaacaagctgaaaacaagatatctaagcataattcatccactgaaaacaacaacaaacactagcagcaactacaacaactaaaatccctaaaacatgcatactaccatagcttaaaacccaagaaatcaaaaagaaggttgctaaggactataccttggcttggatcacgtaagacttgctagaaagagcttgaattgctgaagaataatcccaaaccctagctggctctagggatttcgagagatagaaggagagagttgagtttgagagagaaaatgagatttttgggtaattttctattatttgccaattaatgagataatcttgatttacaccaactaatttagcttattatcaactaaaaaatctgttttaatacctcccacaaaagaacaaaatacagctaccaaattgaccattttgccccttaaacactaaaactcactaaaag

SEQ ID NO: 100856 - DNA, 930 bp, Cannabis sativa
tctattatgttagcttccacaaacaaacctaactggaggttgaatctctctataggttctatcacgagccaactgataacgtttcagacctgtctgtttgaacccttttggcacctctatttggtctttgttatcttattcttctagctccataacaacttctgactacgtattatcttccagttccatactatctttcacttgtgaaccttcttctgggagcttcgtttcatattccacttccacatttgtggtgtctttgtttcctatttttcttgtaacacacaaagacacactacccttcccacaggttaagtgaggatattctaattcattgaaaataacacttcatagcaatcacaatctttggtttaccctccctagaaatgtagattctataccccgtggttcctaacgcataacctaggaaagctcccttcacggacctaggttccagcttgtcgataattggtgtacacatgctgtacaaccaaatgtctttaaatgcaataggttaggggttcagttgtaccaccttttataaggtgtcttaaggtccataaatctattcgggctcctgttaataaggtaagttacggttgctaaggcttctccccaaaatggtttttctaatccaaaactaaactgtaaacatctaactttgttcaataaggttcgattcatccttttagcaaaaccattttgctccggggtcttcactacggttctatgcctagtgattccaaattcttgacacattttgtcaaattcggagttaacaaactccaacccattatcagtcctaaggttcttaattttgagatcagattggttttctacttgagtttttcaaattctaaactgttccagacactcatccttagtggttaacaagtaggtccaaatacaccgactataatcatcaactat

SEQ ID NO: 100857 - DNA, 1401 bp, Cannabis sativa
attttttagggaaatcatgtagtaacaatttttgtttgtaactgtaataattaaaaataaaaaatatgtaattattattttactttattaaatatttggaatttttttttataatttaattactatattattcctaataatatgttgctttttcaattgtagacaattaacctaacaaagaagccaaggctacaacaaaggagaactcaagagatgattattggatggattctattattttagttttgtttttaagttttactcactacagggtttttttttttagaatcggactgtataataattttaagtttatattttttttttgtattaacattttggatactcaactaagatgtagatttttttgcattaaattttaattagatgattcttatatgaataaataatggtaataaagaaaattaaacttaggacaaaattttaaaagggttatacaacccaaaccaacccaacccaacccaacccgatgcatagtttgttgggttgggttgtacagaaaagaagttttgaatgggttagaaatttccaggccgacgtaattgggttggctcattaaaataatttcaatccggccaacccaacccgtgcacagccctaattgtttgttcttgtttcttgtaatggaagaattgaattgatgagcaatttaaattgtgcctaaatgatgaattggattagttcatacctcttgattcatttgtcttttttttttttttttggaaaagatacttattagttatttattttttgagataacattgtatacaaaatacatcattctctttgtaaatcaacttctttagtttaatcccttttagctaaaaaaaaaatctgcaaaaaaacttttttggtttaatcccttaataatggaatttaactatacaatgaaataaaatttagtatttaatgaagtgtgttatactccatatgccagagagaaatttattttatttcttgtgtcatagtagtcaatattaatattgaaattaaggttgaacgtgaagaaaattttaatgatagtggttgattttatttttgagattgagagttgttatggtaagttaaaagaagatatataaaattagaatatgagtggagaatgacaagagtaaaagagagagtactgtatctatatatatttatttttttcttaaacatagtcttgtaaacatctctaattgaaatcattaaatctaatatcaatttttgtttaaatgaaaataaataagatattaatatttttgaaattggaattatattttgcaggaagaagaagttgaagtaagtaataatacttcttcagagtttgattctagtgatattttctcaacaaatttggtactacaacatatgtattttttatattttgctcacaag

SEQ ID NO: 100858 - DNA, 510 bp, Cannabis sativa
tgtgggaacatcgggtggcctttcgaatacctgaacccttgaaaggaagtcgtgcgaagagagatccatccaagtattgccaatatcataaagacattggccataccaccaacgagtgtcgaaacttgagggatgagatagagactcttatacgtaatgggcctcttgctcattatgcaaggaataggcaatacaaccaacaaggagcaaatgcacaacaacctgttgccccacgtgccaatgtgcaaccacagggggcacctggaaacaatactcctaacccgccgacacaaccacaagggggacaactgggacataacccggacattcctccacttgtggaaggagaggacgtattggtcatatcaggaggaccacactttgcagggaccaccaatggggctcaaaagagatatattaatgagctcaagaactcagataagactcctttcacaccagaacaacgtgctcccaagcaaagtcgaatggaggaccaaaccataacatttt

SEQ ID NO: 100859 - DNA, 579 bp, Cannabis sativa
tttaatgaagaaaagaatatcattattggaaaaattttaaataggtttagaggaatataatatagcactaatctcatctcacaaacgataatagataaaattaaaaagatttagacaacgtactccatcatgaatacgaattccaccctaaatgaaagataaagactagaggtgttcatataattcctaatttgtggttgcaaactttaattagttcggaccaaactatttgagattagattaaataaattcggtgtgaataatttaatcaatccggatcgttttatattttctggttcagtcacgttttactagtagtcatgatataattcttaccaattatttcataaattaattatttttgaattctaaatgtaaataatataaactgcgaaatcttttaagtaaaatatatttatttaataaaatatttagtatgaatcattaaaattgttgcactaaaaagtaaaaaaattatactaaattaatgtatattctacatcaaattggtataattactagaaatggtattagaagatatttttgctccattcctctttaaatttttaaagaatcttt

SEQ ID NO: 100860 - DNA, 507 bp, Cannabis sativa
  modified_base (176)..(185): a, c, t, g, unknown or other
gacatgtcatttttcacattgtggtcgtttttcgtcttgcgaggcagccatttgatgagtaaaacgacgtgtcgttttgcgttttgcaaaaaacgacatattgtttaggcaatgtaatttttcaaaaaaaaaaggaaaaaaaaattctaaattttttataatttttttatttattnnnnnnnnnnattattttcctatttttgtgttaatttagtcaattttccattttttttaatacatatatctattataaattgaaaagggaaatttatttaatttggtaatttattacatgatttatttaggcatgtaataattgtgctaatttgtataattgtgcatttaattatatattaccaagtttatgtaatttattgtctaaactaattttgaaaaatctgcctttaatttcatattaaggaattggcatttaataaattatcatactttaattgtatttatttgacaaatttgtatttaatgcaattaatttagatttgtatgatt

SEQ ID NO: 100861 - DNA, 504 bp, Cannabis sativa
  modified_base (291)..(306): a, c, t, g, unknown or other
  modified_base (450)..(456): a, c, t, g, unknown or other
attggatttaattaatgacattttatatctctcaaatatatattttattggtgaaattttttcatttgtatttattttataaatttattattagagtttaaatgcaatttatattttaagaataattattttcataaatgaaaaaattattggatacttccattacaattttttttacctttagtcacaacaaaacttgtaattaaaaataaaaaaagttatgattaattatatattattattcctatgttgtgactaggtccgtgacaaaaagtattagtcacaaaaatnnnnnnnnnnnnnnnntaaatatatttttagtcacaaaatatttgttgtgactaaaactaaattagtggcagctagtttgtatctaaaaactatatttagtcacaattaacattttgttgtgactaaaagtcacgtttagtcacaaaaaatttatgttgnnnnnnnaaaattgtcactaaaagtagcaacttatgcacttgttacacaacaacc

SEQ ID NO: 100862 - DNA, 686 bp, Cannabis sativa
tgcagttcaacgatcttttatatctattgaactctatactatattcataactccacaagatctttataacacttaggggtggaagaagttatttatatatgtagttcaaacactttcaactttgaactctagactatactcaacacaccacgaaatctttatggcacacatattttgattagacatggatatagtataataaacaaattagcaaattttagaacttattcttgatcttgtaattattccaattaacatgttactgtaataatagatatgataccaataaagttcttgcacatagtatcacaatatcttatcttagtgggagaattttaaaattctagtccttattatttggatgacactagtgatagcttactatgttatgatcatgataggaattttagaataaactgagaaagtaaatctaaccatttatatggatagcaataacttatcagaacaataaagataagatatgaagttttgccaagtctattcgaatgacttaggcaaaattcctaatccttatgaaaagttttatggtatctagtatgataacttaatcttaagcaagtattttacattaatgttaatactagaatgctatgttagtctagatggaacttatgttttcagactaagataatatgtcacaataagatgtccctaagaaccaatag

SEQ ID NO: 100863 - DNA, 740 bp, Cannabis sativa
cataataagtgtaattattgactcttctattgtgtggtggctgaaagatttcacaaggaagcttggaaggatgagaagtttataagttcttttgatgagcttgaagacttaagtgaagatgaaggcaaccaacttgcatcggtggaacccgtgaaacctatccctaaattcaagaagccctttgaatctttggagttgaaggaaagtaatttcaagctcccgaaaccctccatccaagaaccacagaagttggagttgaaacccttgccaagccatctgaagtatgcctatttgggggagaatgacacgctgccagttattgtagcagcaaatttagaagttgaagatgaaggtgccttgctagaggtgttaaaaaagcataagaaagcaatcgggtggactatggcggacataaggggtattagtccaacgatttgcatgcacaagatactcttagaagctggttgtagtaattctgttgagcattagcaaagattgaatcccgtcatgaaagaagcggtgcgaaaagaatgatcaagtggctagattatggtattgtgtacccaatttcagatagctcatgggtttgtccttttcaatgtgtgcccaagaaaggaggagtcacggtggtggctagtgagaataatgagttgattcttactcgaaccgtgaccggttggagggtgtgtatggactatcggaagctaaacaatgcaactcggaaagatcatttcccgctg

SEQ ID NO: 100864 - DNA, 656 bp, Cannabis sativa
attttcttccattgttataaaatctctaacaggtctttgatccaactaagagctttttaaacgtccatcacttcagttagttctatagaaaaaatgctattgggtatagaattttaatattttcggagagtatcgctcattaattgcaagacaatatttttagaaaatgttaaataccattagtatttaataccaatactaaaaaaagaatatgctaagtacattattcatttagataaatttagaaagaaaaaaattaatatagaattttttacagaaaaatatataaataaaacttttattattgtggaggattttttttagaatatatattttcataaataacaaaaaaaattaaaaaatataaatttacagtttttttatggattcaattttttgtttgagatttttttattttcacactttaaaataattttatttgcatttatacgaaattttatatagaaatttctattgcaactaacagagtaatttaaattgtaactaaaaaatcatataacgacctacatagaaactactagagaaactattttaaaaatctaaaccgtaaatttttgaaagaaaaatttaaaaaattgtatatagggtattttttttttatatatatataaaaatatatgtagattgaattgaat

SEQ ID NO: 100865 - DNA, 1588 bp, Cannabis sativa
  modified_base (1551)..(1551): a, c, t, g, unknown or other
ggtagaagctttcaagaagggaaatgttgggtatgtccaacccgaaattgctgagatcgtaggcatcaaagaagcgttgagttggattgtgactcatccgtgggacaatatagtgttagaaatggacagtttggtgtgtgtccaagcagtccacagtaaagtctttatgtcctcacagtttggttttattgttcaagatgttaggaatttacttttggctttatcttttgttgagttatgttttgttaaatgatctgcaaacaagttggttcattgcttggcaagagactcttgtttctctacagggtctgtgcttcagttggaggatttttcctctgaagtgcgttctattattttgaatgagtttattcattaataaatctcttgatttattcaaaaaaaaagtgtttattattttttattgaactttatacattaatcatatattaaactaacaatagtagaaaattaaagtaaaaatataaaagatcaataaaaataatattatttaagaatgaaaggtcaaataaataaaaaaaaaatagaacaaaacatggatgaaaaggtcactctactcactctatccttctttttaattttttattttgattaattgattatttttaccactaattaaagaaaaattacataaaataaatatgaaagtaagattatttttttctgttgaatatttttcttctaatttgtttatatatatttaaacaaatatatttattaaatgaaaaactatcaaaatataataatttagaagaataattataaaaatattcgatccaagaataatttaaaccaatatttttctaatatatattatcattatgaaaattttgtcttggaactgccgtgggcttgggctgccatggaatgttcagttcctaaaagaacttgaattcaaaaaaggcctagtgttgtttttttgggtgagacgttaagtaatcaattgaagatggatcgggtttgtatgagtttgggctttgaggggtgtttgttgttgcggcccaaggaaggagcgggggcttagcattgttatggaagaatcaagaagaggtcaaggttgagtcgttttccacaaatcatatagatagtcttataacacttgatggacagagggaatttcggttcactgcaatctatggggaacctaatagaagtttaagaaagaacacctgggatctattacagactctatgtgggcgttctaccgctccttggtgtttaatgggagatttcaacaatgtgctttgtgagggtgagaagctcagtggattgccttacccatcgtggcttattgacggctttcaggaggtggttaagcaatgtgggctgattgatttggatctgtgtggccatccttttacgtgggagaagagtagagacactgctcattggatagaagcccggttggacagagctctagtgagtaattcttggttaaataatttctcttcatctaaagtgtttaatcttgagatttctctgtcagatcatagtccccttatgctagatgttctgtaacaccctaactatctnaggcgtattacgtgattttaaaacgtactgtgcagct

SEQ ID NO: 100866 - DNA, 891 bp, Cannabis sativa
agtccatagtgtcaagatcttcagccgaggctgagtatcgagctatggctaacactacatgtgagcttgtttggcttttgtccatcttgaaagagttaaacatcgagcatgtaggaccagccattctacattgtgacaacaaagcagcccaacaaattgatgcaaatccagtcttccatgagagaacaaagcatatagaaatagattgtcaccttgtaagagacaaagtacaagaaggagtgataaaaactgctcacatttctagcaaaaaccagatagccgatatctgcaccaaggccttactgccgagccaatttgaagttctcaagagtaagatggggatttgtaacatttactctccaccttaagggggagtattaaagtcttgttataaggtgtacagtttgttacaaaatctgttatcaattgttaagttggttaggctttctgttaattggttttgtctgtttgtaagtgtatataacactgtatttgttcttttgctttgatcaatgaaaatgaagggattcaattgtgagagattggagggttgtaaaagtctttctcatgtatttgattgagtagactcaactgaagttttgtaatgtgttgttttctgtattgaaattctttccttgtacctatgattttcgaatcattctacatgttcatttgaggaataaagtggctatatgttttttttctttcaagtgttcatcaagttcttgagttggtttgtctattaattctcttgtttttatctctggttttatgtttcttaagcaacagtgagagagaaaggtgagtttgattcaccacaaatggtatcagagcaaggtgtcaagaagaggtttcaagatccgcacacaaacctccaagattgatcttcaa

SEQ ID NO: 100867 - DNA, 985 bp, Cannabis sativa
tggtattattgcattaatattgcttccacctgatgatgatgatgatgaatattcctcatcactcactatcacctcttccatcttctcacatccatatatacttaatctctcaagttgtacaagattgcgagccatggcagatgataacagagacttcattttgttacaattctgaacatccaacttttttaagttgggaaatgcaatctgaaacataaaagaatgctaattaatcataattactcacttatttcactttaagaacaaccaatgaaatcataagtcttacttttgagatgaatcattcattattcactactcttcccactattacaactatttcaatatatgtatatattttgagttttgattatacacattagtggattatatataaataatattctatatatgatgattgggcttctagatttaaacacgaaaaaagaacaatagtactgccatatatatacacaatagttaaaacatcacgtgtatgtgtattatttcggttcactatatatgtttttcgttcattaaccaactctaatatcttttccactgtcatttttgaatataaagtttcagttaaaactattataaaagaaataatatacactcaactaattatatatatgtaaattagagttactaccttttcagcactagaaaatttttggagggatgaaaggccatgaaggtgaagaaattctaatttagggaacaaatcaatccttttcatctgattatgatgagtagtttcttcttctccaggttgatccactactcttattatgtcttccattgcctcacaatctttgactcgtatactctgtaagtttacaaacttttgagcaacagagaaagagaatacatactttaaactatcacatcctttcacttctaaggttgttaagttttgcatgtaagaacttggtgatgataccacaacttggtctggcaataacttttctatactcatatc

SEQ ID NO: 100868 - DNA, 1157 bp, Cannabis sativa
gtgttgagaggcctaggacgaaatttaaaatggggccttttattttacaaaaaattaaaataaatattattatttttttttgctctaagatattatttattattgaaattttgacacaatataattaactcttttatcttcatataataaataatctttctcacacataacatactttttaggacttttgtaaaaaaaaaaaaaatcaatagtatatcaaaaattatattaatttttttttattatatgctataagtttttataaatttaagaagataaataattattaataaatatactttttatttaagttataatattcttgttagttattttttacaaatatttgatttatttaatagtattataatagatatttttatccgtttgattggagtaatttctaaaaaaattgtttaccaaatataactttattcttttttagataatgtactttttttaaaagaaaaaaaagaaaaaccatttttaaataatgcattgaaatcctacataatctttattaaatttaatcaatgcctttaaatttttaaaaggcccaaaatgtgaaggagccaagaatcaaacccgaaaccaacaaaccaacataaattctctctaccaattatgctgtaagaccaaatatgaaaattattaacaaaaatttataaatatacacatattatatttttatttttatatatataatattaattttaatttttcggggcctccaaatttgtggggcctagggcctagccccggctgccccaccctctggctagccatgaatcagccatcccgtataaacccaacctttcaaaacccacctcccaattagagttgaacgatgctaggattagggaacatgtagtgacaactcaccaggacgagaatgctagtcgctataggcgcttcttgcaagaaatctccgaaggcaaacgccgattcttgcgagatgcagcctggccagaacctcctatcgtgtcctttattcctttagtaaagcctttggttttattcaacgtcacgattgcttttgaaccaggtgacttgaattttgagataatgtctcccaagctgttgtgaaaaattgtatacgcaaatgcacacaatcgtcaacaagtaataaagtgataaatcgagtatcgtctccacag

SEQ ID NO: 100869 - DNA, 727 bp, Cannabis sativa
atatggttattttgtatatatgaagagaagagatcaaacaaagattcaaagtgatattttttcttccatatattatatcccatcaaacttttctctatacactttgtatgttagtgtaaaattttgctttaatctatctaaaatctctttcttatattgatttaaacgacttttacaatcataatcttgaagaccttcttagagcatttgatgaagttgtttcttcaatcactcaaagataatcttcaagatcttcttcatgaattctcagtaccaacagcaggagtagcataatcaatcacttaagtttgtttaattgattggaaaacttcatctgtggtaatggaattgaagccaacctccaaatttagatgtaaaatcttttctgcacctgatgattattaaacaatacccgatgaaagaacactagatgatagcgttatatgaaattagagatgtttgaatgaagaaaaaaagaagcaattgcgttgaggaaatttagcacatctacaataaagtttaggatatgtctagtgttcccgtatttttttagagcattattataaaacaccatagtgcctggcactcttatgcggtagcatcctataaatagttaatagttttttataatcattattaagactcgatattaaattgcaccaataataatacagcacatctttctattttctaacatatgggaatgttttttttataagaaaggtac

SEQ ID NO: 100870 - DNA, 978 bp, Cannabis sativa
  modified_base (320)..(324): a, c, t, g, unknown or other
  modified_base (462)..(464): a, c, t, g, unknown or other
  modified_base (512)..(513): a, c, t, g, unknown or other
actggatttagactgacatgataatcaacgattgagcttacttacaccatggataactgttatgtccttttcagggcattagcaaagtatgctaggatcagatatatggagtatacatcacactggaccgatattgaaattagataagatatcataaacatactattatatctatctaagtcaatattagttagttgatcttaggtcaatagatcttaatcctgatatggttaggttatgcttaaatgtattatttatgttcttagagttgttcgttaaagctgaccaattgatgggcccaatacttacatcttgggaannnnntagttcaattgagtgagagcgctaatcatagatatggaatctataacttctattagtaattagaagttaaacaatgatttccttcgagcttggcttaatagaaataaattattgagatctcatttcagtaattatatnnntttactgaaatatcatttataagtagctcagtgttttaaggataaaanncattaaagggtagaacggtaaatttgtccatattcgatgtagatcatctatagaggatctttgactattagaattgaaacaatgagtaattcaaattgcatctatttttggtaatagtgtgttttatgtaattaagagttcaattctaaatctatactggagtcaggaggaattaataagttaggaattttagttggtaaattttggatctactaattgtaagcttgattacatagggccatggtccccacactagttaaaataatactgcttatagactcaattgattagttttaattaatcaattataattctcaaattagactgtgtcttatttatgaattttcactaaataggggcttaattgtgaagaaatgaagttttggaatttctttgttaattgagagactttgtaaggtctaattaataaataagttaatagaaaattttatttgataattaatt

SEQ ID NO: 100871 - DNA, 840 bp, Cannabis sativa
taattttaaagtacttaactcaatccttatgggttcgacctcactcttgtgagtctattacttgttaacgatacgtatacttgcatcttaaaaataccacaaaaaaaatttggtactgttatcaggaattgttagttaatatttataaaaattaaatttttctctaatttggtttttcttttcaatttttttttaataattttatttgtgtcattttttctcttttcttatgaacaactagttcatgcgacgtcaaggaccaaccgccagattgcttgttgatcctaaaatagagatgacttgtagacaaaacagaagaatgaagagattggaaagagttatggaagtggttgagcaagaagtagagatggtcaataacgacaataatggaggtgtcgtagatgaccaagctaatggtcttaatccaccagaccatagcttgagagattatgttctacccaagctgacataggctagatcctgtataaggtcacctgccattgatgtcaataacttcgagatcaagccgaccatactgcagttggttcaatccacaatccagtttaggggactaccatcagaagatcccaatatgcatcttgcaaatttcaaggagttatgccagacattcaagatgaatggggctagtgatgatgcaatggaattgaggttgttcacattctcattaagggatcgagccaagagctggttgcaaagccggccctaggcatacgcggtctaggctcgtgcctagggcccacactttttgggggcctaaaataaaaaataaaaagtttcattaggcttttatttaagtaaaattaagtgtattataaataa

SEQ ID NO: 100872 - DNA, 640 bp, Cannabis sativa
tgctagttagggtgttacaattgccttgaatggagctttcttcttcgagttttgcatgcgaacattttttcgccacatgtgtgtaatctcattatgcagtgcgtcactacggtcaacttctccatcttactaaatggtgccccccttgctcccttcaatcctaaacacagactctgtcaaggtgacccactgtcaccatatctgttaattttatgcaacgaagtcctctcaaagctagtctcgcgtgctgaaagaaacagagaggtgcatgggatacgcattgctacaagggctgaccctatttcccatgttctatatgcggaaggttctatttttttctgccaggctaccacttctaatgtcgaaaatcttatgatgtgcattcagaagtatgaattgtggtatggccaaagagttaacacaaccaaaagtggagttatcttctctctgaacttgtctcaacgatgccgtgatgagattaagagtaaaattgggtttaattgcctggatcgaagggagaaacaccttcgaaacaccttctttttctcggctaaaaagacaaacgattatctcttcctcaaggagaaaattttaaatagactggaaggttgaaaggcaaggttgttggaaattattttac

SEQ ID NO: 100873 - DNA, 697 bp, Cannabis sativa
tataaaaatttatgatgattatttttttttttaagaattctttccgctatatgtttggaagtttaattttgataataaaataaaaaaaaaaaagaaaaaatgtagaaaaaaaagtgtagagaacaaaaaaataaataatttttttaagcttgatatgaaaatttttgttgaattaagtgtttttcaatcttccttttcataccaaagatgataatttattatttttttcctatactttctttattttttcttcacaaaaatccttccaaacataaccttaaaattctttatatacattattttttattatacataaaaaatatgcttaaaattatttgatataatttaattattcaattaatattcatatatgtaatttaaacattttataaataatttttcaaaaaaaaaaacattttataaacaatattgttttttttttgaaagaaataaacaatattgtttaatagtgtatttgtgttagtgaataacatatcatacgtgtacagttaaagattgcgatagaaagggtagtcgtttttggcacaattttaggacccctttttctgattgaaacattacatcaaacagaaacagttagtttgtagtgtgcaatatcttttctttctgctatacgtgcctctactcgggctcacgcgtttaaaatgacatactgaagcaatgacacgttgcggat

SEQ ID NO: 100874 - DNA, 730 bp, Cannabis sativa
tgttatttttgggagtggatcgacccaccaatgtgtgaaagggcatcggaggtggttcctgggctgctgcgtaaaattagaaggcttgagggagaaatttcagacatttcaacatcaaatgttgatgcatataattatctgaacagtgtggaaaataactgtgagcaatcttcaatactgaaggccttgaacaagggggttcaggttgatgagcactcattggttaacagtatgggaaagactgcttgcatggagagtttcaatggaagtagcagtacaagtgttgaagacccaaaagagaagatttgcaccagtggaatcttagtcataagtgttgttgttgccattgttctgttttggttaatgttctgaatgttgtttaatgtatggaaatattgttaggcaaaaccaccttaacttttatatttgtaacagttaaccccaaaatgtaatgtttttaaggataatgttcgaatgttatttaaggatgtaatgatatcttttggttgctaatgcagtattagaatgtaatgtaaaacttggcaatttaaatgaacattgaaacttttgcaaaataaaatttctattcatttggttggtgcattgacctgttcagatccaaaaggcacctatacattagcaaaatatactgttgttgtgcttggtgcattgatcaaaatattaccaaaatgcacctatacaattcacattgatcaaaagatcaccaaaa

SEQ ID NO: 100875 - DNA, 715 bp, Cannabis sativa
ttgtatgcagaattttacaaaccgatctttacgttgggttagaaaatatgtagtataaaccgactaaatcgaccgatgtacaaccctagtagttacagagttgtgttctatagttataaaataactgtttcaatacaatatttattatttcatttttaattagttgattaattgattaattggtatcaaagtttgtcactaaactcttagtgtgagatattgagattattttattctgtatagtttgtttttgtgtgagatgtcgttgtttgcaggaagctccattaatcaactacccttgttgaatgactcgaattatccatattagaaggtcagaatgaaagcattcattaagtcacaagatgaaaaaacatggagagctatacttgtaggctggtctcgacctactaaaaatgatgatgaaggtaattctaagataaaacttgaacttaattagactactgaaaatgaaaaatttgttggttataataataaagtcttgcatgctatttttaatggtgttggtgaaggctttattaaattgatatcatcttgtgaatctacaaaatgtgaaaaatccttcaaactcggtttaaaggtatcattgatgcaaaaagattacgttttaccatgttgcaaactaaatttgatgaattgagaatgtcagccccaaaattaacaaaccaattcaaacaaatccaaatctaacaaataa

SEQ ID NO: 100876 - DNA, 1693 bp, Cannabis sativa
tgctaataatagtattaacggtggagtcctgccgctaataccctctgccagttttgaacttagcaattggcaaagagcattagcggcgggcccccaccgctaatactatttaaaaattaaaaaaaatatattaatttaaaaataatattatgtaattatataatattaataataatactatataaataattatacaatattatattagtgattatatagtatataaatgataacttaattaatcaaattacaaatattgtaatttaactccaataaaatttattaataatttaaaaatgtctcaaaataaattacacgttaattatattacaatattgtctaaaaattaaacttaattattaaaaaacataaacaaattattccataaaatcttcattaaggtctcgagttacaatgtctttattcgcattattatcattacgagttctcgatggccatggcggagaaagaacatatgattgatctgatgataaacccagtgttagattccccaactcagcttgattgagaatatgagttgaaaaaaattgttgctcctgcgacgaactcccaaataatccaaaatcaacaaaatttgagtcgagcagaggagactctgatggaattctatataaaaactgatttctcaattgcggaccagactgttgttgctgttgaggaaaagattggggttgctactgggaaaatttttgcaatcgctgctacgaagaaggccgaaattattgttgtgaaggagattgttgttgatgttgtggaggagcggcataactctgagaagacgaaccaccaggtaactgagattgactatacatttgaataaagttctcaaaacgtcagttatataaattagcacgttgttcaggcgtcaaagcacccctcatgtgtcacgcataggtgagaatatttctgccataatgctcatcatttcagcagatggcggaggaggcactgtcgactgacattgagtaaatgacttctttcctttacctttgacccttttacctacgcctctttgatagtcagatgttttgccaagaactgttcccagaacgttgtacagataaccaacatcagatttagtaccagatgtatcgctctaggattattgttcaagtcgtttcctatcaagctccttcaccagttcctcctatttaaataaaaattattaaaatgtaaaattaatataaaatttaaattttaataataaaatattttattcactttcataattttttgcagcaacttgattaacgaaattgtcagacgcagtttcgtatgaaccaccttccatgcatatgctctccgggaggaccccctatacgaacgtaaacaaataaatcaatttataatacattttaaaacaaaatcatattttacaattaaaggattaatactacaaattcttgtcgtatcgaagccaacgatcttgtgccttacgtcgttggatatttcatttgttgcctattcgctttgttttacttgagcggttcaaaaaaaattcgctgatgaacattttgcaaataggcttccaactctccatattcaagttgtaacgtcttaatattaaggcacgctacattaatttttcaattacagtgctatctttgctaatcaaaaaattttcttcaaaaatgtgtcaaattaaaactcttatattaaatattaaacttta

SEQ ID NO: 100877 - DNA, 830 bp, Cannabis sativa
ttatagtaaatcaaataattttttatgataggaaataaattctcaatcataatcttggaccaatctggaaggttttctatttcggtccaatttaccactaccgattccaatcttgtcgctacaaattaggaattattttagaaagttttgtacaactgtgaaaatatgtttatggctatctctagagtttctataatctataaataggacctagagagcatccaaacatcctcacctctattagcttcattttttatacttttatctttgtgaggagagaatttcttttgtgaaaacttaaagtattcaactaggttttagtctttggttattgttcttatattattcttagaataggttgaagaactttattgaacaagagaagggtcttcgggcgaagacttgtcaaagccttatttcgggaggaagtaagcagtcacgcatcaaaagacgaagggatttcactatttggtggtgttctgaaatcagattaataaagtaaattataaaggattgcgacaaagctttaaagggagtctaaacatatttaagtcaattgtattttgtaattgtttgagactttactaattgattttattaccccgtggaccaagagtgtttgaaaggacattaataccacgtatgattctcttgtgtcaaatttttacattctgtatagtttttctattttgattctataaattggcgtatgacaggttcttaatctgttactacatattgttatagttgtttttcttaataattgaaatttagtaaatttattggtatattaaaatataatccataagttttaactgttacgcctagta

SEQ ID NO: 100878 - DNA, 547 bp, Cannabis sativa
ttgattttctaagtatagaaaatcaaatttccctactatatatcaatttcaccaagtgattatatagtatctttttttttggtaactcgatcaagtgatcatagtatcattagtccctttttcagccaacaactaaataatatcatttgagctaagctagaaaaaccatatatatatagataatgaatcattttcattattatttagttagtcattaatattagtctttatcataacgtatagcatgatatatttatatatatatatatataatataacttagaataagaccaggtaaatcaatttcaattaattcccaagttattaatgcattgtcactcactcaactctctactaataaataaatgtataatataagataattaacgttcgaatctaaagcatataatatagtgtagtgtgaacaaaggaagtttctttcatataacggctttatataattattgcctcattcacaatcacagtaccgtgattatagatgggaaatttcaaaaataatgcttaatgtaagtgcatataaagatgg

SEQ ID NO: 100879 - DNA, 537 bp, Cannabis sativa
agagatttgtgcttcgcgtatgcctttgaatgccgaaagcattaggttatgacttcaaggatcaattcctccttctcaatggatgctctctcctagatacttcagtgtctttcctgatcctattttaaaaggaaggagatattcctatgcaatttgacgtggcatctttttgctacttccatgtagaacttatccagaaatagggataacatctactatttttgtaacgccctaatgctaaggcacgctacagtgcttttctattatagtgcaatctttgctaatcaaaaaattttcttggaaaatgtgtcaaatgaaaacttttatattaattagtaaactttataatatattaaaatatttacaattgctgggatctcgttttcaagctctttaaacttaatattccaaaatacataataaacaggtcgctcaacgactacaaaatatgactcccagatgtcccgagaccgaacactccaagtcgcgccgcctcgacatgtacaatcccatcctagctcaggttcactcctgttc

SEQ ID NO: 100880 - DNA, 530 bp, Cannabis sativa
cttagccaaattacctctttgattgcttctgtggcagccatatactcagcttttgttgaggatagtgctaccacattttgaagattggatttccaactcacacatccacctaggactgtgaaagcataccatgttatagatcttctagtatcaatgcttccagcataatcaaagtctataaatccctcaacttcaatagttcttttgttgttactgttgtaaacaagtcccgtattcattttaccctttaaataccttagaatccatttgacagcagactaatgttcatttctagaatttaaaatgaacctcaccatgcttagactgtaggcaagatctggtcttgtacataccatacaggttatcaaactttccacacatgtcaaaacctcatatgccaaagctttttctgatccattcctttatttttgactgttgttgcagccctaccaataactattctaccaactaggtagtaaatcccatttctgagatttccttttatcactactgtagagtctttcagagct

SEQ ID NO: 100881 - DNA, 501 bp, Cannabis sativa
gagtattgttattgggtattagtatttttagatattttatcttgtaattgactagtaatattttttataagttattacattaaactatatgagatttttcgactcgatatttaattggactaataacgatattaacacataaaaaaatattaagcaccactagtgtcttttagcatttcaattatttttgtgcaagttttgttttctttttattaattgtaattttggtgtttattacccttgccttttagtggtgtttgcctttatctttgtaattagcttagtttggtagttgtttggtcatatcttattaggagatttgtgcgacttagtttccgcataacctataattttagactttgtagttaaaccaataaatgatatatatatatattttttttttaaaaaaaaaaggttttatcttgttagtttactaggtaaattttttaaataaaaatatatattaagagaatttaattgtgtataatataactaagaatg

SEQ ID NO: 100882 - DNA, 1123 bp, Cannabis sativa
  modified_base (1061)..(1071): a, c, t, g, unknown or other
tagtcacaaccgggtatttcgggccgaatcgggttcgagcccgaaatgcaatttgaattgaaatatttggcatttttatttaatggtgatatctgaaatttaattgagtttgagatatatatgaaatgacatgtttacccttatgtgtatgtgagttgatttttagccctaggggcaaaatgatcttttgacctatattttcatatttatcaaaagaagttgattttggaaaaagaaataaaaattctggtgtttatccctctctctcacccgatccctctctctctctaactctctttggattttcaagatttcaattggtgaattgcttgggtttagcttgaaattgaagtaaagtgttggcgaattgttgtgctagccttaaagtgattcttgaggtagtttttataactctaattcctactaggtagccttaaagtgattaggttgttgatgaagatgatatttatgtgttgcatgaagtgatgttcctttgggaatatatgtgtgttttgcttgaattggtgtggtggttgtttgagctttagatggtattctagggtttctttaatatcttaaattcaagttaattgatgatgttgttgctggaaaaatagttgggtatgttgaattaagttcaagttcttgagcttggattttatgagtttgagcatgatttttgagttaattgtgcaatctgattttcagggaaaattgtgaatgttaatgcatgttgtatgtattttaatattctatctttgagcttgataagttgtgatcatgttttgagagtttggttgagttttggattgatttggtatggttttgggggctgaaaatcgtgttgcaggtggctgatttctaggttttcaacccaggtgtcaagcatgccgcgaccctccccttgttggtggaacctgggttttgtcccaggtgccgcgacatagcttgggcatgccgcggaacgccctcgttttctagggcagtttgggtgcaaattttgaaaattcataacttctgttttcgaactccgatttgggagttctttatatcgttggaannnnnnnnnnnagctctgtatgattatctaaatttcaagtgcaatgattaaattttatgagta

SEQ ID NO: 100883 - DNA, 1565 bp, Cannabis sativa
ggtgattctacaatacaccccttagagtggatgtactgatgcaccctctacttgttttaacatatagaaaaaaaaaattagtccaatttttttttcatattcatgtatgtgatagctatttaagatatcctacaaaattttgagaaatttggaataatttacattatagaaaataatgttcaaacagtgtagtttacacgcgtataaaataaaatagtcacacgtgcaatacactgcttgaacacaattttaggcatataaaactttttttcgaatttcttaaaattttgcaggatgttttaaataactataatttacatgaccaagaaaaaaaaattgactataaaattattttgaatgctaaaacaaatagagatgtatcgggtgcattatagcatttccctatttttttttaattaaatttaaattaactaatctcattatctatctatatacttatataatcctattgttaagtaaggttaagtggcatcatctccttttaggattgctaattttctatctgctcattttttctccttttaagttgtttttttttaaataatttttttcattaatgtaacagaaataaatcataaattgacctttcctttcgttctccaccatttaaaaactacaaaacattcattataataaaacatttattataatattgataaaaaaaaaagtaactgactatactcacattgttaacctttcttttcccttaacctttcttttccctctccaccatttaaaaactacaaaacattcattataataatgatccaaaaaaaaaaactgactatacacacacattgttaattatatatagtccaattgagtaacgtgatcacccatcagtctctctttgtctctccatctatccatctcattcaatcccattgcaaatcaccagtaaggctacttctctacttctcgatctggctgttccaattgcatgtaaggctattttctgcctaattctacactgttgctccactttttctctttatctttgaattttatttgcttgaatgtgggtttggttttcatttcaggattgatgttaatttacaattttgagaagtgaattttgtattctttaccatattatgacactcatgtctttatattctcttattatttttaaaattttaatacatgtatacatatataatccatattttcagataatttttttacttttattaatgattagtttgttttaatgttattaatactattctttctattttgttcagggtataaggatatgttggataatatttgttaagatacaaattttttattttttctatataagaatatatattcgacttcattttctcctcacaaaaactttggtgccaactttccagtattatatgaaattatgaatgccacaatatatttattatgggaagtctaaaagagtttgtagagttaaaaaagcgtatatatataaatattatagtgctttcttttggttttttttttcatataatgtaaatatcacttatttacataaaaaaaattgtatggctttctttatatatatatat

SEQ ID NO: 100884 - DNA, 902 bp, Cannabis sativa
actaacccaatatatttcataagcatgcaatacttactattatccactaatataaatcaatgtataaccaagaatcaaaaggtctttctaggcttgtaatgttaggcttagatacaggtaggtggaatggttatttaagctttcctataccataagcttctcaaatcatgtcacagaataatctttttataaacaatcctaatacccctttttttttcttattccatgagagaattttttttccgacaatattgcaaccctttatttttatttctttttttttttttcgaatttgacacttattgtcagattttttttaaggttgttgccaatcaattttttttttttttcatattctctcaattttcacacttattcccacacacatacaacaaacttcccatccgaattccccaaatttaagatccacttatggtataagtaaaatcaaattttggatattaatgagtttattttgtttaggctcacaatgtgtaaaaataaagaataagttaaggctcaaaaagggtaactaagataaaaattataaggatgacttgaaaggcacaatcgattcaaagaatgtctaaatcgttttcctagtcatgcattatttattatttcgcctcaaatagcaagcaagcaagttttagaatttttcaaacatctttccacatttcacaattaacatacataaaccaattcaattgctagaaatttacttattatgattctatgttatttcaaaacataaaattaaaattagtcaagaatgcaatatcaccaagcacaccgattttttaaaaagtaaatgacattttcaaaccatgctatctacatacttttaaattgactcacacatctagaaaaattgactcaaacaacaccaaaaaaaaaaaaaa

SEQ ID NO: 100885 - DNA, 715 bp, Cannabis sativa
  modified_base (179)..(181): a, c, t, g, unknown or other
ttggttttataaaattgaaataatttagggtaaatatcgttttagactttgtgttttataaaagttaccgactggatcatctgttttgttaaataacaaaatggatcatgtattttctaaaacagtaagaataggaccctgagtttaatttttgacaatttttttttaatataactaannngaagacaattcctaacacgaacaattacaaaaaagataaacagttttatcataacactttagatcagattattattaaattttattttgacataaaatcagttaagggtcctatttgtactattttgaaaaacacatggtccattttgtcatttaacaaaacagaaggtctaattagtaacttttgcaaagcattaagagggtataaaatgatatttatctaataatttatcatgcaaactttttctttctattacatgggttgttttttttttatttttatattttaaagtttttttttttttgtatttttacatagcaaccacgtaataatttaggaaataattaaatcgcaaccgaaattcacataacaacccaagcaaccataagagccaccgaaactgtaaatttaaaaaaaaaaaaaattaaaaaataatatataagtaaatcccctaaaatttcccaatttcaaaaaaaaaaaaaaaaaaaaaaacgacaaaaaaaaaaaaatataaaaaaataaaaaaaaaaacaa

SEQ ID NO: 100886 - DNA, 588 bp, Cannabis sativa
tgaggaaaaggtgcaacatagatttctcctcaaccccacagatagggcaccctctaccatcaatacagattctcttatgaagaacagattgaattgggagagtattagacaagatgctccaccaaagaatcttatggcgatccagaatcttgttattgcaaagtttgttctagagaaaaggtgcaacctcgcaagaagaaaccctatccaaagcttgtaaaagataggctaatttgcgagagaatcgccattacttttctttgtccagacccatttatctttttcctaactagaaggcccaatttttgaatgtcctaatcattattacttgttaaaagatcagtcattttgctaaatttagaaaaaagcagtccattagatttccgaaagaagttcttaccataagccaccctcaaatctttccaaattttagtattcctaccatctgaagtccattaggttccaattaattttaacttggaacctcaatccttctcaccaaagtacatcttctttcaaattgtaaaaaaagtgcactaatataataacaatatgctacaacaggactttttgttttaattgaatgat

SEQ ID NO: 100887 - DNA, 926 bp, Cannabis sativa
aataacaaacactaacagcaactataaaagctataaactcaaaaacatgcataatccatttctaaaaattcaagaaacttaagaaagtgaagacaagagtttacctagagcttaagaacactcaaatcctactgatactagcttgaatgcaggaaaaatacagcaaaccctagctgcttctaggtggattcgaaagagagagagagagagttgagagagaaaatgctttctttttcaaattttctagtttttgtaaaatggataaaaggttgctttattaacaaaataatatcagcttataactcataaaatttagattattaattaaaactaagtccacttaaggacaaaacacaaatgagcaaaaagaccaaattgcccttgcccacactaaaccatcataaaatcacttaggggtatttttggtaaattctaaaatcctgactattctcgacattcctaatgtctaactacattgtctcgctatactaaaaatactaggatgtgattctaatagcccaacaccgcgttccaatgttgcaggcacaaaacatgcaaaattatgaattttctatatataacctataaaatgcattctgaattcaaatgaatcatcataaattaataattcaaaattaataaataatttccataattaaatcctaattatcagctaatttctaaattaaaactaagcgatccttacatggtaacttcgcatcgacatcaataacgtcaaatatgcaaactcgtagagatttgacaacttttagacaatgaattgtatctatagaatctgtactgataatatatccctttgtaactacttcatgtgatgattctatagttaatctgcaaggttgaccatgtttaataaagtaactatcatctattagcttaagttgttttataatattatcaaaaac

SEQ ID NO: 100888 - DNA, 540 bp, Cannabis sativa
ttctctaattaaaattttgtcccaactttctcacaaacctactattatgcttaaaattatgtcttatttatgtgagtgtgagaataatttgaatataatactcataaaagatgtatatttaaattaaatattatttggagataaatttagttaatgtataaaaatattcttcgacttctctcaaatatacagcatctattagagatagtcttacccatataaaaacagagattatgctaatttcctcatgatttgatatgatttactaaatctctaatgaaaatatcaaattcccctgccaaattcatctatcaatgctaaaaagaactctcacagaaccataaaatattcttaataaaaaccgtgacacatctaacaactcactcagagctcgtttggtacggttgtattaggtcgtattgtattgcattatattgaatgtaattatacatcatatttttatataatactatgttaaacttttatttatactaaaatattatatatttaagtgctcataaaagttaacaccacatatag

SEQ ID NO: 100889 - DNA, 705 bp, Cannabis sativa
tcttcttttcttctctctctccttttctggcagcggcacgcggctctaacccctgctccgatgagccaccatcgttgagatcgacaaacccccccacccagtacccagaaaaccccaccccgattcagccgcatgagacattcctttgataatcctctccgatcgagcaactgcttgggtttcaaagctcccttcgtcgacgatggagagtacatatcagtgtttggtatttaaagctctatttttttttccctcaaatttaaattttctattgatgagatctgggcaagaaaagaaggggatcgggttttgggcggggtcctagtggtgataatggtggctggtgtaatgttggtggtgataatagtggtggtgaggttgttgtggtgtcgtggttgtggctgtaaactcaaggaagaagaagaaaaataataagagaaaaaaaggaaagggaagaaaaaaaagaggaaaggaaaaaaaatatatttttaattattgaaaaatctcttacatcttggggaatttcatattttttgggagaattctataacaaatatgggggctgagatcaaaaaatcaatctgtatatggtttcattaatttgctggctacgatggatttggtaaaacttcattcatttcttcattactgtgaaattgtatggatcaaaatagactaatagagtttagactcttcaccaaataa

SEQ ID NO: 100890 - DNA, 743 bp, Cannabis sativa
ttattttttatatttattaggtatatatatttaaatattgttgcaaaaagataattaggtataaatattattgtgtgaagttgaagtagaacacgctgtttttcttccgtggaaaatatccttttcctattaaaattgaatttgtcttcctccacgctctaacccaccctatgcatatataagacacacacacaccttccttggccgcctctctctcacacctcataatctcctttctctttctcactctctctctcttgctctttccttggcgatagatcgaatcgaaaccctaattctcatattctctcattacgattacaggtattcctagctcccttttatcttagtttcaacttaatgtcttatcatctcttttcttagaatttagtttgtttccatccgtcaacgttttctttgtttcgattttattttatttactcctatttggaaatagccgatgttagggtttttatgatttctgatatattgaaaaaaaaaaattaagaaaaaaattgttgtgcttcgtgttcgtaaaatgtattatgcctccaccaaatttatactgttcttaacttctctctctacgatttactttgattttcttaattgatatagatgatacgatgagcataataacaaactatgggacacctaattttattgtatgctaccacggacaacaatttttttgggttttgtttttcaaattgataataatgaaggcagcgctgttttttgtt

SEQ ID NO: 100891 - DNA, 993 bp, Cannabis sativa
ggtcaacaggtcaatttaaccaagtcctccatcttctatagtacaaatacttcagacgccacccgaagccaactgaatcatacccttcagatgtctcaagccactgagaatagcacttacttgggcctccctagtaccatgggaagaaacaaaacggcggtcctaggctttcttaaagatcgggttcgtaaaagactccaaggttgggaaggtaaattcctttcccgggcaggcaaggaagttttggttaaaaccgtggctcagactctcccaagctacgccatgagcgtgttcctgttacctttagagatcagcagagagattgaacaattgatgtcaaagttctggtggaaatcctcaaaacaaaacagtggtggaatccattggatgaactgggacaagctctgtaagcataaagatgttggaggtatgggcttcaggaatctcagggattttaacttggctcttttaggaaaacaaggttggcatctcctcactagaacggactctttggtttccttggttttcaaggctcgatattatcctcatgggtcctatctcaatgattctcttggaaataatccaagtttcgtttggagaagtatttgggaggctcaacagctggtcatgaaaggaacaaggtggtgcgttggcgatggtaacaacattactgttgttggtgaagcttggctgcccgatccccacaatccctttgttagctcttcacatcctgctctttcgggtgtcaaagtgagtagcttgatggttccaggttcgaggtgttgggatgttgagttgattgatgacttgttcaatgaaagagataaaagtctcattcttcagatcccattacaagtcgccgagtgcattgaccatgtgatatggagttctgactcttcggggctttactctgttaagtctgcttacaatctcttacagcaaattaatggccgctggagcgaagaagaagcctcggctttttggaagagcttg

SEQ ID NO: 100892 - DNA, 903 bp, Cannabis sativa
cttgaaaaaaaatctaaaataaacagttaagatttgtccatacaaaaaaaaaactgttagaatttgtacaaaatgaaaatagctttacgatactcttaatataaagacaaatgcaatctagatatagaaagatctagagatttaagtttttttttcttttgcttgattggttgatttaatgattcttagtaaaaaattatgagcatggttaaaaaatataacaaatggattaaaaaaaaaaaaatacttatttatttgaaatatcaataattgttattgtgcaaaatagataaagtatatattatttataccatatttttataactttagcatttaatatatatttattttcattttttagatttttctagcaaacattaacatgtaatgatgttaatatttaatatgaattacaattaacaattgagaaaaaaataaattaaaaactttgaaaaatgagagaaaatatacttcacatgtgagacttgtaagaataatttttttaagttgataatttctattaaattacttttattatataatggaaagagtgtgcacacatattataacttttaaattttttcattattattttttttttaagcaagttattgtcattatcaatagaaataataggatgggaaagattttagtattattattgtataccgcatagactaaaaataattatgagtttattgtgttacaaataatgaaatttaatttgtaatttatattttacttttatgtgtgctttataaaatttgttctatcatgatattaattctctacactttagcttctctcttttcatagcttctaacatacaatttgaagaattttttgtggatagaaataaaataaaataacataacatataaatagaaatagaaatagttatta

SEQ ID NO: 100893 - DNA, 730 bp, Cannabis sativa
gtaagaacttgaaattgagattaaatttcaaggaagcacttgtcttaatctgacatgtcaatttatcaaaacaaatccaacgcgtacataatttagtatttatttacatataatatttgcatggcttcttaaacaagtaacatgtaaaaataataatattatgaaaatttggaaataataataataataatactgataatatagtctgaaacttcgaccaaattgttcttatacttttttaagtaacgcgttgtcaatccaacgtgtaataaaaaataataaaaaaaataaaatgtgccacgtacacatatacactcatgtacacatatttttacaatagtatattccttgttttttcttatttattttttttgaaaaaaaaaatggtcatcaatttggattttatagtttgattaagggtagttttcaatcctattattattattattataataacaacgcgttcccttgtttgttagtttagttatagttaccctttgaattccaaagtttgagaatcttgattttgtagttattattattattataatatattgtattttgttttagtgatgatactcataattagtccatctttcacttactaatatttttttaaaaaaagaaagtgtgatgatgtatacacgtatattatgtaccaaaacattaacacttaaataattgtctttgtttttttaatatagtatatcatatttggaataaatgtaat

SEQ ID NO: 100894 - DNA, 793 bp, Cannabis sativa
caattacatttgttttatacaatcaaatcattagtatccatgctttgtcttcatctttagctttcttaggaatcatccctttaattcgacatttactcatgtgctgaacttttttgactgtgttactaatgaggcatttttgttgattccagaacatctcattccttgctttccgcacatagtacaccaagcttgcaagtacagtcttcaccatactcttcttagctgctgagaatttcttcgtgttatggcaagcttgcaaaagctgttgtatattcctggctggtgtgttccattgcagaaacgatttcacttcttgcaggcaggtctgactatacgcacactcgaagaacagatgtgcaattgtttcctcttctctgctacatagcagacattttgtgtctatggacggcatgaacttgctgagtctttctcttgtattcaatctcccccaaaagactagccaaagaatgaacctatgctttggaacaatgagtctatcccaaaccaggttaatccaaggcaatttttcccattcagcaaatatcagatggtatccctgctgtatattatatttttgcattacaaaacctgctagtgagatcttttgctgaaacttactcttgacagccacaatttttttccaagcccagctacagtctaggggagcctcatagctccaccaattttgatccttgatgtagacattatgtatccatttaacaaaaagacaatcttttttactagctatatcccacacatacctccccaaggctgcaatgttccaatgatg

SEQ ID NO: 100895 - DNA, 870 bp, Cannabis sativa
acatgtttagctccccaaatgctatgccagacgaaacttggattattaccaagttcggctgaaagaaaatcggagtgagggaagtattttgctttgtaaattctggcaacaagagaagttggattacacaggagacgccatccttgttttgcgagcatagcaaggttgaaatcatgtaagtgccggaaccccatacctccttcatctttaggcttagcaagacgatcccatgacatccaaataataccccgtccattgctagttttggttttccaccaaaagctcgccataagtttttctatttccttacaagtgccaatcggaatcaaaaagacgctcatagcgtaagtgggcagtgattgtataacagtttttagaaggatttccttccctgcccgtgataaaaatctcccatcccagctattcactcgagaaagaactttgttttttatgaagccaagaatagcatttttgttgcgaccaataatattgggaagaccaaggtaaaggctgccttcagtagcttcattcatatggagagtagagcaaatgcgaagcctagttgtgccatccgtattggggctgaaaaatattgatgactttgatgggttgacctgttggccagaagcactttcaaacaactgaaggagattattgatgctaacaactgcattctcactggcttgacagaaaaaataactatcatctgcaaacaacatatgagttattgatggagcacgattagcaacccggcagccctgtaagattctatcaacttcgaactttttaataagggcagagagaccttcagcacacataataaacagataagttgagagggggtcgccttgtcgaataccacgagaagga

SEQ ID NO: 100896 - DNA, 718 bp, Cannabis sativa
  modified_base (654)..(686): a, c, t, g, unknown or other
agtctcacactcggctcatgtgttatttgatactggtgcatttcattcctttgtatcatttatgtttgctagtatgttgggtttgagttgtaaaacttttagtcctgcattacatttgagtgtacctataggaggacacggtgaggtatccaccatatgtacgtcagtttgtattgtgtttaaggtacacaagttgtctggaaacttattagtgttgcctatggggtaattcgacgctattcttggtatggattggttgtctaaataccatactattatggattgttcacacaaaagagtgactcttttaacccctagtggtgatttcattgtttaccgagccaacatgagtggagtgagacaaaatactatctaaagggaatgcttaggtggaaaccgaaacttagagtgttatggcaatctaatttcgatcgaggatgagtctagggatttagaccattttccttggatatcagtggttagttgtttctcagatgtatttttagaggatttaccaggattaccaccggatagggagatcgagtttttcattgattttattcctgaagctcaaccattttctattatgccttaccgcatggcacatgtagagctggctgaattgaaaaaactattggattttgtgccctaaannnnnnnnnnnnnnnnnnnnnnnnnnnnnnnnnttaataaagattagaaatcattttatgttgca

SEQ ID NO: 100897 - DNA, 565 bp, Cannabis sativa
tagatgtcattttttgttattaattttatccattttagtacatttttcagctgttgatagttgatttaattgatttagttgaacaaattatgataaattatgataatgagttgagactagatgtttgtttccctataaaatgattgtatataaatattaattaaaagcaatgtataatttagcctttgtttagttttattattttaatttcattaaatttttaattattatataaaaaaaattatttattatgaaatgattataagaaaactacgtgtgcagttgatttttaaaaaattaatcatttcagtgagatattttattaactcctaaaaataaataaataaataatattttcttttaacaaaaaatatttattatattattatttcttataaaactacagatacttacggttaaaattatttatattattaatttgttaattatcttattttatatatatcaaaagtgtaagatccatataaaattaagtttaaatcaaaattttaaatagtatttatataagttttaaatgctaaacgatatacaaaatattatcttt

SEQ ID NO: 100898 - DNA, 704 bp, Cannabis sativa
aagacacctatggatcctcggatcaaacttgatgatcaaaaaggagaacttcttcaagatccctccccatatcgtcaaatggttggcaaactgctctatctaaccttgtccagaccagatatcacctttgatgtgaacatactgagccaatttatgtcctctccatgcacccctcacttacaggatatacaccacttgcttcgttacataaaaggcacccttggccaaggccttttatattctgcatcttcaacactacaactcaaaggatactctgacttagattgggcctcttgccccactacaagacgctcaacaactggttgttgcatcttcctcggagattgtttaatctcttagaaaacaaagaagcaaccaacaatctctaggagttctgctgaagcagagtatcgggctctcgctgctactcatagtgaaattacttggctccaataccttctccaagatcttcacatacctcaaactcaaccggcattcatcttttgtgacaaccgatcggccatccacattgccaataaccccacgtttcacgaacgaacaaaacacatagaattagactaccattttattcgtgacaagatcaaccgttcccaaattcgcttaagtcctgtttccagcaccatgcaactggtcgatgtcttcacaaaacccctagcttcaactaccttgaccacacacataaa

SEQ ID NO: 100899 - DNA, 598 bp, Cannabis sativa
ttttttccagattcatgcattcagatgtttccacattttgttttttgtattttattaaacattttgtttttatttaaccttaattgaaattgcattaaaaacaatttggattggtctgcactctacaataagtagtaattattcccaatgtttggtttttaagagaatttttctgctatgatttttaagagaattcttaaggtattactataaaattttcttattaagtctctaattttgtggtcacttgagactcacctaatctagtcctgtcttcctctctctttctctcatcttgttgttgccactactgccaaccaacaaccatgcccatctccggctctgcccaacaattgtagtggtcttggagagacgatccgcagaggagattgcgccgaggcaacacaaagatacatctcatctccttcaggtctctttttcaattcaattcaaatgtgaacatttcttcctttattttctttgtatgaaattggtaaacttttgatgattcccaatttattttcatttataacagtgaaattataaatctgatcatcagaattgctttatatgttgtatgatatatcttagcatatgg

SEQ ID NO: 100900 - DNA, 608 bp, Cannabis sativa
aaataaaaaaaattaatacatacattttttttttaatgtgagaacatataatttttaatttctcatttcatcatcttcaccctcattgtttccgcctaactccgaaaacctacgaaagccagcagttcccacctaaccctgaaaaccctacgaaaccaccgaccaccttgacctcgaaccacgaaaccatctcaactacaactaaagtacaaagtaacagaaggatacaaccgttgaggataaaggaatatccaagcttattcttctacatacaactaaaattaaaagaatcttactcactaggtatccattgtgtgaacatggtcaacaaaataataacaactagcaacacatccttctttgaaaggagcaactcattagttgcataacagtttttcttaaggttgtatgtcatatctaaaatattagcggaaatataaagcattatcaatatcatatttgacacattaatgtgaagttcttaaatttttcttattagattaactattctgttaaatcttcaaaagtttcttatgactaaaataaaataatttttaaggcccaagataagtgttacaatgggaaatcgaactccgaagaacaaccaa

SEQ ID NO: 100901 - DNA, 1057 bp, Cannabis sativa
tttttgcacatattttgtaattaattaaaataatgtatacaaaattgtaaaatgccctttaaaatatggttggatttggagatcgcctatttacaaacttttatattttgtctcaaaattgatattaaaaatggggttacaatttaataattaattaacatgtggatcctatccattggaagacaaaacatcacggttgatatgtatatcgttgggagacctttgaatcatggctgatacactttccctttcctttacctggatcacgaaacacccgtgagtcacaaagactcaacaagaaagcaagtaaaacacaaacattatataacacgagatatcaaacaatgcataacatacaatttcattattcacaataaacgcttaacaacacatattcaagcattacattacaactatttgtctaataagacaaactattcttcatgcctcataaagcatccttaccacttgtcacccacaagcttcatatgtcactatcgttgcccaacacagcaattgataagtaagaaacctatctgcgatttcaagttcattcacaataaacggcaatgaccgcatctttatccattttcaataatggtaatgattgtatctttatctcgatcataattgagcctcacacgatagtaatcgttacctcgatcataatcaagtcacaaacgataataatcgttcctcacttaacatgcttaacagctttcttacctcagtcaagtaattaggtgtacgcaacgacctgagtggaataaagctcgacgagcccatgtcttatgtcatgacaacaaaacttaatcaaccacttatccatactccggaaaaaaccttaattccataactggacacattctaactcctcactggttcaaaattagcttagagatcactaaaatatcataatttaagctctgaaaaacaccccgatcaaaaccgatttcaaagccaaaaactagggtttcccctgctgcctgctggcaaaactggttgaccggtttcactatgcctgtgaaaccggtttccctgctacagaaaagggaaa

SEQ ID NO: 100902 - DNA, 799 bp, Cannabis sativa
tacagtggtcgtacttagtggtcgtacttcccttcccttaagaacgttcttaaccatttggtgagctcggtttctggagctcaggacggcttaggcataaagccgatataagtattgtttatatatatgttatgaacatcttactgagtctgttgactcaccagtttgctacctggtctaggtaaaggaaaagctaagctggaggaacagtgagataaagctcgatagtgattgtacatattgggcagtgcaacaagggtttcggtctttcaacatttttagttgcttttgttgatgcctgtcgtttgtaaaaataaataaatagcaaaaggttttatgatagaaaatgtagttttcaactgtattttataactcgggatcccgacctatatggttaaattaattattatataataaaactagcttttgagtttagtaatttcaaatacgggcgttacatttaattatttagattaaaacaatagataattaatagcatatcaatgttcggaatcctctctctcctttcttctaatattcaaaccctatagtgagttgagtgcttgcccacacaattcaagtcaatactcaaatatagtgtgaaagattgtgaagaattttgtcacctaagagcatctccaatgggaaaactttagagaatgcttggtgaggtagacatattatgtggcaagatactgagatgctataccattggagaaaagagaatgtcattctagaaatttgcatggatgctatgttgtagtattgatgctattcattatttttttaataaaaaatt

SEQ ID NO: 100903 - DNA, 522 bp, Cannabis sativa
tctgctgccaattgctttttctcctcaacttttttcgttttcatcacccattgttgctgtgtttgcaccccagattttttcctgcaagcttcagcagtatgtcccagtccttaacagtgtgtgcacaaagtttgtttccactcgtatttaactcccacagaagcaataaagccatgctcatcttcaaattcgatcttttccacaagttcttgagtcatagacacttcaaataacactcttgggaaggttagtttctgcctatgcttggttacttcatctaccaaaattggttcaccaatctctcctaccaatttgaatagagtgttttgtccccaatgcttcaaatcaagattttcaagctgaatccatatagggactttgcgtatatcctcctttctgaaattcaggtcaggatgccaagccttcataatcactggccttttgttgaaaaaggtatagcccccattcagaacagagtccctgtcctcagaagttgtaaatctaatcaagaaaattccatat

SEQ ID NO: 100904 - DNA, 598 bp, Cannabis sativa
  modified_base (161)..(169): a, c, t, g, unknown or other
  modified_base (397)..(406): a, c, t, g, unknown or other
ggatccgacgtcctcgtcgactacacttccaggtgggtcaaggctctgataccatttgtaacgtcctcgcttcaagcctccattgtgcccttttcacccacagaagaatggctcttatacacgagtatgtcactctaactgcttcatggactgatgactgnnnnnnnnnaccaacacgagtatttccagtgtgctttatcctcactcgcacgcttcttgggagaacttcccaggaggtcacccatcctgaaattgccccaagtcaagcatgcttaactgtgggattctttcgagatgggcaaccagaaaacaagatgcactttgtttatataggtagtaccaatcaatccatttacgctctcttcaactatacaatcccatacctacacagtctcannnnnnnnnnacttgaccttccccaggcggcgtgggattgcacagcgtacccggtgtttccccttacaaatcatgagactactaacggtcacacaagctaggcccgcgcctagggcccactcttataataagctcaaatgaaaaaaaaaaaaaaaggaatgagattttttaaaaatgtcaattttttttaataatttttaaa

SEQ ID NO: 100905 - DNA, 639 bp, Cannabis sativa
catttatttaaaacattaactttataactctattactgaggatccccatttaaaaccaaatacttttatttacataaaaaatgttttaataaaatattgatttggacacaacagaggcttgaaaatcgattcccaactactaactcaaacccatagaccgagcacaccaaaacatatacaccagttgccttgctcttcaactcatggttaaacagaattactctcactcatacatgcactatagagcacacgtgagtcacaaaaactcagtaaaaaaaagcattagaatactcaaacaatgcatatagaagcaatccaaataattcgatataatcataagatagcaataaactcattatcaatttacaaattaatattcacatatgttaaacaattcactatattcaccaaataatatattaacattaaatcatgtaattgttgcttaatgaggcaatattaagataaccaattatcgtttgttacctattaagataaccagctatccattgttgtctaattagacaactatatataaatatatcctacaacgaatttataaagtaaaaattatatcacttatatggtaatttcatatcataggacatggtacatcattcagttttcttacctgtatat

SEQ ID NO: 100906 - DNA, 728 bp, Cannabis sativa
  modified_base (519)..(522): a, c, t, g, unknown or other
agagtatttttgttgtattctaactaattaagtaataaaagtgcatatacaattaaaatggtttaataaacatacaaatacaatatatattactagttatttttttttcttgaaatatgctagttagttatattaatattattttatttgttttttcttaaaaaaaaataaaaaaataccaaacaacatgtataaagtggtattacataacagaaaaaagaaaagaaaaaataagttagtcatcattggtattttttttttcttttttatcatcattcctaaaatctatagtcatcatcatccccagcatcataattcctaattcttactccgcttcatacatggttgttgtggctactgctaatgttcctttttattcttagagattttattataacagaagaaaatcaagatgcattataattctattttaaaataatacaaggactaaaataagagattgattaaatatatctattctatataaaatgtgactatataacagaattcttggtttannnnaaattattgggtgactttttttaaaaagttttctattcaaaaataacaatttttttttattaagatatattttaatattaatattactttttaagatatatcttttgtgttttggtctcttaatttgtaatttatatgagctctaaatttattgatttgtaattttggtctctagaatgcaagtgttattttcaattttgtttctc

SEQ ID NO: 100907 - DNA, 586 bp, Cannabis sativa
ctgaaaagatgtcgcacaagaggttctccactagctgatactactaacaccaacccgcttcaacaatcggattcttcttctgaatttccagataattcacggatcgatgaggattgtgacgcttacttggcgaaggctgctacacagcctcgccaatcaccatgaatgtcatctcatggaatgctcggggcttgagtaacccgagagcattccgtcaattacgtttactcacctctcagtgtaatcccgatgttatttttattatggagtctaaattaaagttaggatctattactaagtttagaaatgctttaaaatttcctaatggtattgaagttcctagagtaggtctaagtggtggtattttatttatgtggaagtccaatgtaaatgtatctattcttaactatggtaaaaactttgttgactgttatattggctttgttgatggtccatcttttcatttttctggtttttatggtgctccatgttcttctcaaaggcacttcacttgggaattactaaacaaactaaaagatacagcacctctctttccttggttagccattggagattttaatgaagt

SEQ ID NO: 100908 - DNA, 730 bp, Cannabis sativa
tcgagcaacaaaccttttccaatcttaagctttcttgtcggaatatttgggtcgatttcaatttcttctagttcttccactagtccaacattgttgtttgggttcccaagtcgggaatccacttcttcacccctgccttgggcagttccctatttggtaatgttttttcccttatcaagattttggctagaggatacttccattttagcttgttagggcaaggttataacattccagaggaacttgctgatttcctctcaagcatcccaccccattcattgttggaaacttaagccatgaatggaatatcgacataacaacttttaggtcatataaagccggtcggcctaacatgacattaaatgctgatggaatgttcaataccaaaaattgtgccattatagttatgctcttcggagctttcccaacagtgaagggtaggtgaatttgccctaaatgtacaacactttggccggagaaaccaaccaagggctggaaacaaggagtcaagtctttgagctggagccccatcttttcataaggtgtcttgcataagatatttgcagaggccccattatctatcatagttcagaccaccatattgtttgctatcttgacttccctgaccaacgggtcattgtgtaggaaattaatcttgacaacatcttcatcgctaaatgttatggcgggctccgctgcccgtggtatttttgttggatatattttacca

SEQ ID NO: 100909 - DNA, 552 bp, Cannabis sativa
tattgctggtgcaaagcagggaatgacagaaaaataggttgctgcaatatggtgtgaagcagatttgtgctgaagcagtaattcccagttgttacagcaatgtatcagcatcgcttcagcattttgaagcagggactctagtggggaagagtctgaatctttgagggagtatttttttcctcaattaattaacctagtttaactgttattgtgtttgtgtttgctgaaataagtgtgctagttaagtgttgctattgttgtgtttgttgctttgtgtgtctacttttgttgttgaatatagtattgtatgtaataagtattatgtggattagatgtgtattaatcatgttgatttgtcatgttttttttatgttctgttttagcttgcaaatgagaaaagcagtacttgtactttcagcttggtttagggtagcgctcgatgatgaaaagtatccattttcctccatttgtggagtgccttggtttgtgtgttgaaaatgctactttcaaatgctattcttgtcttagtgctagcctatgaggaatgctttc

SEQ ID NO: 100910 - DNA, 1213 bp, Cannabis sativa
ggttcgagtcccaggtaaaacatggttgtaatatataaatgcttaaatcaaaaaaaaaaaaaaaaagatcaatggtatataaatttatttatatcttatttattgaaaagaataacatcatttatatataaaaattcatatatactacactaataaaataagaaaatgatgatagaattttaatactgttttgtttaattgataaaaatcttttttatttttttaaggcttgaagatacccaattttaactacctaatgaattttagtaagttaattaagtgtgtttattataagataattaattttataatgtaacttaattttttaaacttgtctattttagtcatttcacaaaaagataaaatatattttattataaatattatttatgaatatccaaatcaccaaattaattatcaccattttctttattacattgatttcgtttcccattcttttagttatatttttgtataaataggggttcaccctattgaaataaataactgagaaattctcattcactttatttttctctttttatcttcctcttcttttcttcttatctattttccattagtctatattattttataacacgttattaacacgagtctctactcaagtcctaaagtaagtattttgttaaagtttttgaattgtttcaaaatcacgatacactaaatatatttatatatatacccatctgattgaaataatttcaagaatcttttttcttttttctttttcttttttctctatatatctatattatttatatatgtgtgtatatttttattctcatatagttatgcttaaattcatatatatatatatattatatactcttattatttatctataatataatagagaatatatataaattatgcatatatcctgaagattatgcatcatcgataaaattttgcatatatattgaagattatgcaaacatgatattcatcattatataattgactgaaatataatgaaagagatgaatacatattcacaaatatatattttatataaattctttgcatatatctcgaaaattatgcaaacataatatttattaatgtgtaattgattgaaacatagtaaaagatatatatattattatatttcttcttcactactacaaaaatgggttttcccgacgtttttaaatagtcgtttaaagtattcccgtcggtttctataaccgtc

SEQ ID NO: 100911 - DNA, 1220 bp, Cannabis sativa
ataccacatacactacgtaccttactgtacgagtgttgctagggtttgtttcataccctgagtacctctgagtgatgtaccacacattaccagtactcctccttacttatgttggtatcacggtactctcagataacattcactataccaatacattctataccttaactgtataagtgttggtagtgcaactaacacattaagcatgcatataaacataacatatacatacactcagatattgatatcacacattatatacagttcttaccttctttacagattcaagtgtgctggccgacctgaatggaaagtctcgtgctagatggatgccctaatcacattatgaaaccgagtaagttacatgatcaaaaccctaatcctgagaaactcgaacccataaccctaggttctgttatactttctatgggttattctaactctggaaatagggaaacacccaaccacgacacggaatggacaagaattgaggaaatgaaaggcacgcggaaccctgccaaaactggctagtcagttttacacgtatggttacccaattttacacgtacgtgtaaaactggttacccggtttgcaccagtccacccaagaaatttcatttcttgctcaaaactccaccaaacgtcaccaaaccttccaaagtacctaattagggtatatataatatatttcagccagtatttcacagaaaaatccaatgaaactcaacttgccattaaagaccaaagctttgagttcaaagctccaacttgcataaattcaacacaacaccactaaatcagctactagaagttaaaatcaactcaaatgaaccctaaaatttgaatcctaaatatcccaaaccctaacagccactaattctcaaaatcataaactcaaaccaagaaaaaacttaaaaactaaagaagggttctagtagggcttaccttgcttgattctcccaagattcccccttgttcttgctggtttcgaagagaaagaggaaggaaagaaaggtttccttcaattttaggttttctcttatttccttaattgattaaaatgaaaagagataaatcaatctcttactgaaattgatttagctaggtgtcattaagctagggcagccgcctatccttcactaaaggaaatgactaaaatgacctcaaagttataacataggtatttttcaaaactaggggtaaaatggtcaaattctata

SEQ ID NO: 100912 - DNA, 755 bp, Cannabis sativa
gcacaagtgcggattttaaaattttcaatccaatccaatccgcgtaagtgcgaatattcgcattttgcagattggattgaattggaccgtacgaattggattggatcgaatagtttgtgaacacccctgcacaccactcacctccacagccttctgcttttcattatatactacttcgacacaatagaaaataaagaatgtataatctcaattacccttttgaatattgctcatattattcaacatgttcgagtccactacactttcgggtgtggtgtaacgtatagctagactagaagtagaaggggaccccatctttcacaagttttttttttcttttttatttgttttaaatatttgagagtcaagggacaatgataattccaaagccatattttaagaaaaagtatagtattatagtagttagataattagaattaaaataataatctacaatttaattaagatatttttttattagggatacaactatatttagaattaaagaatacgcatcaaataatctgctccacttacatcgtttgacaaaaatactaaaataatatcagatgaaaaaaattaaaacatcacaattaaccttaagaataactatattctgtttcatgtactatttcgaaaatataatagtaacaacggttgcataggttcattcaaactcataatttgagcacccaattattgtgtaaggtacgtaatttcaatattaatatttcgttcagttgcagagaacttgc

SEQ ID NO: 100913 - DNA, 835 bp, Cannabis sativa
tttaatagtttttttaatttttttggttaaagttaacaccattaaattaatcacttaaatatgtatatatattttttaaaaagaatagtttgaaatatttaaattaaatttaaaagtatcaacaaaattagataattatttttttatataaattttaattcaaatttaaatttgaggttaattgaattacttaatcatattttataataaatttattaattatattatttaaaatatctaaacttatttacttattttattgtttaataagattagttatatagattttttattaataaatataaatttggattaaatttttatatttaaaaaaatataattaaaataaattagatttaattttattaatattattatttaaattattaataattagataataacaactctaatataagtatcaacaaatatgaattgcatgttattaatacctaatatattaatatatatatatatataatattttcaaaacatatatgcggtaattctccagtaaaatttagaagtttaattgataaataaatgggaaatttaacagttcattatcttttagtatgccacattaaaatgcataagaatttaatactcttaaattaattaaatctcaaaataccctcctcatgccttctctctttgtctttgccctctctccctctctctctttaactctcaccaaaaccaaccgataaccacgaccacgataccaaaccgaaccagacccagaccaaacccacgaccaccacaccacctctggaaaaacccagtccgaagacgaaacataggacaaaatcgaagaggatatcgcgaaactaca

SEQ ID NO: 100914 - DNA, 623 bp, Cannabis sativa
cttcaaaaattacttcgaatgcaccccggtgtaatttgcgacttcccatgggactccacggagcaggagcatgagtctaaggttgtcgttgaagaaccctatgatgatatctctttttcatcaactcgcattgattgcgttttgaagaactcggtggttggctcgtttttgattgaagattcttgctctagcatgtccgttcacttttgtacccctgtggaggagaatgtcgcatctcctccacaggagccatgagaggtattgcttggaactgtagagggttagggcagacctctatagttttggaattgaagtccctgatcagatcacactctcctaattttatcttcctaaccgaactaaaagttgatgttgctcctctggtacgtacacttaaatccctccatttttattttaacatttttgtgctgcctattggtgccgcttgaggcattattttggcctagaaggatgcatttagttttcagtgtatttttagttctcgcaatcatatctgaggccttatttactcagatccccctcccatccttgacttctctcttgtgtgtatggccctccttatctccatgttgaaaaatttttttggactgaatttatgaaaa

SEQ ID NO: 100915 - DNA, 620 bp, Cannabis sativa
acagggagaaaaagattggaactcgcggagttcatcccaaatggatttgagacgagtgaaataggatgtgacattggaatccccctgtttaagattggaaatagatgtttggagctcaaagatcctagtgccatcaccatgattgaaacggtcatggagttcattccacatgtcgactgccttatcttgaaacataatactcttggcaatgtcgggagaaacagattgaaggatccaagacatgaccatgttattgcaagtaatccaatagctaagattaggatcagaaagagagggacgaggtaacgtaccatcaatgaactgagttttgttctttgctgcaatggagatggaggcagcgcgtttccaagaaaggaaattttattgacttgtcagaggagtgggaacaagaagatacccaggatgatcgccattgttgaggtggtatgggctcttgtgatcgactcgttgggatcgttcaggacgatgaagaactgtgtgattcgtatcgatgccggatgtggatcgatgagctggttgatttccagaattgtggccattgacgtcagagccagagtcttgcgaaggagaaggggtcggagcgggatgcggctcatttg

SEQ ID NO: 100916 - DNA, 528 bp, Cannabis sativa
ataaaatccatggtgacatcttcccatttctactcacgaagtgtcaaaggctgtagtaaccctgtcagtttttgatgttcagccttgataagttgacaagtcaaacaccttgacacataatctaccacatccctcttcataatgcaccaccaataatagggtttcaaatcttgatacatcttggtggtacccggatgtaatgaatatggagtggtgtgagcttcatctatcatctctttcttaagcccactatcgtttggaacacaaactcgatccttataaagtagcatacaagtatcagaaaccgtgaagtccttaacatgtccagctacgacttcgacttgagtttcgattaacttaggatcttccagttgggcacacttgattctttctattacatcagaatggagtgtcaagttactaagttttcccaccacaaactcaatacctgtgttgaccatgtcagtggctaactagggatcagccaaggcatcagccactatatggcttttccatgatgataaagaa

SEQ ID NO: 100917 - DNA, 769 bp, Cannabis sativa
gattttgcaagacatcttcattgacagggacatcaatttaattgttactattccccttcatattgaagatgcatatgcttggtattggaggaatgaaaaacttggccattactcggtcaagagtgcttataaagtgctgcaggatatccaaggacacacgggtacaacagccaactctggtttttggaggaaattgtggaatttgaaagtccatccgaaggtgaaaaacttcttatggcaagcctccacagattgcttacccactaaaacccagctgaaaataaaacatgtccccattgatgataaatgtcctttttgtctagctgatcgtgaaaccataaaccatgtcttggtgttatgtccattttcacaagcatgctgggcaggcttaaatgttggggatccggggtctatgcaaggctcttttgccgattggcttcttcaaatgtttgaaaaatggagtggccatgacaggtatttgattagtatgctttgttggtcgctttggaaaagtcggaatagcttggtttggaatcaaaaaagtgtagaagttgcagatgttttagtgttaactaggactactcttaatcaatggatctatgctcaagatagaaaatttgatccttcttttgggttgatgaactttgaagatggcaatgagcatttgcaagtacctaaggaaaacacgattaagattaacacggacgctgcgatctttgaatcaactactcgctacagctactcatgtgtagctcgagatcatgctggc

SEQ ID NO: 100918 - DNA, 544 bp, Cannabis sativa
tccttttgtagactcatcctgatgctgcaaagtttcgcattcggggaattgaaccagaagtagaggaaaaattagatagaattttatgaacgctgttgctacaggagagcatgcttggacaccttcatctggaatacttccatttgagtctgaaaagtcttttaatgatactgaaactttacatgaacaacttgagagtagtgatgatgatctagagatgcctaacattgatagattttctaaagagaaaattagcaagagatcaaccgagccacttgagaaacaaaataaaaaggtaaaaaatgaaaaatgaagaagacagggcttgtaatgatatttgaacaaattggtcgccttatgtcgtggagacaagaagtagaaatattgaaatagctagaaaggagaatagtattgccaaaattatgaaactattaaattctttgcgtaaaatcaaaaaagggagcagcttgtatttatttgcaactcgcttgtttatcatgaaagagaagagagagatgtttgtttctttggaagaacctgagtt

SEQ ID NO: 100919 - DNA, 534 bp, Cannabis sativa
attcacaacaaaatattagggaatctctatagctggacattatattgtttgagatttcttcatttttcagaattttaagaaattataacttaattttttttatatcaatgtgtatattggaattatgataaatattctacatgctcttgaaaatcttttaataacttatacatgtttatatattaaataataaatatatttatatatatacacgttcaattgataaactttgaatttgctattgtaaatggttcaatctttacatatatataaaatacacactaattaaaatgtagactgttcatataaaataaaatttggcttatgattttttcaaatatataattgagaagtgtttcatatataaatgtaaaaaggataagttagactttttttattatacattataaatataattacaaagttattttaattaataaatatttttttaagggtaaattgcaacataaatacttaatgtttttgattttatacacttaaatacctaatgtttatttttggtggcaaaaatac

SEQ ID NO: 100920 - DNA, 1249 bp, Cannabis sativa
  modified_base (113)..(121): a, c, t, g, unknown or other
gcaactcctattttgtgatcattcaacacattttgtaactccataatgtatgttacaatttgaaaaaattaatactttgtcacaattatttataacttaattatttaatctannnnnnnnnttatataaaataatataacactacctattgctacctttatttttttttaaccttcatcagttatcaaaaaaaaaaaaaaaaaccatattcttaataataaaaaaaccaattatgaataccaaaactcatacataaatctaacacaataccaacactaaaactagttaggaatttctcttaggtgcaagaagactcaaccatagggttggcccttagatataatgagtcataggaaaaaaaaaagtattttgggcccttatttagaaaaaaaatgtggactcttattttaaaaaaatgtggtatttttcaaaatcaataaaaaaaatgtaattttaaaagtagattttgggcccgtaggctaggtgaaccctaggcacagacctagaccgcctatgcctagggtcgggcctgctcaaccatcaatccactacaaaaaacattcactatccactaaaataaaatattagttgcaaaaaaaagaaaaaataaaatgagaatatttgtcagagaatattcagtaaaacaaccataactcactcaatattaattcgattgacatgatttaacttgcattttgaagctattttaatgctctaccaatttatgtctcacactccaatcacaattctaaagttaccaagtcaaaatttgtcttcaagctttcagacttagctatttttcttgtaatcattctcatgagaataaaatctcgaagtagacgtagctctattattgtcgcaacacatggagtgaattaatataaatttttatatgtgctctctattttacgtaattacttttaattttcatctcgtctatacatccgaccgagttgattagatttctgtatgaataatgtgtaattactaaaaatttttcattttaaatattaagtactaaaaattattatttttctatctaattactatttattttgccaaataaaatattataaattcataaataattactatctcatatctaaatatatcttgtattttaaaatataatataaattgctaattatttttttaaaatataacataattactaatatattgtagtaattacaaggacctagtaatccaaacacaagccaaaatattctcaacaattaaaaagtatatt

SEQ ID NO: 100921 - DNA, 637 bp, Cannabis sativa
tattatacatgcaatagcttaacataaacaaatgattgaacaaaactgagtggatggttagaacaccaaaatgcacataggagttgtaatggagattatgtaaaagaatgtttctgcataacatacaaagaatgggaattgtactattctgtctatctcttgcttcttctattatagattatggcatgaggatttacatttctatatttaaccagattgttagcactgggaatgatggaccataatacagattggaaagcaattcaacaacgattgcttccttgcaagtctaagcatcaggtattatatttctacatagctcgttcttatttctcatggcttatgaattttctgctgctgaatagatgaatcctatgtttagaagagaacatacgagtcaagtaactacactgcaaaaattaacagaaaagagccaagttccatgtgtcctgttttcaaaatttatgtagtatccagtaacagcgtactataccaaattgtcactgactgatcagaatttgacttcacatattggcgtgaaatgagatggtttttaatgtgtgatttttgtgaaagcttcgcagaaatttgcatgccaaattttgaactaagttgattttaccatttactattttgt

SEQ ID NO: 100922 - DNA, 604 bp, Cannabis sativa
actatatatatatctcttttttttttttttactttatacacaaaatagcaagaatggtgcctccatcttccatagcgacagacatagcaaccacagccacacgaaaacactcactaattcgagcgagattgaataagaaaaggaaaatgatgacaaatgaacacctaacatcttcatcaattcaaggccaggattaaatgaaacaaagaggtcaaacacttaagcccacccaaattcaattaaatacgaaattaaaaatgatgcccaaacttaatcgtaaaaaattgctaagtagaaattgaaaatgtataaatatacatgtcagattaaggagatacatattaatatacatcatccctaagaaaaaaaatgatcattaattcacattataaaattcaacgttgttctagagtcattattggttaatatcctgcattttattgtaaattagggatatcgataataaaaaggcacccaaatcataacaggacaaaaaaaataaaaaactaacaaacatatatttttttactgttgttttattgttgttgtatgtgaagaaaaatgttaaataattgaaagaaaaatttacaccctattctgtttt

SEQ ID NO: 100923 - DNA, 558 bp, Cannabis sativa
attataacttttcatgaatttcctcaagtcatttactttcggattccctaaagctccaactccaatggtccgggcctttggctttcaatatgcttgttttaatccagcaatattctttatttttagttaacctaagaacaaaatttttataaagataatttactcccagctccctaacgttttaattccagaggcttggaccttctaaacttcaattttttttagtcttttttacaatttgtctttttattatttaggattttccatcttggaaacctaaatttccttagatcataaacctgggtcaacttatgaattattgatctagctttggtaacaaatttgtacctatgagttctctaaggactccaatttcaacggcctgagcttgttgatttaaaatttgaccatatcaaaaggtgaacctttacacttagaaaataattaatttcttttggatgtagatggctacatatactacccccaagtgatcaaagtgttaaagtttatgccctcaaaagcatgtaaagatattttttgtttattaaataaagagtt

SEQ ID NO: 100924 - DNA, 1140 bp, Cannabis sativa
gaaaagaaaattgtctacctttttatcatgtgtaaatccaaacaagtagcaagagagtaaatacacaacacccatcttaactacatcagatcatcaatgagaaattcttgataaaaaaaaacatgtctcacatcccttcttctgactttgtcagcaatgccaaagttaggaaacatcctagctttaaactttaacatctttttgttaagaggtttcaagtcgtattgaccaccacagttgaaaccagttatagctgaaaactcctctactctaaatctaacggctttagaacctatcttataccaacactcctcatcatcctctccgtattaagtttccgtaataacataagatgcaccagctctttttgaaaaaacaagtgtatgcatatcaaacaaaaactcaaatggcatctttcgaaagatttcttcctactcacatgaaaatcttaattttatttcaagaggacacttgtatcgttaaaatcttgagcaacacctccgaatctatttttgggtttaatcttaaaataaaatacctgagatataaattcaaaaaaaaaaacaaaccgaaaaacaatttaaaatatcaaataacaaaaataaagaaataaatacaaaaacaaaaaaaaatcacaaaaatgaaaacaactttgatctacataaaaccagtttaacaatgaaatatataacatacaaataaataaataaaaaaaaaggataaaaatcggtttcacaacaataaaactaaattataacaaaatatacaattgacaaaatgaaactagtttcatgttataattaccgtaggggcagcaggaatagatgaaccactcggttccgtctgacactttcttcttgtcacagacttcaacagggttttttttttatacttataaaatcaacaatatgctcagaaccatcatctatggaatcagacaacttttttttaaaattaacataaaataatgtaaataaaaatgaaacatattcaaattaaaaaaggtaaaaaaaattaatagaataataccatataaacataccatatttttctctattttaccctttttgatataccaccaatattacgagaagattttcttttactgccaatgactgaaccagtttcagcaactgtttt

SEQ ID NO: 100925 - DNA, 655 bp, Cannabis sativa
atccacataattattaatatttataacactttgtatgttatccatattgactaaaaatagaattgtttctattctaaaagccatatataataactttgtatttttagtccaaagacacaacacagagtcttactcacgctcgtctcaagctaattaggggactgagccaaaataaactaatttggtcttttatatataaatttctttatttttttttcatatgtaatggtaaaaatataaaatatatagcatttttttttttgagaatgaaacactttattcagcaacaaaagagctacacaaggccaggtttttctgcatttaacaaggcagcagcacaagagggaataccctttgaccaaaaagaattacatctattatcaacagcccacttagctaaagaatgagcaaccttattgcaatccctactagcaaaaatgaatcctttacaaccatctaacacatttgaaaataaaatctcctttatcggtgttccccaatcggctgtaggaatggtttttgaatgaagatggttgatggcagtgacattgtctgagcaaaccagaaacggcttagcctgcatcttctgaactagaagcaaccccaatttaaccgccagcaactcagccgctatgactgaaacaaagcctgactt

SEQ ID NO: 100926 - DNA, 678 bp, Cannabis sativa
cagaaaaagtgattggaaatggcctaggtctgggcacttggcccagcacctaggtcaacctgggcgtcgggtcccaattttagctcctagatgactctgtttgttctccaaaagtacccaaatcttaaatgtcaatgaaaacggagaatatgcccagaagacttcttctaaattatagttggaaatggcccaagttgacaaagtgtcaacataggcgctcggcccagcacttaggtcaatctgggcgctaggtccccgttttggcctccaagttgatctatttctttcttgaaagcacttgattcttcattttggatggacatgaataaaatgctctggataatttctcaatattatgattggaagcgccacaggttgacaatatgtcaacttaggcattgggtgctcaaaaataaaagtgttctgattctgattttgatgcctaaaatatgttcgtgacatgtcttattcatgtcgaagtataaattttgagccatttgtactaagacgggctcaaaaattgaaaccctagatgagatgtcaacttaggcgctgggtgaaaacctaaggcacctgggttgacttctggggtgcagtttcgtctcttttcaatttctatgtcttggatttgcttcttctcgtcttcttgattttgaatactaaaagatggtgagttga

SEQ ID NO: 100927 - DNA, 928 bp, Cannabis sativa
aattcatttaattatttgattatatataattgaaaattgtttcgtcaaattaataacattatattgattatattttattttacggtactaaatatgtacaattttaaaatataagatattaaacaagtattattgaaaatataaaatactaaatgtatttttcaaaaaaagttaaaatactgtatattcccaaaaaattgtatgaattagattgaagaaaacataattaattaggaccaaacccactacgcacgtatcttatatagacttcatctaattcaatgaaattcgaaagtggtgaatggtgtaaccacaagttgaccactcaaatcctcttaccaaaaatcctatcccattctctatcccataaaatactaatgcgtctattacgttggaaaagtagtccgactttcactgagtgagtggctcagtggcatcctcttttactttttgccatattttttcattaatcctaacgtaaacgtttgtggatccaattttggtcaatttgcatgactcagtcatatgggtctcagtctcccattatagtgcgcacaacttgtttttatttaaaaatacttcaccctatataaagccaaactattaaaaacaaaaattattaccttccatccttttggaatagtataaccggcataggaaaaatcattaagagcctctcggaaagtgccttgaagaggaggagtgaatctcataacctcataaaccacgttccatgaatacttcatcttgcttatgtcatcccattccaataattctcctgctttttttgatccccaaatctccttttgctctgtttcatattcccatgcacatcacaattcaaacaactactacttattatcaataacatgagtttcacgtacgtgatgtatccaaatccaataaaataaaatcaaaaagtatttac

SEQ ID NO: 100928 - DNA, 612 bp, Cannabis sativa
tcactataaacgttattaaatatacatatatatatatgaggcaaataaatacgttattaaattagggatggtatttttgatattaagattaaataaatggtgtgatatgtaaaaattcctttttatttctagtattaataattgaatatatatatatatatatatatgcacgttatttaatgctaacatagatgttaatatttactcatcatttgtataaggttatttttgtaaataaattgttttttttttttgaaggatttgtaaataaattgttagttgtgtatattattgaaacaatcccataataatataataataacattttaagtacctgtaaaaaaatgaggaaattagactctatactctttttatattgtcatcttttatttttgccttcttttccaaagtttatcatttttacctcattttttaaatactttaccgattttacccctgtcaccttaatatactctccatgtgactcccttatgtcagggtattttgggtacaatacatataaaaagagatatatttcaattaaattaaaattagaggcagatttaattaattgataaataaaacagatatttttcaataaacccctaaaaa

SEQ ID NO: 100929 - DNA, 591 bp, Cannabis sativa
ttagcagtcttcttccttctttcaacatcagttgaggaattaggagatttatcctttacagtctgtcgtttaatcaggttcctcaaataggtgttaagtttgtagcactttggtctgatgtgccccctcctgttgcagaaatggcatatggggacaaatctttcttgagatgaggcagttctcttcctaccagatcttcggttattgttgaccttcttcagggaatcactagaaaggatttcgttctgactacttggtgtgttctcagaggcaggaacaaacttaagcttattttcctcttgaggagatgtggaaccattgatggaaggattttgcccttgtttatataacagtttataccctatagaagtacgatccccaaatggtttttgactctgtatggcctggtttaaggctgcagttcctgagggcaaggaggacagggattgcttagttctgactagttctgcagttaacttgtagatctcactatcctttgagcacagttcccgcgtgagtttttttaatttctcttcaaggtctattttactggcatccaattccttattcagatcctgaagttccttgacc

SEQ ID NO: 100930 - DNA, 547 bp, Cannabis sativa
tgactacaactcgatggctggttattgaatttattctttaactattttctcgactttattttcttcttctttatcttttgttgtggaaaacaatgtacctggttatggattgggtatagatttactattttattagaatgactacccattaaggtaatttattgctatgatcttctatctttggttcaaaaaaagtgatagcgagactatgatagaattggtttgtggctggtgaataacattgtattcttttttgttgctagaatatccaataactaaacatttaggtgattttgggtcaagttttgatcgattatgatcatagatttgaacaaaagtagtgcaaccaaagatttttagcagtagttctgaggaaaaaagtgaaagatgagggaaagtttgaagtagaagagaacgatgagttttgaaatataagaaacaaaatgtgttgcagagactacttttcatgtactgtgtattatgctttctttctttctttcaagttttaatgtcacaatttggtttaccacaaagtttaactaggaca

SEQ ID NO: 100931 - DNA, 804 bp, Cannabis sativa
attaattgattaataaaagtgttatttttcaacttacccctttcttctttctaaaatatatacatatatatatattttctaagttgaggaatactttatctatgaattaatcaaaaatattcctatattatatttcattaaaatctatgcacttttataagtaggttgcctaatatacgtttgttctctacttaagtatatcacatgatttatattaatttaaaaggagggtataatgaggacatcatttataaaattgggtatgttttaaagaatatgaagataaaggtaaaaatgaaaacaaataaaataaagtaggtatacaatgtaatttctattttttgtttcttttaggggacggatgccaactctaggctcaatttgagtctgtcacgattatgatgcgattatcaaagtaaacacaattttctaaaaaaaaaaaattgtgaaaattattaattcatgtaatcgtattaatatgtcacaacacgacatgattattaaatatgcctttgtcaacatgtcgtgagttagactctctgatgagaaagttctggtggttaagaaatgttgataagaatagatacatggcctttaaagcatgggataaaatttgccaaccaaagagttcaggaggattgggtttgaggaaatgtgaggatatgaactaagctcttttatctaagctggcttggagtcttgcaacaaaggaggacaaaccatgggtaacctgcttattgggaaagtattgcaacagtgatagtttctggtgtgtcaagtaaaagaataatgattcctatcaat

SEQ ID NO: 100932 - DNA, 649 bp, Cannabis sativa
agctatgtcacctctttatggtgcaggtcggccatccatgttctcggataacttagggtgtgtttcgattttttttttatggtgagtcatattttgggggttccaggacctcgaaatctcatctcgacgtctgaacccctaacaggagacctgtgccatcttttggtgccaaatgatggcagaggcacgtcgatgcttctgagaagcctaggatggtgtttcttgcttagtttagtcatatggatgctagaaaaatacttttgtcacattatttcttggccaattggtgggagagattgtgccatctttttggtcacaaagatgacacaagttagtcataggtgttctacaccttttgttgacttttctcagttatttttggtaccttgatttgggaaatgtacttttgccaaagaaaccaggggcggaggcagtttataaggtgggatggccctcgcccccctcaaattttaataaaaatgaattcatatatatatatatatgtatagctaatttcattaactaagtgttataaatatatatatatatttggacatgtataataaaaggagattatatatatacacgtatatttagtaacttatttatgatactttttgatgtgataaatatatatttatgcaggtat

SEQ ID NO: 100933 - DNA, 910 bp, Cannabis sativa
gataataaacaataaacataaaaataaaaataaacagaaaactataaaatactttctgtaatttgatatttttttgacaataactaacactagattattaattctttatatagataggaatttcaagcattctaatttaaaaactatagaatttgaatataatttattttattgcaatttgtaatcctgattcccaaatattaaaaaaaaagtgtatataaatctattatattacattttgcaatttaattttgggaattattgttatttgttacacatacaatttttaattgtttcaattttaactctcaatcatcattccttgaaaaaaaatcatttcacttctcttcaagtttttaataatagtataatataacagtgaataataatattttttttaatagaataatagaaatagattctaatttctacatgatataatatatataaataataaatatataataatatttatgaaaaaaccttgaaaaaatagtgctcctttttcctttttttctttattgttcattgatcactaaagcttggtccttcattctttgccagatttagaagatgaaaaagttaaaagataacaaaaagcaaaagaagagagttgtagaatagtgatagagagagagagagagaggaacgaaattaatgtgatagattgagagagagaaattgaatagaattccaaaagttgatttgattatattattatattttaatattttaatttattataaaataataaaaccaaatactattttcaaattttataatgtatttaatttattgtattgtaaaagtaaaagaataaagctgacagttactacttttaagatttttgaggggggggggggcagtacatgtatattgtgtgttaattgtatttattatttaattttta

SEQ ID NO: 100934 - DNA, 695 bp, Cannabis sativa
aaataattagtatttttaccatacaaatataaatttaagaaaaaataataataattaattatagcttttaatagtttttctacaatattacattaacatttacaaaatgtcactaattctatttttaaaaataaaattagaattcttttataacaaattcaaatatttattgatagtttcaaatgtcactaatatatgggaaatagtgacattggaggttttagtgacacgagaatatcttacatttgcttaaatgtcactatttcatgaaaatgtcacaaaaagtatgaaatggtaacatttttaagatgtcacttatcaatattttggtatagtgtctacaaatgcctattaaaccgtgccataaaagatacttgttacttccttcttattcaggtagggacaagaaaattttctttggaaaaataaaagaaaagttgtggaatcacctatcggcttggcaagaacaattattttccattggtggcaaacaaatccttctaaaagatgttgcccaatcaattctaacataagtgatgagttgattttgtctatctaaatctctagtcaaccaaattaagactatgatgaataaattttggtggggttctaattcatcatataatggaattaattgaaaaacttggaaagctttgtgccaatcaaaggtggaaggtgttgggttttatgtccta

SEQ ID NO: 100935 - DNA, 527 bp, Cannabis sativa
gaggagaaaacttgttctcaatatttaaaacactcgagaaagattagctatatgggacatcgaagatttttgccttctaaccatgtatttcgaacttggaaaaaagcattcgacgggaagcaagaatttgaagtggctccgccacctttacttggagaacaattagtagtaaagttgagtaatgtcaaattcaagcttggaaagcgaaaagtgacccctaagaaaagaaagggaaaacgtgacaattgcgagcaagtcacagctcaacctgatggaccatggaaaaagaaatcaatattttttgagctcgagtactggaagcatttggttttacgtcataatttagatgtaatgcatattgagaagaatgtgtcagatagcctaatcaataccttgtttaatgttcctggtcggtccaaagatggaattaagtctcgtctagatttgaaggatttaggaatgcgagcaaatttacacccacaagttgttggtaaaaaaacttatttgccaccagcatgttatgcctt

SEQ ID NO: 100936 - DNA, 638 bp, Cannabis sativa
tgcttttcttactgagtctgtcgactcacagttctactttcatgtgtaggtaaaggatagatgaaggctgaacatgagtgagcttgagctaggatgacgttgtacatgtcatggcggcgcgacctagagtgttcggtcttgggacatctggggttattattttgtagtcgttgtgcgacctcacttttataatctaaatattttgtaaaaagtttatcaacgggatcctgacacttgtaaatattcttataaagtttataaagtttcataattaatctgaaaagttttaacttgacacgattttcataaaaattctttgattagttagatagcattgcaattgaaaaatcattgtaacgtgccttagcattaaaatgttaccgtaatgatagtcatagacaaaagataagagacagaagagtcaccacaacatgggtaacgaagtaggtatttccaggggcggagggatttggccatctaaagaggccatggcccccccaagaatttacatattctattatatatatatatgattttttttaattaatatgtattcactatataggctggtggcctccttaagtcatggtcaaatattttttatttttaaagaaaaagatagcaaaaatataccaaca

SEQ ID NO: 100937 - DNA, 1007 bp, Cannabis sativa
  modified_base (445)..(447): a, c, t, g, unknown or other
attcagaatgtaataactccaataatgaaagttatgagagttgtttgaatgatgaagaagtgttattagttgaatacatggaagagaatgagcctacaaatgaagatcaagatcctttgaagtggtattaactcaaaatttggctaaatcgaattcttacttgacaaataatgatagtcgtgtagtgaatgaaatcatgaaagagaatgaattcattcatgatcatgaaatcattgaagatgaaatcacaagcaaggttatggatagccaattggagagtgagcaacaaaaagaagggttgttagatgaaagtgtagataatgtgacattggaagatggggaagtacatggcatcattgattcgaattcactaatgatattgacttatacaccaccaatggattcatattttccatcaacaccatccccaccatattatatcctnnncgagctacgaaaggcttctccccaagctcatcatccaaagtcttgtgttgttggcgctctttttggttcaaactcatcgcttgccaagcttgaaggcaattacaacaacaacttttaagttgtcttgcatgacgcttattatgggcgtcaatcgcttgttgatgtgtcatggttatcaggtaagtctttctctccttgggttttatgtcacattgggaataatgtgaactttgagtttggggggagggacttagttttaaatttcgttgtttgtctaattgtttagttgtttagtttaatttttttgtgtttttgtgttgtttgactcaatttttctaaatgtgagtcaatttaaaagtaggtggatagcatagtttggaaattcatttatttttcaaaaaatttgtgtgcttgatgacattacattcttgactaatttcaattttgtgatttaaaagaacatggaatcatactaagtaaatttatagcaattgaattggtttatgtatgctaattgtgaaatgtggaaagttatttgaaaaattctagaacttgcttgc

SEQ ID NO: 100938 - DNA, 648 bp, Cannabis sativa
tttttttaaaagatgatttttgtagttctaatttctttatttgtcaaaaaaaaaaaagttttaaattatcattatttaaacaattaatatctaaaggaaatcttacaaaaatactatttttttttttgtcatttttataattttactgtcaaactttttttttaacatttttactgtaccaagtttttaaaaatattgtgttgtgttaaagtttaaattaaaaaaaattacaaaattactatgtttcagtaaaataaaaaaaaaatatcttaaaaataactaagacgactaaaaaataattacttaacaaacaactataaaataataaaaagataattacaaagtaacataaaaataacaaaatattcaccttgcaataggaaaattatagcaaatgatcccaaatcataacattatgtaagtaaatattctcatttcaaaatttgtagcgaaatgtctcctttttacactatttattaattatattgtcttttgtcacataaaaaatttttgtatatattattttagaattagaagcatataacttaaagattatggtatatctatatttgttttgttaaaatattttttattttaaagttgtgtcgatttttttaattttttatgggttgttgtgggttgttggta

SEQ ID NO: 100939 - DNA, 1016 bp, Cannabis sativa
agagggtgtctcatttttcccaggctgttcttcccgagccttttcctgtctcctggttcgtgagccacgaggtctgcctcgtggtcttctcactccagttccaagttgattttgagcattcatcccctgtgccaccttggccgaggatgcctcgcgttcaaactctcgcgttcccctttttttggtcttgtttgtcactatttataattacatagtggacaattgattacatagttggccgaaatatgtttatagcaatcatccctaaaatcgcgggatttgatttcatatcacgtagtgtaaatgtggtgtacgatttgaaaatcgtatagctgtgattttcttgcttttactgggtcaaaataatcgtggattaaacacatctttagctattgtatctagagatgtctcgacaaaaacttggttacagtgatcccaatagcgagctagggccattcttctttccaagatcgacaatgtatgcctggtgtcgattgcggttcttatttacaaagaaccattctaactcgccagggttgtaagcctcgttattgctagctggatgaagctattggaagttttcccatagcgagatggatacctcgcttacatgttcttgagccgatccgacttttacacttagtttgttcattgtacgctaagcatctccatgattgatacgagtcgctttctttggtgcctcaccattcgcatttagcgacatatggtttctcgctattatattaagtgtcaatttatacattgatttctcgcctaagacattacagtcagcgggttacaaataatggcatcgatttacattccttttatcttaacacgtgtccttcattgaggtggcagtcgaattttgtgtataacaatcaataatagaaaggaatttttatgtggttttgtaattaaaatttacataatcaagaagtctgtattatctgtgagtactcttttatagtatatatgaatacaaaataatattctaagtattttaaatacttaat

SEQ ID NO: 100940 - DNA, 1057 bp, Cannabis sativa
atggtgcggaggcgtgtgtggggttttggagagttaagattttcattttagggtgtggaaaatggagaagaaataggtgagaaaatatagatgagcatgtgagaaatagaaaaaaagtaggtaggcacgtgggaaatgtgacaagaagtaggtgatgatttttcaatggactcttataggcgacggttttaaaccgtcgcctataaaggtccattaaaaaaattacattttattaaaaaacatcgcatattttgtttactacaattttaaaccatcgggaatactaaatttttcccgatgattttaaatagttactcaatttttttagcgacggtccccaaaaaaaatcgtttttaggaccgtcgcaaattctgatatttgtagtagtggtcacaacaaatttgatttttgtaactaatacctttagccacgaattttttaatcacaacatatgaattattatttataattaatcacaattttttatacttttaatcacaaattatgactaaaagtgaaatgtttgtaatgtgagggtattcccatgatattagaatcaaggaaagatgattacaaaatgatgactatgacaatgaagcggcccaacgggaccatagaatacaaggcaaaataaaaactaatttgacccttaataataacagaaaaaactaagcaattcttaacacctcttctcaaacttaatggggaggacaccataccaagctttgtcaactaacaattgaaaatgtgttgtggaaagactcttgttgaggcatttagctattgggtttgaagatggtacataacgaatgtcaagtttcttgactagcaccttattacgaacaaaatgaacatccaactcgatgtatttggtatgagcatggtaaactagattcgaagcaagcgcaccgactcccatattgtcacaccacataatcagagtagctggtagactaaaacaaaattcattgagcatggcttgtatccaggacaatttagatgtcacctaagctagtgcacattattttaattctgtgcttgaccgagagacaacaaa

SEQ ID NO: 100941 - DNA, 561 bp, Cannabis sativa
atattttaaagttaatttcagaaaaacacttagttaatgatatatattctaaatagagagaatcacatggtctgagggactagtttgctactggtttttgacctgggatttatggttcatttgtggttgttgattagtttgatgatgatgggggatgcggtagcggatgttgatgacattgtagctatgactagtaaattgggagttgctcaggaggaggactgggaggaaaattttgatgcagtggcatcatttgggggaagttctctggttgggaagattatatcgaagcgggacattagtgaacgattgttgatgaatatgtttggtcgaatgtggaaaggaattaaggattgggaagtgaaggtgtatgaagaggaaggggataatcatattgtaggtttttccttcaaaaccccacaggatgcaaacttagtgttatctaaacaaccatggtattttaatggaggattattggtactagaagcttggccagatacgggacagtggagggattataatctgaataaaatatcctgttggattaagatgagaggatgg

SEQ ID NO: 100942 - DNA, 500 bp, Cannabis sativa
aaaaaatcgttgttggagatttttgactttaacagaaagcttgatgaaatgtggaattacaattgatatataaataccattattatttaattattaattttgtgaaattgtaatatacaatttgagtcttgagtcgcaaagtgttgataatgatcataaaaaaaaaagttttaaatccttgaaaaatgataatcataaattgtgtaacttttctctccacattatcactcttaaattagtaagggatgttactaattatttatgaatgtgagtaaataatagctattaaaagtattgttgctaaagactagatttatttatttataaggcgtataaattgttcaaaatcaagtaggagtaatttggaacaccttgaatgagaattgaccaaagttgaaaaatggtaattagtaactagtaactagtcactatttttttcagcatacaattgcatgctttttgaacgtttgggaagcctttttaacacctcaaaactcctt

SEQ ID NO: 100943 - DNA, 851 bp, Cannabis sativa
aatagttcaggatgaatttttaacggccagaaaagttcaagggacatgatttggtatatgtcaaaatttagaggcaaaaatcataattagccatcttaaaaacttggcagttaaagattttaaatcatacaacagaaccaaaacccactttcaactgcataggataactacttgtatgctaatagaaactgaaaagcttagactatattgaacagagataatagaaactgaatcaatccctacgacaattaattaagaaacagtactatagctttttagtgtataacaccaagtataacttattagaactcaagacttcaatattgtgcaacagtgctacctattgatcaacaatctatcaacctcctacttcatatattagcagggataattaatttcagaattataaaagaaaactgaatccaatccaaaatactgcgtggtacttgaattccgctccagcctcaaagacttctcaattgaacccaagacgatcggatccatttacttttatcttatagagaatcttgggattatctttcctttcctttctaagcatccccataacacttcagtttagagatcacccccactttaccctattcacccatgatcaaacaatctcacaatttctcactcaccatgtaaaatgtggtggcatacaaattaaccctatcatgagaaaagaggtgtaatttcattaaaatatcattagtaaactgatactcctcaagctgctattttcttaaaataataataataatgataataataataataattcatagcttatttccatcgcatgggaaagaaaattgaggagcataattcagaaaatttacagcagcaac

SEQ ID NO: 100944 - DNA, 735 bp, Cannabis sativa
  modified_base (477)..(482): a, c, t, g, unknown or other
cttttaactcattaggtgccattctgtatggagcctttgaaattggattagtccctggggctaattcaatgatgaactccacctttctatttggaggtagtcccggtagatcttctagaaagacctctagaaattcacagactatgtgcacattctccacatttagttgcgtctctattgctcgatccactatgctaaccaagaatgccagacaccccgccttcattagctgactagcttttagggaagagattaacggagtcataagggccagcttgtcgcacttaaaaataaattgatccccagcctttgtttcaaaaatgaccagtttttttctacaattaattgacgcgccatgactagatagccaatccatcccaagtataacatcatattccttcatttccagctctattaggttgcccatgagttctttactttcgattatgataggtacatctcgcattcttcttgttnnnnnnatggtttctcccaagggtaattccatcacaatatcacatctaagtaggtcacatggcttgtctatactatcaattaccctagtagctatataggaatgagtagctctagaatcaaagagaacattactaggaaatccgtaaatagaaacccgacctgagacaacagtgttgcttgtggtcgcttctcctctggtgagagcaaacactcgagcaggagcggcttggttctccttcttttgtccctttgggcaat

SEQ ID NO: 100945 - DNA, 651 bp, Cannabis sativa
ttaaatgcaaatgctaaattttaaacaccaaggataaccttggaaaatttgatgcaaaatccgatgttggaattttatagggaattaaactcatagtaaagcttatagaatatataacaaaagaactaattttgttgaagaatctattcatgttatttttgatgagactaactcgcctacaagccaaagtttagatgatgatattataggtttgggagatgaggttcaaaatcttgatattggagagacttccaatgctccttcacaaactgccaaagaggaatcacccgtggaaacagtaaatgaaagtcaaggtatgaattctaaccttccacatgagtggaaattcaaaagtgctcatcctataaaccaaattctaggtggtccttctcaaggtgacactactagaaactcccttagaaacttgtgtaattccattgctttcatttctcaaatttaaccaaagaattttaaagaggctgaagtcgatgaattttggcttctagctatgcaagaagaaataaatcaatttataagaaacaacatttgggtgttagttccaacaccgtcacatcaattggttattggaacaaaatgggtctatagaaataaggtagatgagcatggggtcattgtgtgtaacaaggctag

SEQ ID NO: 100946 - DNA, 712 bp, Cannabis sativa
ttatcaatctaaatgtttttttttattcttcttctataattatgagtaagaaaggtgtaatattaaatctctagcaatagaatctagaaataggggacttgaaaaggcgtgtattgaaggttccagtcccaaattataaattataatatataaatgtttaaataaaaaaaaaaatagaaatagcggtggtaattcgtattcgtgtataataggtatatgttcgatccgaacacgatttgtttaataatcgtgtcagacaataaaatccgaacacaattcgtttataaacgtgttgacacaacacgacccgtgtaacccgtttataagtatattttgtttaaacatatcaaccaataacacatttatgaatatgacatgttaaagtattaaaataactttaaataagttaatagcgggttagttttgtattacccgtgctaatccaaacacaacttgtttattaaacgggttagacgagtcaactcgaacacgacccgaacaagcaaactcaaacccgttaactctcgtgcggatttcgaatcgtattatcgtgtctgacttgttttgctggccttatctaaaaaataaaacatcaagagatgaaaaaacctgcctaataaaggcatttctataattaagaaatgaaatttaacacctaggtatggctctgggtacccgctcctaacaagatggggattattttcctgaatga

SEQ ID NO: 100947 - DNA, 574 bp, Cannabis sativa
ttgattccgtcttcttctgaccgtagcagatgaatgaaagaatttcgtattacggtcaccaagcttcaaccaaacattccgggatttctggcgccattcactctcttttctttgccacgcatcagtaattttttttttgaagatcagcttcttcagctaagagagcatccgagacttgctgcaattgaatttgacaaagtctattctccagccgttgaatgacactgtccacatcgccaataacattctttctccatttttgaagagctcttctagtttgatccagattacggattaaaagcgtacagggagacgcatccgtattaacccacgtagtcttcaccacctctgaacaagaagcatccgttgtccaagcatcaaagaatcgaaaaggtttgaaacctttattgacaaacatacaagtatcaagtaagataggtgcatgatccgatactatgattggaaaattatgaactcccgcatactgatacatattcaaccaatcatgagaaccaatagctctatccaacctttctctaattagacctcccgagaatcgtttgttatgccaagt

SEQ ID NO: 100948 - DNA, 551 bp, Cannabis sativa
taatggttattttttagttgttctggtgttattgtggtggttctatctgtgggtgtagaagatggagacctcgttttttgttttcggtgtttacaatataaaaggaaaaaaaaagtcccatgacagtataaaagttaattttgccgtgtggtaatatttttgtaaaaattaagtcaaaattcagtattgttgtaagtttccctaaaataaatacgtgggacccactaaaaataagaagattttggttttgggtatttgttgttcggtcgggtagggcccatttccaaatccttattgatactccatcatctaaaaactcaaaactcaaaaccattggcttttctatttttggccccaaccaccttatccaccacttttttttgttttcttttaaatataatatatttatatatttatggcatatctttttccaataaaattatagaaaaagcttaaataattacaagatttttcgttttataaatttatgaaatagtactctcaattcaaatttgattatgaacaaatttaaatttctaatgatatgttta

SEQ ID NO: 100949 - DNA, 742 bp, Cannabis sativa
ccatcgatgaatgcaactttgttctttgcagccaaagccatggtgattccccttttccacgattgatagttgattccagtaagaaccgtcgagaccagaacgagaccggggtggtcacctgaactgaggaagaacggactggatgcatcttcattggcatggcgatcttgagtggaacgcctatgtggaattggattttcttccgttcttggagattgttcttcgtgattatcagtggtgtgctgagggcaatgcctggttgtagttcgtcgagaagtcgccattggagctgctgtttgagcggaagtaacatcaggtggaggatctgatgaattattgtcaggtggaggaggaagaagaccatcctaagatcttgcggtaggccttgccatggaaaaaggaagggtaacgtctgataccatatgagaagcttaaagcttgaaaacagagtaaacagaaagaaatgaatgaaaatgatatctggtatattactgagctgagaaaaagggcctttatataggcaagagtacaaaacagacacgtgctacaatttacacaacttggcaaatatctaaacagaaaattaactaactccaaagacagttggagtgacttaataacaacttaacaacctctaataacttacaacaaaaaaaatcttatttttagtaacaacaaaacttctgactaaaagtaaaaaattgtgactattataaaatatcattcttatgttgcgactaaa

SEQ ID NO: 100950 - DNA, 666 bp, Cannabis sativa
gcatatggaagattttgtgaggttgactcaagggaagagaatagtggccgattataccctagaatttgatcgcttatcaaagtttgttggtgatctagtattaacaaacttcaaccagaaacaaaaatatgtaaggggactgaatgccactatcagtcgggacttgaaaattaccaccaatcacgatacattatactagaaagtgatcgagttagcattgattgctaaagaggtagaacaacatgtaataaaagagcaggctgctaaggatgtcgtcacgacatagaaccctagtgtgggtggtagtgagagaaagtttcagggaaatagaggtggccgtcaagattgcgggtctacattctgatcttacacagagtgtccaaaatgtaagaagcactgtccaggtgagtgctggactaaaacatgtttctagtgcggtatggtgggccattttatcagagactatccataggctaagaaagaagaatcaaagaagaacaacaatcaaaatctagggcatctgtttacaatgacccaagctgatgctgatgctagtctgttagtggtgataggtcagttgtctataaacgattgttcttgtttagtattatttgattcaggatctactcattcttatgcatcgagtaaagtaatagagagttttca

SEQ ID NO: 100951 - DNA, 718 bp, Cannabis sativa
ttatttagaaaaatattgaaagtggttttttttatttttaaaattttgattcttaattaaaaaattaaaaaatgaaaacaattttataaaacatatcttttaaaaacattttcattttttaaattttaaaaataaaacactcattaaaataatattaccaaacactatttacatttatcaatttatttgccattttatttatgtcacttaccttaaaatttacataaatagacaataacatttgaccgcaggtggacaacaaactttctgagcttcaaactcatgaattggcagaaacatcagtcagagactcacacctacccattctatacgtcttttcttttttaatatatgtaatatgattatgaacgccatttaaagtaaatatataaattcaataaataattaaatttaatttttaatattaacatgttattttttattagtatatataaaaaataaaaatttaataatcaaataattattaggtaaaaattttaaaattataacttatatattattaccattaatatttaaatttaaatttttatttataagtgaaaattaaacacacataaattaattatatttttacaatttttatttttgagaattgttattgagtattattagtacctagagatggaaattggtcggttaatgtacggggaatgcaatccccacccccatccctgttacctatttatacccccatccc

SEQ ID NO: 100952 - DNA, 1428 bp, Cannabis sativa
tggatgggtgccatgtgcctgggtgtgcggggaagtatcgaaccgagtgcatgggggctcgcataggagccgtgggtgagtgttgtagggtgtgcgagccgtgtgaaggggaaggggtcagcttggcatggaacgaggggataaggggttcacatgcgatcccatgggggcctcgcactcgagccgtgtgtgcgagctgtgtgagggggaaggggtgagcttggcatgttgtgaggggatagggggctcgatcacgagttatgtgtgcattgtgtgagtgtgttttaggggggtgtgaagataaggagagaggtgaatgcatgatgacaagaataacattaggagaggaagcaaaggacaaggcgtgcaaaggaagagcatacaaccacaccttctgtagactgagagcaaggaggtacaagtagcggcgacaacagacctacgagggctgaagacccgaccaagggtacgctgcaaccaccttcctagagcctatactcggggaccccctgcatgtaaccaaggaccacacgcatgtactcggggaccaccccgcatgcaactggggaccacacgagtgtatccaaaggccacacactacaaccaccctcctgcaacctgcaactagggaccacctcacaccagacaaggatgcgaggtgctggactaccttcaatacctgcagcctgcagcaggaaaacaacattttgtcctcatgggaccactttgtacacaatgccattaaagcctataaataccccctcccccatctcagatgtgagggggttggaaaattatacttgtaaagccatattgagagcaatagttccaagagagcaatttgagttcatatttcatcttcctctttctctcatttttgagcttgaagcataagttaattttccagccaccagttggttgacgagttttcaccgtcaatagattattttaatattatttaatattaatattgagtaataagcattttttaataagtaataagcatttgtgtttttaaatataataaataatttaaattatatttgttgaaataaaatagtcaccatatcaaacaaaaaggggctctcttaacatgattagatgggcaaatggtaagaataaagaaccttggcgtgctttattctgagaaaacatttctcgatatatgatgagttaaaattcatcatgtgaagagggaagtgattcatttagctaaccgttaggcaaatttgggtttaggttgcagtcttgtagtcagttatcttacttcaccgtcgagaaacgaaagaagacttccatatccaagtttaactcagatgtagctcgcttctttttgagtgtgaagcagtgtcaaaccaaaatactcaacaagcattagctctcccagcaaaggagatgatccagccacaccttccagtatggctacct

SEQ ID NO: 100953 - DNA, 884 bp, Cannabis sativa
taataatagagcctagaaaactcccaagaagactccatcccatcccatttccatttccattccaaattccaagtttccaaccaaataaatcattgcaaaatcctctggtgtttgtttgggcagatcaaataagtcagataggggtaatatggtcattttaggggtttggggatggggtctgtgttcacgtgcgattcacatgggggtggggatataaccttgtacgagcaggtgcaggtgggtataatgatatgaaagaaaagtggggcccacaataagatcatgaatatgattgtcggataatgaacaaaatacccaattattgtgcttatcatttctttagcctccattcgttttttatttggaacttactattttggaaactatattctaacttatggccccacctgacctgcatttcactccccattcaaatttcacatctctatactttataaaatcttcaataataattagaatttttatttcttttaaaatactaaattatgcttgtagttctaatagtatgcctccacattaataatatttcttcaaatataattttttttagtaatattatacttttataatattttattcaattttattgtaaaataaataaaatagtaataaataaatacaaattaaatatactttaccatttttactttagtgaataataaaataaaatacatttttataataatttatatttatatattttttaatcattaaagtaaaaaaagtaaaatgtatatttagagttgcattcatttatcaacaattacttattgtatcactcgtttcaagataaaattgaatagaatatgatgaaatcaccacataattttaatagcacatttactacacggtatttagaatca

SEQ ID NO: 100954 - DNA, 1019 bp, Cannabis sativa
tgttacccagacaaatgttggccagaaagttagtgatgtttatttaagatgctattattttgtagttcatggctttcttctgatggccaataattttttttgatatatttggattgagattatctaattgctttaattttgatagtttctttgttgttgatttatgaatgatgcaggcatgcatgtacagattctttaagaacaagtgaattgttctctatcatcttatccatttgcttaatctttacacagctcacctctttctctcaccaccacaacacttttgaatatgactcaacttttgtccacatggttacatacaagattctcctaatatctacaagcaggagataataataatgatatgagatagtaaccaatctcaataagttaatgaaatcttaaaaatggttaccagatttcgccgccgttcattgcagtactgatccaatatcaggaaggtcaggcgccacacagaatcttaaccatctcttcttctacttgagacaaggatgcataacaagcccaattatcacagccaagaggcttaacaccattgccttcaaagaagcaagggctaagaccacaagaatcagtagggttgggagatacacaacataattgcacctgctgtacccacggcgatcttatttttaattgtcaaaattataaattatattatttagatatacataatagggtaattctacaatagacaccccaaaattagatatatcaatgcaccccttaaactcttaataattattggatcttatatcaagtccacacactatttggtggggtgcagtataggaaatattttttgtatttaaaacacacacgtacaaaccctagaattaagtgttttttatatttttaaacacacacccacccctctctattaaaaaaagagtcgaccaatcttctttacagaaaaaaaaaaaaaagttgaatctcatatttttgctgctaaacccatcgttctgctgaacccatatccatatttctctctctctctc

SEQ ID NO: 100955 - DNA, 1217 bp, Cannabis sativa
gccaagatgtctagaggcggtgagtcaacactgtccagagagaaggcaccgattgaagctgctatcgatctatccaaggagctaaccgtggtagacccttctgctccaaaagctgctaagtccaaggtctctcgaggagaaagcttggataggcccgagcagtcgaagggcggatctgagcaaatccgggctcctaccccacctccaccactgcattcagagaccaaaagaggcaaggagatgctcacccactatatgaatcggtcgccccctgaagtgcatgagcagctggcccgagctgacaacgagccttctctagagctgttgatgggaggagtcctgaaggtgtttacgaaggtgagtctttcctgacagtttcccttaatccttctttacttggctcagattctaacattttttctctgtagagactagtctgaggatggcttacacttattctcgagctaagtctgctgcctccaagaatgctgccgtgtccaacaccatgagggcggaagtggacttggtcaagatggacgctgatgaaaccagggttcaactcagagccgtccgaatggaactaggtgaagtcaacaaaaagcttcttgccgccgagaagaaagtggccgagctgtccgaagatttggaggcttctgaccaacttgaggctgccatgacctccttgtccaaagaagtgactgaactcctggaagagtctggttcttcgaactattttctggaaggaggaggagcttaatgctgaggtagaaaggctcaaagggatggtgaacgccttagagacagccggtctcgagatttttcacgccttttggaaggctaaccctcaggggaattttgattacctgggtgatgccaaagacatgtatctcgagtactgtgcttcccaagtggcctatggagaatccgaggcaaccacttctacctctattctgaacgttgacgtgccccccgtctagacaacagatcctctagctcctaccgccccagaagacaagtacaaggagcctgggactccagccgtctgaacacttatttgcttatctttcttcttttttttatctgttcggcaataaggcctttttgtaagacatcgtgaccggctaagcggtctttaaacttggaattatttttcatttttcagaccacaggctgaccgggcagcttttaatcctggctttacgtgctttagttatcta

SEQ ID NO: 100956 - DNA, 720 bp, Cannabis sativa
  modified_base (604)..(614): a, c, t, g, unknown or other
attttccactctggtatgttcagtggctgtagcaaccctgcaggttgctgatgctcagcctttacttcctgacaggtaagacactttgcaatatactcagcaatgtcctgatacatcttcgttgacactggatgaactgagtaaggagtcgtatgagacttattcatgatctctcttttgatactctcatccataggccaagtggtggcgcatgctgttgtgcatgctgatgcttagattgtatggcagtggcatttttgtaaatatcttgaatattgtttggattgggatgggacttggtaatggtgcaattggatttgagagactctgtgatttggtatatggtttggccataatcatgtatgttcctggtagaaggctaaaagctaagaatgctctttaagggggagtacctagtgtcagctctccaccagcccctggcactttagtgctaagtgagctactactagtcagtgggactagtagggcaggaatatgaggaccactaggggactcatacgtctccatgagttagaatactcgttgacactattgggccgacctaatagtgggtctaagaatgccgctagagtttaatgggtannnnnnnnnnngcttgctggtatgccgcttgcacgagacgtggcataaacctctaagagatgcggggtgtgccttggccacgagtctcaacatgagatgacatgagtagtcattcgt

SEQ ID NO: 100957 - DNA, 581 bp, Cannabis sativa
  modified_base (438)..(444): a, c, t, g, unknown or other
tacattgatggcagcaaaataataatgactcctttcgctcagatctctaacccttgttcctttctgtcgcagagtaataacaagatctaagcttggacctcctttttcccttcgggtttggttaaccaccgtctttcgtactatgattgagtacttgacttgttatgtgcgggcatggtcctatatcacttttctcgaattggtgaagaacaatgaataaggtgcgaaatcactatagaaaggagtctctcatctactagttccagggaatgaaaactaggtttagtttggttgaaagtgagttgtatgagaatgagagcatcatgttccttttatattatttcaactatggtttaagatttaattatatggattaaaaaagaataaaatgggaaaaaatacactaagtggctggccacactaatgggcctcactagnnnnnnntttgccactttatttcaaccatttccttcttgcaataatgccatattttctaatttcaatcttataaatgtcaaaactattgatttaataattataattaattacaaaataaaattgatatttatattatttattaa

SEQ ID NO: 100958 - DNA, 562 bp, Cannabis sativa
ggttcgaccttgcacttacatgaacattatattccgaaacgattcgtgcacttgcgagtataaatattaaaacactcacttttgaggacaacagaaatacagaagtttatataatgtctaagtttggaatttgggttagagccccaaggggtacccagttttgtggacatgggtgaggattcacacacctgaccaccacgtgtgtgttgccatcgccgtctgaccgaccgtgccgagctgagctagcgtgtgtggtgtcactttattttttggagaaaatttatttaataaattattattatttatttaagtaattaaaacagtttttaaacttgtttaattaattggtaaacagagacttcctattttttagcattcttttcacggtcgcacactatttcacgttctaaagttcccttcagtaacgcctttctttccgttactatcttttgtgcattgcctatataatgtatcagaaccaataggagaaacacatctctttttttcactgaaaaacatatatgagtgattgtacgcccaaaatgtgtcttccactagcggt

SEQ ID NO: 100959 - DNA, 741 bp, Cannabis sativa
  modified_base (698)..(699): a, c, t, g, unknown or other
ttatttttgtataattaaatatctaaaaaagggataatatttccacattttaagggatattagtctattttaaattagatctttcgtaagctctaacctatataaagagcattaggctagacaaaaaagctaggttccaagtccttagttttgagttctaactcttgaaaccctagctctctctcacccacatgctacctacaccatacaagacaccaattttatttctcacctcacatatattcttctcactattgtaatattcaatgagagccacactagaaattacaaggtaaaatcctgtaatctatgtggtattatctctcgaatcaatacaactaaaaatggagtaggttattatcctctaatcaagggggtcgaacctctataaattagtgtgtatttatttacttaattttattgtttacacgtggtgattttgatcataaataaggcttcgctggcagttgaccaaatttgaggttaacattttggtactttcattgagagtgttatttatctattcgatcaatcatcatggctataacaaggagaactctggatacaacttctacttctttgggtcttccttaagaccccatgactgttgatcctaatgttcgtgttccagccaccactggatttccacgaacccaacagatgtagtcaatcttgccaaccctgccaacccgacaggnnaacaaactcgaccaacacaactagtccagttgaccctgctaa

SEQ ID NO: 100960 - DNA, 577 bp, Cannabis sativa
actaataataatgatgccaaaccaaataaaaagccaagaaacatacccgttggatatgggaagaacatggaggatctcgagcttggcttcaaacaaagtcttcaaggatagggtgaactcgccgagataattgagatggtagcagaatggatggcgaggtcgaagccaaattcgaagccgaagacaggatgaatgaggcgctcaagtcgaagtagaagccagagtgaggtattacgaatcgtcaagacttggtttttttctttctttcctttttttacagagttagttagggttaagaaaagaaggtgtaattatgtattcattaaatacctcacttttaaaggaaaaattgaagtggaaaaaggaaaaaggaaaggtggaagtggaggatatgatccccaaaatcgtggatataatgatggtaaatatggggaatctcatgtaataatgaccgagattgaaatgggcagattttgtggaggtgggtatgtgtcattctaagattctaagagaagacgtggccaggaggatggtgatgtggagggacaccacgtggggatcgggtggggattttaat

SEQ ID NO: 100961 - DNA, 723 bp, Cannabis sativa
aagaaattagatgcaatgttgtaaatttgtttaagagtaaatactaatttggaccctgtgtatttgtaaaaattactgattggaccttctgttttcttaaatgataaaatggaccatgtatttttcaaaatggtaaaaataagactctgagcttaatttctgacaatttttttttaatataatcaagttgaagacaattactaacacgaacagatacagaaatgtaaatagttttgtcataacacattttgatcgggttattattaaattttattttgacaaaaaattagttcaatgtccaatttatataccattttggaaaatgcagggtctatttttgtcatttaacaaagcagagggtccaattaataacttttgcaaaaacagagtccaaaatggtatttaccctttttttaattacttacatataccattgattaaagtatgtcaattgaaagtaaacaaaatgaatcaaaaacaaaactatcttaataaattatataaactagcttaaatggccttttatcactactcagaccgaaattataaacattatccaagattattatggttctattttcgattcttctagtattaatgaagctgctctcactgatactttagctactactcccaccaccatcacgcccactatgaataatattatgcagaaatcttatagttctgacgacgttcttcaggctcttcatagcacgagcactt

SEQ ID NO: 100962 - DNA, 648 bp, Cannabis sativa
gcataatctcagagagcacatagtgaaacctaaagccttctagtgatattaatattgctcctgcacccaaaccctatttgttggatgcgccatccacatataacttccaggtttccacatctcgctaatcaggtggaatttcttctggagttataccttcaatcaagaagtcagctagagcttggcccttgatggacgtgcaaggatggtatgttatgtaaaactgccccagttcaactgaccattttatcaatcttctaaaagcatctggttttgataaaacttgtctcaatggttgatcggttaatccttttatggggtgagcctggaagtatggcagtagtttacgagacgcatggactaggcacaacgtgagtttttctagagggaaatatctggattcttcccctagtaaatttttatttacatagtaaacaggttgctggttcttgccctcgtctcgcactatacctgcactaatcacatcttctacgatggctagatagagaaataacgtctctcccgttattatttttgccaaaactggaggcgttgctagatgcctttttatgttctgaaaggtctcttcgcactcttttgtccactcgaactttttgttgccttatatgttgaagaatgacacacact

SEQ ID NO: 100963 - DNA, 596 bp, Cannabis sativa
tttttttttagtaattttaaatcctattttgagttgtaggaaatatatatatttttttcgatataaaaaaagatgaacaagatgaaagtaatttttcccaatctcttataaattattaacatagaagtataccatcttattttatgggttactataataaatttatgatatttcatatttaaaagttttttagtatctaaataaatttactttaaataattaacaccaacacatcctatagaactgagaagagatcatgtttaaaaatttaatttcttataagttattttagaaattagttggcatttgaaagtttgattttctagtaaagaaattaaaagatttttttgaattttaattatttttttcgacaacggtaaaaaaaatatatgctttctatatgatgaaaaggtctctttgagaaatagatcgcggtaacataatatttcagctcaaataattactggtgtaactagaaaattgttttaaacttttttaaaaattaaaaaggaaaaagagttattttttaatattgaagaaaattatgaatatagtgtaaacttcatataatagagagtgaaaaaaaaaaaaaaaaa

SEQ ID NO: 100964 - DNA, 1172 bp, Cannabis sativa
ccaaagtataaatgactaataaatgagctaccaaagcataagcactaactttgttattaacttattcaaatatatatatttaactaactgtaagtcttataaattataatatcttttaaaataaaaatttaatgtataattgtgtattctaattttattcactttatttgaattaactattataccatctaaaaagtatgcactaatctacttcctatttgttttggtatacaggataattttttagtttaatttttttatgatcgggtacgtaatagttatttaagacattttgcaaaaattttaaaatattcataaaagttaaacacaccgtaaatagggttcaaacaatctgttgtacatttaattattttattttttatacgtgtaaaatagattgttcgaacattacgttttatatattgtaaattattttgaatttctaaaaattttataagatgatttaaatagttataatgtatacgaccatgaaaaatttgactaaaaatctttttttagtgcgaaaacaatacgtgatgcatctctacactcaatattatatacatgtaacaaatttaaactaagggtggacataatttaatccaatccaattgaattgaattaatccaattcaatcaaatttacaaaaaattggatatccaattaaaattggatattggattggatattaaaagttatattttaattagattagatcggttattagatgtgaatatcaaaatctaattaaaaatcgatccaatccaattacatctaatacatattaaaaattatttatatataataaaaaaaaattgatttgttgttttgtgtgtttactttcatgatattttgttctattttattagtttgtagtattgttttagttatttcaaacttttgatatagcattaaacttataaggatgatacatttatatagtattaaacttgtaaggataatatctatagcttttatgtatttttttcttcatatttttaagataatattaaaaattaggtgtgaaatttgacatccaattaaaaatcgatctaatccaattactaatcagatttgattgggttgaattgaattttgaggtctaattaaattagatcggatgataatttttcaaatcttattactatgtagattggatctgatcaggaaaa

SEQ ID NO: 100965 - DNA, 511 bp, Cannabis sativa
gttaacccccaaaacttcaactatgatttgcccgttcttcaaagagagttgcatcaatttttatcttgatctcattatcttgtggtttaggttttagcccatccttagtagtcatgtgacttaaccacttgtctaagagtgttcatccattgatcaagagcagtttaagatgacacagcaatctgctcaaccgaatagctcttctgtctccacaccatatcattttgagttttccatataggccactgctcctgcctcacacatataaatataaataacaactattgaaacttgacaaataataaattatttaacttgataatttaaaatataattgataaaatgttttttaaaaaagccccaaaattgattattgaaactcaaataatgactattgaagtttgacaaataataaatgtggcaaatacctctaacaattttgctattacatttcatcgagttcagaattttcatcagaaagagatctaaaaattgtgaaacttcgtctccc

SEQ ID NO: 100966 - DNA, 578 bp, Cannabis sativa
aagcaacctaagtcaaactatatacactatatagcaaaagacatggtactgagaaagtaattaataagctagttaggtcaaagtatatataataatatatatgtatgtatgtatatattatggatgatgagaaagtaataagcgaaaatggccgaccatggtactgatcatagaacttctaaaagtaggattggctaacgtacattagagattatctaacaccactatcaaatattgtaaagcattgcgctattaggcaccattagtgcctaatgctttcttgacatgtcacgttaagattggctaatgatatttcttaagaactattatattaaactatataggatccgatacttagttggaccaatagcaatactaacataagaaagtgctagagtgccctttaacatttctctattataaattattaacgattttttttttgtaataattattaaattaaattatattaaaatatttttaatagtattattttttaaatatgttaaaagatttcgtaacatttaaaaatataatattttattttattatccttatatattatttttagtactttt

SEQ ID NO: 100967 - DNA, 714 bp, Cannabis sativa
tacagtctctagtgaattggaaatctgcatgctcatattcacttctctctatgcttaacagccaatcaacaatgtcttcctttccttcttctggtcttcttttaagatgttcatcaatgacttgattgtagaactcatccaactcatgaaagctcctctcaattcttgcatgaacaccactcaatcggtcaataatccaacccacataaggaaataaatcagaggcagtgaagctccctaatacatctacagctctatgaattatattttcaagtgtatcactttctagcccacactcctcgaacctctttccaaaggcagtcctaagagtcacacttgccatgagactatacatcatttcactaagatttacaggactatctgaactgtctttgagagaacaaatcagagaatccatttcttcatctctaacaaacttaaaggattcaacacttttaatgctaaatagcttaagaacacaaatttttcgaacctgtctccagtgctcaccataaggtgagaaagatatgtcatggttgttataagaaagtcttgccacaccagctaaggctggtctgctgcaacactccaagtcatgaactttcaaaacatcttttgcagcctctgctgaagagaccactatggtttgtagtcttccgaatcggaggagcataacatcaccatatgttttggagagtttccatagagattggt

SEQ ID NO: 100968 - DNA, 1066 bp, Cannabis sativa
ttagggcacaaaatccaacatcaaggccactggtactttagtgtttgataggttgggtaccgcacatgacctcaaaactgatctaaatcacagaaggggcctggagggacaaaatgttccactaactgtccaaccaggcatccgtacccaagatctagttcaaagagatccaatgtgacataggccggtgaacaagccgaacaaattcatccacttgtggaagcacaaatagatcaacttaaaaatattgtacaaggtttgactggcccaaaactcactgatctccaactcaacctactacgcaaatcacctttcttacctaaaattgaagttcttgaactaccccaaaagttcaaaatgccaacctagaaaatgtatataggaaaagaagatcctttatcacacctaaaatattttgagatgtagatggatctgcaaggggtaaggggtgatgtactgtgcaaaatttttcttgccacactcgtagaggccgcccagcaatggtatttcaaactgcctctaggaagttttaactcatggaatgccttctcattagagctccatgcacaatttcctcctcttgacagcttccctcactcctagaatatttggtagaagtaatgcaaatgccaggagaacccttcagagcttatattagcaggtttatgactgaagccacaaaggttaaaggactgactgaagaaggaagactagctgcaatactggggggcattgagcctctcgaagagttgtggaaatatattaaaaggctaactgtgggatcaatggctgaatttctagatcgagtagatggattcattaagctcgaagaagctatacgatgcatggatactgttgggcaaaagaaaaatcaacaacgcaccacgacggcagggatgttcgtccagaatccaaaatatcccaatagtttgaattccaatgggaagaggtctagcaatggcaacaggcaaggaaatggaaagacaggcaatttatgcaacatagaaacaatctatgcgacaactcagtctatggtgtcgtacaagaaaccatctcccatgaaaaa

SEQ ID NO: 100969 - DNA, 791 bp, Cannabis sativa
atttcttgaaccactcttctgggggcccgcttagagtaagcgggaagcacaaacacttagcgtcattgctgactctcatgaccgtcatgactcagttgaattgagacaggtgatcactcggatcagagttccgggtataagctgtcatttcgggcatcttaaagtttttggggagctctgcttccaggatgtgtttggcacatggctcccagtcctcacagtctaagtcggagtcttcgcctttctgtcttcgggacactcgggcgatgtctttttaaagtatagcgagttccgccatgattccttcgtttaacgttcccgtggagaccgcgggtccgtatttctattggtcaaggtgatcccggaggtcaccttggttcccgttaatctgattcctcagatcgatgggaggacatttctgtccccttcttcctctccctccgggctcttggtgcacggaaacgctctttcggtcctctcaatcctgagggccaagactcccttttttgagtttgcccttctgcggacctttctctttcgggaaatcatcgcggacctttcgcggatcctgcacctttttctttctcctaggagtggaagtagggtttttcttttggttcccttcagcgggataccttataggtcttggttccctaaacttctacttttgggtacttggcaaggattcctctggttccttcccaagcccagcagggatggatttaggatgcacgtggattcctgctgcctccatggctttttgcatgaccaacatcacctcttgcatcttt

SEQ ID NO: 100970 - DNA, 1039 bp, Cannabis sativa
acaaaatatcaagaacaccaagaataaaataatattctaaatggtgaagaaaatgttaaaaatacttaccaacacagaagacttcctagctcttcaacaccaaaagttttacactacccaagtctcctcactacaacacttgaatggaaaaagaagagagagtaaatagagcatatcaaaataatagagatatctaccttgacttatataaaaaaaaatcccacataagagggtcaatctctagaccccacgatcagcccataaagaggatcaataatattgaggacaaacctaagtgtagaagaaatcctaaagcatgtttgtgccaagcactaagcccaagagaagatgcacaaatacaatcaatatttcacattgacaacaagatatgatgccttatatcatgaatagtgattataggtacatgtcttctcaaaccttgctcacaaaaatatggttccaagctagtctatgcaaaaatatatacacacaacaatgaaaactacctatggtcactcgtgtatctataaaatagtaactatccaagaccatctttccttggacaagacaaacctatgctatttatatattgaaaatactttttatagaccacatatcatatcatccataaaaggttgggtcccacctagctacatggatcaacttattatattcattattgtcacctcttatctaccttgatggtggatctaataaatggagttggtactccatatgtaaagtcacacctggattaaaaaaaaaagagaatgggcataggttgatttaagctgacactacaaaagtgacagtgataaaaaccccaaaaaattttgagcagctcagccaaactacctccacttttaatctcaattgtatgcatgatttattatagaaggataccactgcgctgcactgaaaagaaggtcaattctcttacataatatatatacatgtatttatagctcaatattatataatctacagtcaaccaaatttacatatttatattgctaatatagaagttattacttcactc

SEQ ID NO: 100971 - DNA, 672 bp, Cannabis sativa
cactaaaagaaaaagaaaaaaaactcttaatattacagaacagttattctatcaaacttacctatatcttcgcatagcatctggtacttagagcagtgcactcaacatctcgttccagatgataggaaccctaaaaagcaccagtggctgcattcaaatgaaaattagttcattgaaatggagaaggataacaatcaattttttagaagataaatcaaattgatcaattttctttttcgttctatttccttttttttttctcgcaaagtcttaatctatttcctcttctgttctattttatttaatctaagagcagtgtactactagagttgtttatatacccaagaacccaaattgtgaactagagaagtagaccgagaaaataagaagaaatttggatttactaatcaaaatggacaaagagaataagaaaaaaattttgatttacaaaaatcaaaagcaagccctaaaatggagatctccctaagtgtagttcacaaaaagtgtgctttggcctctgtgagtttggcgccaataatgagagaaagcgagggaaggagatagaggaagagaggaggagtgagaaaccaataaaataagttttacctcatgaacagttgtagttaaatgtagcgatgcattgtagcttgatctaaaaatatatgtattata

SEQ ID NO: 100972 - DNA, 615 bp, Cannabis sativa
  modified_base (65)..(84): a, c, t, g, unknown or other
gattgcgtgcacttgcgtagtaattaataattttcgcaacaagggtgttaatcaacatacttgtnnnnnnnnnnnnnnnnnnnntaaaataatttccaacacaattgttccaaatagtgaatagcgaacaacaagaagtgcaagagaagaaagctcatccactatctagaatcataagggctcttgacaaatgagtaaaaaaatttctaacatttttgcagcgaaataaacttttcccatatcaataaaacaaaagacttgactcctactggttcctaaagctattcaaaatagtatccaaaatgttctacttctatcaacaataatattctagtcacaagcctaaagtcataattctcaaacatgaagtaaattacacataattcctatatattgaacatgcaacacagtcaacgaaatcaaaaagaagaaaatttacctggtgatgaattaggtgataattctagacttgagtagagatatggcatgggaaagcacacactaacgtcgaaggacagtcgtagaaaaattcccttaatagaggatcattaagacaatcaagcctttttgtaatggcattggcgtggtttataagggaattgatatccagattcg

SEQ ID NO: 100973 - DNA, 675 bp, Cannabis sativa
ttataaatacttaaatttttatattacactctacaaagaaactattatataatcttagtttaatttttgatgttttaatagttttaattataaaattatagtatttagtattacattgaagttttattattattctaacttatttataattaataaattcaaatcgtattaataataataataaattataatttttttttatatgtcgtactttttggatttgttgcatgtcgtgtcttttgggttagtctattcgtacttacgtgtcgtgtttaaggacatattttttgtgtcgtgtcgtgccaatttgtagtatcgtgtcatgtcatgcccaagcttgtattttttcgtgcttagtcgtgctcgtgttttctgggctcatacatataatcatcaagagtattgttgttaaggtttagtgatatttaacaattaatattattgtataataattattaaattaaaatacataaaaaaaaatttcctttaaaaaaggggatttgagtataggatcttcttgtgaaaagaaatgtgaaattattatagtctctgaccacataaaatttgatttttaattaaattaatattgatatgtaaatttgtagtggtgctagattatcaataaataggtgatgttattatactgaactcgaaaaaaataaactgatactattt

SEQ ID NO: 100974 - DNA, 602 bp, Cannabis sativa
aacaagatattaggaattcatatgtaattaccacctcatatccaaacacaccttgcattttaaaatatagtgtaattactgaactgtgtaattactaccctattaattaccctacctagtaattacacagttacttccaaacagaccctaagtgcataatgtaatttttggttgaatacataattattttgctaataaaatttttcataaaattatttttacaaaatcctccaataatgacttggacccatgaaaatctcttttaagaaaatacaaataattttttctttctttctgtgaggtccttaaaacaatgtcaataatatatatgttttctttaaaaaatactaacggacaccataaaatgtggcattctgttattagtaaattttaatattggattttacatattttgatttaacgaataatatagagagctaactaattataaggggctaaatgtcccagggccaaggaagacctttatcgacatatttttgataggttcttgatagtttaagtaacatatatttataatgtgttatcgattgattatcagggggttgtcgataggttctcaataagagtaagaattttatttt

SEQ ID NO: 100975 - DNA, 673 bp, Cannabis sativa
  modified_base (444)..(444): a, c, t, g, unknown or other
  modified_base (520)..(527): a, c, t, g, unknown or other
cgttccaatgttgtcgaaccactgaacaacatgcatgcaaaaatatgaaatttttatatatgacatataaaatgcattatgaattcaagtgaatcatcataaattaataatttagaattaataactaattttcataattaaaccctaattatctgttaatttccaaatttaagctaagcggtctttacagacacagttttagattgaccatgtcatgcttcctcagaagctctttaatatattttctttgatttagataaatacccatgtcatatttgattactttgttagattatattttaccaatacctagatttactaacacgtatgtttttaacatcctaaatatgaatctctaaaacaatgaaacttaaacacatctaaagtatgagaaactttaaatcagttccagcggaatataatgactcattccactcagatctntaacccttgtatactttctgtcgcagagtataataaggatttgagcccgattctccttcagttgtttggattcttnnnnnnnntacacactatgattgaggacttacttgttatggattggcatgcactcaatcactaaggctcaaaatttaacgtgatgaacaacactcaaggattcgaaaattagaagagacaaagaagaagaagaagaagtctcaaaacactagtt

SEQ ID NO: 100976 - DNA, 861 bp, Cannabis sativa
catggtgttctatctcaagattaattgacaaagtgaggagtaactcattcatcttatatatgatattttattttttcacattagcaatgtcagactaactctaatacactctctttatgtttgggtctaaaaagtatgagcataacaaatgacctttaagaaaccatatggccgaacgtgacatttgaaagaatcccacaaaatgaaattgagaaatttataagtatatacatcgggaaatttgtaaattttaaaatcaagtgcatattaaaactaattatgttaatatttagtcattattaatttatttatcttaccacgaattttcgtattagaaaagtaatagaaaaatataatggtacgacttagctatatattattaggaaaaataataattcatcccattgaaagaattatttatttgatttagtaaattgtttttttttaatgagaatgtatgtaaaaacattacgttaacattattattattgtacattatgttttatgttatttacttatgtagtagttaattaaagataattaaccttgttgcattactagtctctctttcaattattttcgtgtatgtgtagaataacaaatctaattactcattgttagtcttttacttttgtctcatttataatctttttctgttaattatgagccggtttttttactcgtaaattggattaaactcaactgtgatgtagcagttaggaaggaggtaggatcgacttaagtattaggcagtttggaatagggttgtacaaaaaaattcgtaaaccgcccaaaccaaataacccgcccaaaccaaactgaaaaaaccgataaaaattacaaaccgaaataatccgaaaa

SEQ ID NO: 100977 - DNA, 554 bp, Cannabis sativa
aaatattaattaaattttaacaaaggcctactttacgtctttttatgaaatgataactttaatttcaagtatcatataattataactaaagagcattactattgggcaccagtggtgcccatcacctttcgtaggtggcaccctacgattggttagcgatattccctaaatcttatttttttaagttatatgagacttgctacttaattacactaatagtggtatgataacatcaaagaaggttgcctttagcatttttcataactaaaatatcacatttttatatttttttcttttttttaattaagatattcaaaaaataataaaaacttttttaaaacatattaattaataataatagaacaaactaatgaattttctctaatgtcttaaaaatatttaaaattcgagatggaagttaagcttaagatatagatttgggaaatacaatagtgaaactagtgaactatggtaatgacaagggatgcgatacagtgatgacagcaggtgagtgtgacagtcagtagtcctgtaattcgtaaggggaaataccg

SEQ ID NO: 100978 - DNA, 812 bp, Cannabis sativa
aagagatccaccttaatagttagaacgagaatgaatttatttcagagaggcttctaacatttccagcatataaatacattgccaagtagagtaatatacctgctattagataatattcaataccacaatgcagttttaatgcatattttttactccaattcatggttcttcatcacttgaagtggaagacaaaattcttacaagttatcacccaatgaacatatgtttaaatgaaacagttttaaagaaaaagttaatcacatatgcacttaagaaatacttgatggtgctgagtcatggactagacccgcagaaaacacaatcaagattaatgtagatgcaacactctttgatagcgacaataagtatggtttcagaattgttgcccgaaaccatcttggtcaccttgttgcagcacgggccggttgccatggcagaagatatgcagctgaagtcattgaagccatggggattaaagaagctctcagttgggtaaaaactaataattggcaacttgctgacggacagtcttgtttcagtacaagctatgtgaagcaaccaagcaatgaggtccactttcggtcttttaatcaaagactgccaacttttgttatctaccctcctaaatgttaatttatttttcattagacgatcagcaaaccgagtagcacattatgttgctagatattttcggtatcaatctgatcataacatttctgatatttctttttttggtgaactcttacatcttttgtatttagaatgctaaattatttaatgaagttgatatttcatctttttttttaaaaaaa

SEQ ID NO: 100979 - DNA, 1248 bp, Cannabis sativa
aaaaattgatttggtcaaagcttatgataagttgagctggcgatttatcgaacacgtcttggattgctatggaacccctcagaaatttcgaagttggatctctcagtgcatctccaccactacgttaaatatatgtctcaatggggggcaagttgggagaattaatccttcttgtggacttcggcaaggggacccactctctccttacctcttcatttgggcagcagaagtgctttctagattacttcatgatgcccttaatcaaggagtcattcagggtattactcttagtaggggagggccggtcctatcacacattttctttgcagatgacctaattctggtcgggcgagcaaatctttcggaggtgaatggattctggaattgcatagagaatttttgctcctggtctggccaacaggtaaataaactcaaaacgtctattttctttagtaaaaacaccccggccagtttaaggggtgaaattaaggaggcgttgggcattgattaccctgaaggttgcattaagtatttagggttgcccctttttcgatcaaggcagaaagatgcagacttcaatttcatccttgataatcctcacgtcaaagcttcagggatggaaagcaaaaactttatccaaagcagggcgagctactctaattaagtcggtgggattgtctatgcctatgtatgctatgcagaccacgaaactctcttctcgaatggttaataagattgatggtttggttagagacttttggtgggggtttgagaaagggaatcatgggatccatctgaaggcctgggataaactttgtcttcccaaatctctaggtggtctgggattccggaaaactaaagagatgaatcaagcctttctggctaaatggggatggaatatcctcaatggaagccaatctctgtgctgtcgtgtcctcatggccaaatatctcaaagggaaagacattcttagctgcaggtataaaagttcagattcttggttttggaaaagtgttgtgaaggcaacgtccattttacgccaaggggcttgtaagttggtagctaatggagagaacactaagatctgggaggatccctggattccgcatcgtaaaggcttttgtccgaaaccaagtgggggtacctcttctaatgctaactatgtggctgaccttatgttaagcaacgggcagtgggatcttcagaaacttcgtcacacatttcaccgagagacggtctcggacattc

SEQ ID NO: 100980 - DNA, 1019 bp, Cannabis sativa
aaaaaataaataataaataataaagagagggaggcgttggtgacttgaatcataggctaagaaaatttgtgcttaattggtaagtttcaatatatattctccattgatttattttgatatgtttccatttaaagtttgatatcttatttattgtattttgtcattaatcttgaaagatttttggaaaatattttggtatttctagtttcccgtttttttttaaaaaaaaaaaaaaggagaaaaataaaatttggcaagagagtgggcggtttcccttttgttcatgggctggcggttacttttcaaaaattcaaaatcggtatcctttttgcttcatccttccatacttatttaaaccaatttccttgtcatttattctcaccacctacccgattccctttctttgtttttcttgccttcttgttgttcattctctctgtcagatcaccatggttagaacaacctatgcaaccccctcgaatgatcctcctgctgctccaatcttgctccctgctgctgcaactgctttgaaaccaggagattcatcgcttcctcagcgtgaatctcagccagtgaagcccaagccaaaatgaattcctaaacaagtggttcgaaaatccgtgcgaccctacaaatgttggacctcatcgtcttcatcttcaaagggatctcctccacctgctgttgtttcacctcctgctgcaacagtgaaggaagttgttgcttcaaccctaactggtccttccactcgcactcgtgcccagcaagcttctatcgagaaggaactttgcacaacacgaagccatgacaagccagttcctccagccaagaaacttaaggtaaatcccccttcggtttcttcaagctctaaagaagaagaacccatggaggatccctctgttgattcctctgataaatctgtgtccctccattctgaaaaagagattcttaaagacatcggagcctcctcggacagtgaggaaactgaactcgaaccagagcctcctttgaccaaatct

SEQ ID NO: 100981 - DNA, 693 bp, Cannabis sativa
agctaagtgttttaaggggaaaaatacattgaggggcactactacaaaaataatatttggcaacactcattcagtaacacttgagaaaaaaatgttattattttatgtaaatttttaataagaaacactttagaaagaagtgttgctaaaataccattacttttggaaatattattttagtaataaattaaaaataacctacagtaacacttctaaaaaagtattactatttcttgaaacgaagtaaaaaaaataacgttctatacaaaagtgttactatatatatatatatgaaaattataaaagttaaataataataataattatttataattaccccacgatatttgatagtgggaggtgggatataactgtctcttcttcctatgcactccatctctctgtctcactattaaaattactgaacttggtttctagctttggttctgaagctttgaattttttttatacacataaaatcacttgacaattctcattttttttttattcttttcttaggatttataggtcaatttatgtgcaagggtcctgtagacttttattatgcttataattgaatctcatcatttcagtttttttaatgattctaattaaatagagataaactatgaaacagtaaatcaaaacagaaaaaaaatggtgcgaaagagagttgaatataattattaatta

SEQ ID NO: 100982 - DNA, 633 bp, Cannabis sativa
catgctattgatgacccaagtttgagtaactcaaacttggtcatccaccacaataaacctcaaatacagctgcaagaacctatttccaaattaaattaaacataaaaacaaaactacacatcactcaaaccctaatagtccctaaatcatcaatttgcatattcaaccaaaaaaacaaagcttcaacaaaacaagattaagagtccaagggcttacctacaccaattactccttgaatctaagctgaattctaggaaagtgggatgaatttgctggttcttcttggcttggtggaggtcgagcagagagagggggaaagaaaaatggaaattctcttaatttttccttatttctcaaatgaataacttaattgcttaaaattaatcttttggttgaaaacaactaaatggccagctaccattcacacatacaaccacctaatcccccctttaaaaatgactaaaatgtcgtttaatcttagacttaagctaacttaagcctacgggtaaagtagtcaaaactcataaccccgctcaaacccgatattctatttatctccaatattaaacccactaaggaaaaggttataaaaatacccatgtgattcaaatggccatccatcgcattttccat

SEQ ID NO: 100983 - DNA, 603 bp, Cannabis sativa
tgttcactattttattcattcattcatgcgatcttaattctctcgtactaatacaaattctcaataataagtatgaaattttatgatatttatataaattattcaatcaataattttaataattcaaatataatagtaatataataataaatcattgtatttatttattcaattaaaataataaatctctttacatgtttttagctaggacacactcctaacaatctcctactagtggttaaagcaagtgaggcatttgcttcaatcccatattacttacatgaccctcgaattgctttgctggaagcatcttcgtaaacagatctgtcaagttgtgttttaataaaattttcagaatatggacacatctcctctatgtacaatttctttgaccatatggtatttacgctctatgtataatcttctcttgtggctttttgattcttttgaattagccactgcttcactgttgtcacagtaaataacaagtggattctctattttcagaacaacttctagatctgtgtagaactttttcaatgaaactacgcctctttagctgcttcacaagctgctatgtatttagctgctatgtatttagct

SEQ ID NO: 100984 - DNA, 710 bp, Cannabis sativa
atattacatcagcaatgcaagttatatcattaatttacgggtagtagggtcgcaaatattccacgtttcagtatttctgtattagcgagccatttagccgagcaaatttgtaaactttaattcttactactgcttcgattacctaaggaccgtccagttcgggttgcatactcccgcagatgcatctctcgtgttcacaaatactcgccttagcactaagtctccaatgtttaatagtcttttcttgactcttttgttgaagtatcttgcaactcggtgttgatacgctgtattagtgacttgctactcagttcgtttttcatgaagcagatttaaggataatattaggagttcttggttttcctcttgatcataaaactctcgtctatgagtcaatatgttcacttcaacaggtagcattgcttccgagccgaatgctagcgagaagggagtgtgtctcgttactgtcttctcggtagttctgtgagcccaaagtagctgaggtagctcgtcgacccacctgcctttggcagcatctaacttgttcttgataatatctttcaagattttattaacagcttccacttgtccatttgcctgaggcatagaataacctcttttttatagtttaattattgtgtatcgaggcactgaatacaagagttttcgcacctcatttttgttagttggaagttgtccatcgagtagat

SEQ ID NO: 100985 - DNA, 1051 bp, Cannabis sativa
cgctatagcacctaagagaaaaatcctgaaatacccacgtgctgaaattatctttttttccgtaaaaaatccttttttttccaaccaggcgctatagcacctagcaccaatttttttttacttcaaccttgcttagtaaatcatgcataacttttgcgttcagactccaaatgatatgatttaacatgttttcgaaagctctgaacgaactctatcattttgggtttcataagctcttcgagaaaatgatgaaatcattgtcaaaaatgggctcaaagatctcattctatcacaaaatgtctcttcaggacaaacatacacacttggagaaaatacatcaaatctatacaacaataaatactaatccatctaataattgaataagaagaagtgtacaaatgtgcactcatcacatccccaaacttaaactattgcttgtcctcaagcaatgaaaaaaataaaactaaaaagaaacaaaaacagacaagtcaattattggatgataaaagaagaaacttagaccgaaggtaatttatctcaaaatacaaactctttttccattattcaatatgcacttcaaacaaaggactagaattttaacccatttaaatttaacttctaatattatattttatttattaagaatgtgtatatatcaattctactaactctatttacatgtaatctatgtgcgtaaagacttcccttaccacaaaacattcaagataaatgtacgcttgtataaccaatttatatccattaatgtaaatcaaagtcgtgtacatcaaaaggactttataggcatgtaacgttaggctagataaatggtaaataagaatgtcatttaggctagtttcacaccataaacttacaaatctaatcaaaactacaaaacctttatcataaatttcattttctcccgataataatttttctcaatttatacctctttgttcacataattagagttataatctaatcaaatttatctcttgctattatttttttcacattataaatttttctcttcaaagtcttcaaagctatatat

SEQ ID NO: 100986 - DNA, 501 bp, Cannabis sativa
tatgccttaaataaaactcaatttcaatgtaatcttaattttattatcaataaaataacaaaaattattttattacttatttcgtatattacttggttcacatgtttatttcattgatcatatgtttgatatataaattttaataaatccttatcatattaatattcatgattatagtggtgtttacgtatttgaaagtaattatgattatatgatataaactattttagtcccgtaatttatcagtgcactggatttacactgacgtgataatcaacgatgtgatttacttgcacttctataagtataatatcttttccatttcataacaaagtaagtctgtatcggatgtattagctatacatcagactagactaatattgacagtagaaaagatatcataatcttacccgcttacccgtaggactagcccatacttacatcttgagaacacggtagtgcaattgagtgggagctttaatcatagatatggaatttata

SEQ ID NO: 100987 - DNA, 891 bp, Cannabis sativa
  modified_base (353)..(356): a, c, t, g, unknown or other
tgaggctatatttgaaaataatatatagactagttaaggaaagaaattaaaaaaaaaaaaaggtgtgaatgcaagcaccctaactaaatataagtgaataaatataatttttttcataataatttggccttgaaacatcacacttcctcttactcttgattgcttataccataattagggcaattttgtgcaattctactgtgggaaaaagttattatagttgtgttatgaaaaaaaaaaaaaacagatatagatgcaaaattgtaaaaaaaaaaatgaattgatgaatgtggtaaattataaattttaaaatattgtgagttgttaagattttattataataataataatannnntaataataataataatttattatataattcatcacaaatatatataaaaatgttatatattttcttatatgcatgcattaaggtttggtacccatgttagctaagcatgcatatagttataatatgttcgacaaagattacagatagccaaactatttactgtaaaaaaaaaatagtcataacaaaatatttgattaaaaataaaaaaattgttactaattataaactattatacttatattgtaactagaggtctgtgtttaagagtatattagtcacaaaaattataatttgttgtgactgtttattagtcaatatttgttgtgactaaaattaaattagtaacaatttatatttaaatattatgttttaatcgcaagtaattttttattatgactaaaagtcacatttaatcacaaaaaatttatgctgtaactaaaatattatcactaaaaataattttttttaacaatttggagtgatcaccacaataccataattaaatgtatcaggtacctataatttttatatttaa

SEQ ID NO: 100988 - DNA, 967 bp, Cannabis sativa
gatcaaaacttgggacctagatttgaacccaaactctgaccctgacccagacttggacccacatccaggatctgaactcaaacctggacccgaacgcagacccagaccagaatccgaaccccgacccaaacacggacccagactcggaccaagacttcgaccaaaacccaaacctgaaacataacccgaacccagacactaaatcaaaataaaaattgggactaggacgcaaacccggatatggacccaaatcgggacctaggacccggacctggattggggacttagacatgggcctcagaaccgagacccagatcggaactcaaaactcgtgactcggacccgaacatggacctagactcaaaccctgatctggacccagacaaagatcggatcctgaacccgaactcggaccaagacttgaaccccgactaggttgtggactcagatcgagacctaggactcggacttggatggggaacttggacccaggacacgggcatgagaactaggattgagacccacgacccgaccccagacccgggacctgaagtggaactagatagggacccgagaccgtgaccaaatctggacccggggcttggacctaacccgtagtcagtgtttggatctgggacccataccctaactcaaacccaaacccggactcggaccaagaccctgacccaaacccagacccgtacctcagacctgggtaccagaacttggacacataccaagacccaaacctacattcgggaaccaaaaccgaaacttgaactgtaaccggaaagggatcttggaacgggaccgagacctggacccacacttgaacttgaaactggacccacccttggaccttaaccgagatcgaaactcagacctgaacctagctccacacctaaataacgtcttaacccagactcggacccaaactcgcgtcaaacccgtaccccgtgacttgaaa

SEQ ID NO: 100989 - DNA, 1389 bp, Cannabis sativa
  modified_base (387)..(387): a, c, t, g, unknown or other
agattcatacccaacatatattcccagcctcctttgaggacccatctttgtttgttgtggtggagcaattggaacatatactgtacaaccaaagattctcatataggaaatatttggctcctgaccaaaagccaattataataggaagaatttgagatttgatgttggcctaatgcgtacaagtgccgcagcatgtaaaatagcatgtccccaaactgaaaccgggagttttgttctcataagtaatggtcttgcaattaattggaggcatttaatgaatgatttcgctagaccattttgggtatgtacatgagcaacaggataatctacatttatcggataatctacatttacccctattgacatacaataattattaaaagcctntgatataaattcaccagcattatcatgacagattgtctggattgcatagtctaggaattatgctcgtagttagattatttgagcaagcaatcttgcaaatgctacattacgagtaaataataaataaacatgtgactatctagttgatgcatctccatcaataccataaaatatctaaatggtccacatggtgggcaaataggcctacatatgttgccctaaattcgtttaagaaatccaggagattcacttccaacttttaatggtgatagcttaatgattaatttttcttaagaataagcagcacatgagaactcaatggataatagaatcttctggttctttaatggatgacaatgtgagcgtaggtacgagctcacctagttaggaactacaattgttaatttttaaggctgaaaagctatctgtatcaaaaatcaatttttggagatttatgctgtaatttttcttatatataatatatataaccttttaaaggatataattttgtttctttttaaatctattaacaaatataaggataagtagatactaaaaaaaatagctcgattattatcaacgaaattaataattttaattttgattagctcttataactagaacatttaattattttgttttctaacttgttggttaacaaaatattaaaagataccaacataagaacaaatttgtgagtttcttaattttgtggtagaaatgagttttatgtgagtgaaaaagaataaatgaaatatacttttatttattaaaaaataaaatagactcatacttttatgaagaatttgacagacatggagacatcaaagtctcttattttttctttgattatatctcaattttgaagatcttttgtgactaaaagagcctagatcaaagtagaccaaagaaaaaaataagaaaatttataagagaagaaaagaagataagtgagaaccctaatactatgtattatagtacattatattaattatagaaatc

SEQ ID NO: 100990 - DNA, 510 bp, Cannabis sativa
atcacaatgacgatgtttgcaagcgaaatagatacttaacctcccgaataaaccagcagtctcttaacttatcaatttctgcctcaactttgggaagtaattttgttcgaattcttctttgagattatttaataggggtagcatcttttgatacttgtaatatgtgcacagtaaccttggattcagccctggcatgtctcgatacccccaagcaaatacatctttattctcacaaaggacttgtttgtactgtggtaactcttcttcagttaataaagcactgacaaacacaggctttggatcatcctcagtcccaaggttgatctctattaaatcatccacaattgcttgcccaccatcttcgaattcttgaggtgcaagttgaaagatgtctataaaatcttctgaagggtttgagctcgagccctcatcttttacgatcaaactttcttcaaaagagaggtaattgacttgagcaaaattttcttcatcttcttgtgtttcatgccc

SEQ ID NO: 100991 - DNA, 565 bp, Cannabis sativa
  modified_base (42)..(45): a, c, t, g, unknown or other
  modified_base (153)..(159): a, c, t, g, unknown or other
ttttttttttttgtgtatttttataaaattctacacaaaaannnntataataactaatgaagcaacttaaatcgtaattaaaatctgtatagcaatctacataaaaactacccaaaaaactaccagagtaatctaaaccgtaaattttttttnnnnnnnaaaaatagtatatggagtaatttttttttatttttctggcgaaaaattatttttattaaaaattacacgataattatttctttatttattttttatatataagtaaagtccaattaattaacattcctattaaggcaggggcacctgggtaaagttattaaggatagtatacaatgataaggtacaccaaatgaattaggtgaaggtgaaagaatagttggtataggggtaggttggtttgctatcagtgcccaaataatctatattcatgtgagtcctatatatgtcataccctaattagtaatcattcttctatcaccaaataaaaaacagaaaaagcaatcattcctctctctctctctttttttttttttgggtatacgataccatatatataaatattatg

SEQ ID NO: 100992 - DNA, 594 bp, Cannabis sativa
ttatgcaaataaattatatttatttatccataaaaaaagtgttatatttattgataaaaaacaatcaacaattgaaacctatattcaaataaattatttgtttatttatacattatccaatcatattagtgtagaacgtatttctttgattttcatgggataattatataaacactaatttttataaattttttatatttttacgtttaattttttttttttttacatttttacagtattttataaaaacactaaaaaaatcacataaaaacaacatcataataacaaaaaatcaacaaaaaaaaaaaaacaagagtacgacatataaatatataaaaagactgtactttatgtaaataaaatctaaaaacccgtaaaaatgttgaaaatttcacacagaccgtatttttgtaacgtttttttgttgtttttgtgtgttctttttttaattatcccataatacttttaaattatataacatatttttgggtgtttttacaatgcacactcctaaaaagggtgcaccgatgcaacccctatatgttatggcattcagaagaatttatgcttctgcagttggaagtctaatgtatg

SEQ ID NO: 100993 - DNA, 695 bp, Cannabis sativa
aatccacgagtcaatcttattcagatttctgattgtttgtcagggcctcctttgtatgagtttttttgtcccccttttcatcttgcttgcccctatttataataatatagtgagtagatcattacaaagtttactgtaacctttacagcaattattccctcaaatcatgggatttgattacatatcacgtagtgtaaatgcgcttataatttgaaaatcatatagctgtgagtttctcgcttttattgggtaaaaaatgatcgtgatttaaacatgtctttaattaatttatttggagatgtgtccatagaagcttagttctagtgatctccatagcgtgttggggccatttttccttccaaggacgacgttgcatgtctcttgacgattatagttcttatttacaaagagtttttcgaagctcatttgaatgttagcttctgactcgctggggttataagcctcgctgacgtaactggatgaagttataggaagtcttgtcatagtgagacggttgcctcgcttatttggcttcgagctgatccgattgttacacttagtttgtacattatacactaagtgctttcgcagttgatatgtatcgctttccttgatgcctcgctattcgcatttagcgacatatggtttctcgctaatatattgagcaccagtttgtatattgattcctcgcctaa

SEQ ID NO: 100994 - DNA, 537 bp, Cannabis sativa
  modified_base (186)..(188): a, c, t, g, unknown or other
atcatttaatggtggacggggtaaggtgccgtcaatgaagggagttttatttttggcaatgatattaatcgaagccgctcgtttccaagattgataattatcttgaccagtcaaaaggaacgaggaaatgatatttggttgatctccagttcccaagtgataacgatcatcttgaaaaggtcgatnnnaaaaggcgcgagataggccttgattagcaagaaaaccagaattatcaggaaaagccatatggccttgatgttcaagaaagggattattactggtattaaacggagaggagtgttggacatgtggaaaagagaacggtatggtcggatccgtcgtggtgctggaaaaagtgaaggtaggagccgtatgagtcaagattggagttgaagatgagaaaggcggaagcatagttgatgtggaggccgacgccagagcggagcaggagataaccagtgctgtggagttttgttcaatcggtccagaacttgggaaaatggcatcaggaacggagccgagtacagtagtggtgga

SEQ ID NO: 100995 - DNA, 598 bp, Cannabis sativa
caattatagggaccttgatttaggaaaaactaatcctgagagtcctaataattacacacaagcacgtatttggggtgaaaagtattttggtaaaaattttaacaggttagttaaggtgaaaaccaaagctgatcccaataatttttttagaaacgaacaaagtatcccacctcttccaccgcgtcatcattaattatctacccatactatgtatgctcccaagtatgaaaatctacattacaactgtgtagactatcataagatatatgtaataaaataaattgtctttcttatttcaatagcaaataaaataatattatttgagcttatatgtttatggaacaattttagtttacatgttcatggattagaacattataatatatttattattaaaatttttggtacgtgttcttaaaatgataattgaagttttatagtaaaagaatattgtgtattgactttttttttttaattataatctagagttactttttagaattttgagtatatgtagataagttataatcttattttactttattaaagaacttttggttcaattagattaatgataaaaatgtttgagatccacata

SEQ ID NO: 100996 - DNA, 523 bp, Cannabis sativa
ttcaaaaattagtaagcatttagcaagtaggaaaaatatgtgaaaatacacaacaaacatatcttaaataattttcaaggttttcaattcaatgatactacgtgtctcatttaagtaagtgttccatttaagcgagagtgtcaactcatccaaaattgacactactttggcaaccttattcgatcaagatgagaatttggtgttgtctgtttaggtgagagtcaaagcctttcttatcttaaaagctttttcatactttgtaaacactactcttaatagtcactattaaggtgattgtcactaagaaataaaatatttagaataatatttatattttgagattatacgacattaaattactaataaatgaacatctattatggacgaatctcattaaaataagaattatgtagagctaacaatggagatcgaatatccttaaactaaagctcattattttaaagtatgatctgaaaataaataaaattattttttatcattaatattaattttcaataaatat

SEQ ID NO: 100997 - DNA, 797 bp, Cannabis sativa
tcgatccttattcatagtgtatatatgtttgatttaattccgcattttatacataaacatatatatttcagtttatacatataaaatgtctaacactaggcactatcaacataaagagttccctctaaatcatcacactaaaatacgagcttgccaacatgaagtatctattttgatgggattgccataaatccatgaacgctgcaaaacaccccaaaatatgaacaaaattgacaatcctaagctcagacatgccaagttgagatattttcaacaattcaagtatctattcattcaattagaatcatgtaacaattcaagttggtacaaatgtaagatatacccatgtcactatatattgtataaataacatttcaaatgtcaataaaagaattttaaattctattaattttattttcttaaaaccaattagtcacatttacaaagtgtcaccatttataaaaatagaaattagtattcaaatattatttatttaatttatttaattggggcaaaaacgttagaagcttacaaattttataatttcattattaaaatattttataattacaaaaaaaaatgtttttatatatacagaaagtaattttattatttgaagcaatactcaaatgtaaataatatcttttcccaaaaaaaatgtaaataaaatctttacatagtcatatcaatgacaatttcatcagtacataagttgaataataaagacagaatatcttcatcaaatataaataaataaataaaatgtatagcaagattgtccccattgttttgagact

SEQ ID NO: 100998 - DNA, 860 bp, Cannabis sativa
taggtataataattttacctcacatggattttattatatttatataattaattaggataatatataaattaaattctcttatttaccccacaaggagttatgagaaactaaattaatagtgttatcataaactttaattaagatagacttcattcgttattttcctaaattaaatatttcattaaatttatcaaaaagtttatacaattttattagatttaaaatttagcctatagaaaattttaggtttagtaaaatttttattttcttcatgtttttattggtaaaacatgaattcattaaaacatcaattattttttacatctaatttgtaatcctattcttgcggctatttcatccacttctaaatacgctaaaatcactaatgaaatccctgagcgtaggagtgacaatttcaaaatttagaaggaacaagttcttctccaccttgcttgcattgacatggactatgcaataaggaaagacgaatcagctactgtcactggaactagcgctggtgctgagattgcactacatgaaaagtgggagcaatccaatcgtctctgcatcatgttcatcctgtctagaatttctttgggaatgcgtgggtcggtggagccatctgaaaaggtcaaagattttatcagagtgatagatgagcagtttgacactttggataaatccttattcaacaacctcatacaagagttctcatccacaaaactcatcggtgtgaaaggagtttgagaatacatttcaaagatgagggatatcactgctcatttgaagaaactcgatgttatcattcttgataccttcttggttcattacatccttcacaatcttcttccacaatatgg

SEQ ID NO: 100999 - DNA, 779 bp, Cannabis sativa
acctcatcatttgttggtgtggtagcgaaaagtagttagattatattttgaatattgattcaatgatctaaagttaaaataattttcttagaagcgttcttcgtgtttaaactgactaaatataatgataaatttaagtgtgagatttgctactaaaatttttagaaagattaattatgtattttgtaatatggttaaatatgttcaagcttctaaggtgattagaatgatgagactatttatataagaaataaactttttttttttaagaaaaatggtttctcacaattaaaaattattgtacataccacttcttaattttttttctatttaatttgttttttaaagaaaatgtacatcaaaagtgtatatatcaatatcaaattggacattagtttacttttccaaaagtgtagattatgattttgtggacatctccaatcttttaaccttaacaaagatacaatgctccactctacaaaatataacaacatatgctatgtatatataattatatgatatgttgtagtatatatatagatattttgtttttcacattataagaatgtatatataattaaattgtaagtatggtaataacaaagaataatgaggagtcttaaatgtgaggcgataatgatttttttaaatatatgaaattagtaaattagtgaatgagattggcaataaggcatataggttaggatgttttgttgtcacaaaaacaaaatgttttgtacatttacagtagaatctctatccaagtatatacctgggac

SEQ ID NO: 101000 - DNA, 882 bp, Cannabis sativa
tttttttttatttttttgattactgggcttcacaagagcaccaaacaagagagcaacaaggaaaacaaactgagaaaaaaaccggccaatcccaacaggggaaacatccaagcaaaactaagagaacaaactaactaaggagagagagatacctggttgatgaagcaaaagaaggaagaagaggaagagtggaggggcttcaccaatcgaagaagagagtgtgtctgtttcaaagcaaaagttaatatatgggaaatgagatattgttaattattattaatatataaacagtaaaaacaaacaaaaatctcccaaaaaatttgtgaaaccactatgtttaagaagctacaagaagtgttcagctttgtgttgtgccttatatttgggtattaaagcttttttactggttttgatggctaataccacaaaaaagtctaagaaagaaactgagttttacttcgaaaatgagaagaacaacccaacgatgatgaatatttctcttctcatcagtatatttaacaaactctacactattatgtcagtatatacatatttttgttcaacttgtatcaaataagttgcaggtacagaactcaccaatggcgaagaggagaggagtagcttgagtgtttttcagcccctttcagttggacgatgaccgaggaagaccaagccgtcggagcgaggtggacgatgaggaagaccaagcccttttctggtgagggttttcaagtatcaaaaggggatttctggcgaggaagacgaagctggaaaaaaaaaaggaattaaaggtgtcctcgttagaactaataacgaggacctatccacggtactgaaactttacccacaaaaaaccgcgaatttttcccgctggtgcgaaaa

SEQ ID NO: 101001 - DNA, 954 bp, Cannabis sativa
atttaagtgtattataagcaataaatatttatagcttagttggtagcttagttggttaaggtggatgggcatgcataatatctaaggtcatgggttcaaatccaataacactaagtaccaaaattttaagttataagcactattattttcttaaacaggccacatataaagtccagattcttgatcactgggtctagacataaacattatttctctagtttggtcttgatttaacattttgaaacatcgttttattatttgaatggttgtttggaaaatgctgaaaatcaaatataggctcaagggttttggattagagactgatgaaatatgtccttcgtgtgagattgagttggaaaatcgtgtgcacttattctttcaatgtaaatttagcaagagatttataaaggaatagttgagttggattggaattggctctcacaagtcacaattacaacttttaaggtatcttgaattatactagaaagatcaaagtgagtaaagtaaaaagggaaactacttatatattcttgtccttaattattgtgtaaaatatttcatttgggcttactagaaccatttggtctcatgagatgagaacccttaaagtgcttgttttgtttgctaaacatatgattgaaaatagattaattaagagagagacttactacaaaaagataggagtgaaatagacaaagcttggctttcaaatttgtatagattttaagttgagtttgttagcttcttgtacagctgtttctatttgtagtttttcttttgatgcaataatcttatttatttaaaagaaaattagaatctttattatcaatacatgaaattttaaaaaataaatattaatatttatatattaaaaaagagagataaatactattttactagaaatttgtgagtgggattgagatagctagcttgtgaaactctattgtacaaaaa

SEQ ID NO: 101002 - DNA, 781 bp, Cannabis sativa
gacaacttgtatttaaatattatgctttggtcacaagtaactttttgttgtgatgactaaaagctacatttagtcacaaaaaaattttgttgtgactaaaaggttatcactaaagatagtatttttttttatatagtgttgattcctagctaaggcaggttaggcccgcgcctagagcccacccaaaatatctagggcccaaaaattgcatataatacattatatgtagttgaaaaaatggtaattttttaaaaaggcccaataatattcgcacttcactttaaataccacgaaacaaaattaaggctcatatatattcaaggctggctcaactaatgtgacgcgttataagtgattaattttaattcttcatattatttatttaattaataataaattatatcaataataatattataataaaattcttttttaattgtacaattatcttgttcacatttaattttcatatgtaaacttcaattgcaattgataataaatacttataatacatatacatatatatatgtataaaataggttcgtggatttgttgaagatgatatgggaaaaaaagttgctacaatatttggaaagtgggatgaaagcttgttttatgttaatggtgataaaggaaaaaatatgaaggcatgtagttcctcctctgatgcattattactgtggaaaaggactttgctgccaactaatctcactcgatacaacttaacttcgtttgcgattactttgaatgagctaacggaaggtttgcaggtagacataat

SEQ ID NO: 101003 - DNA, 823 bp, Cannabis sativa
taattagtaaatcttattatatttcagttttatttaaggcataaaatatcaacaaatttctacttgtactaatataaaactaagtgtattacaattaatctcatcatcttgatgtctagatcaagtgtagtatgtagtactatcattgtaataagatttgacaagttgtattcagtttcaacattttccaccattacatcttcttaatcacaaaatccttgatattgtgaatatttttctatatgtttactcctcttagggtattggattccttatggttttacaactatatgtgtgttatcatgaggtaacactagtagttcatccgtaactggaataatgccaaaagttgtacagaactttccataggctgaaaatttatctagtagccttctaggcactttaaaattcaatctcgttggtagagttcgagactccggattagtctttacacttctccaaaagtcactgctccaccctcaaagtaatcaccattccagatttatactttctagcattaatgcaaatctacaaatctgagtcagtgcaacctaaagggtttcaaaaacatcacccttatagaataacatataggtcctccttaatcttaagatttatttgattatcttccaatgttcctttcttggattaaagttatacctactcataactcccactcaacagcaggtgtctggtctaatgcataccagagcatacatgagacctctcaatattgatgcttaaggaattctttccttgacctttatcttttttggaatggttcaaaattttccttagataaataaactatatgtctaggagt

SEQ ID NO: 101004 - DNA, 545 bp, Cannabis sativa
  modified_base (141)..(147): a, c, t, g, unknown or other
aaaattcaaacgaattttaaaatatctagattttatttgaattattttatcaaattaaattaaatatttaataagataaatgatatgaaaataattaattagatatttttcatatcaatttctaatcttataatttaatannnnnnnaataacaaaataaaccaattttagagtagatttagttaaacaattattattttaagaataaaataataaagaaatgataatttttcaaattatattgcaaaatatctcatattttgtattttttaaatttctacaaaaatatttaggttatttaaatatttataatattatttataaatttctaataagtaaaatgatatgaaattataataaatatcacatttttaacttataatttataaataataaaatatttcacaaaataattaatttttgaatttaaaaatattatggttaggatatccatataaaaatatttaagttaatttcaaattttttaattatttaatttatcatataagatgattttaatataacatttcaaattaaaaggataa

SEQ ID NO: 101005 - DNA, 591 bp, Cannabis sativa
acgacgctcttccgatctaatactgtgtactatgttaagttttcacggttattttttaattgttccactgttgttttaattgttctattttgttattttgcggatgttttttaaaaagacaacatttttgtaaaaattccgtgtgacaataaaattgaaaaattttgcctaaaatctagtattttttttatttttttcgtagaaacccctaaaaaattgcaaaataatttataaaaaatttgttttcataattgaactaattttataattttataagtttatcatattgaactagttacgtaattattttaataagatgatataaaaaattatggctaattgtcatatttttatctttatatataaatagtagctatctaacttttttttttttataatttaacagaatatatactttaaaaataaaagaatattccgtttaatttaagatatgttattagtattgtttattttataaatatgtaaatattaatattattttatttaagtgtatttaaatttattattacaatattaattatataaaactaatatattaatttgattttattatttaactttaaataattc

SEQ ID NO: 101006 - DNA, 902 bp, Cannabis sativa
ctggcaagtaatttaacaaaattccatcagaaggagctcctcacatattgtggcaacaacttgccataaaaaagtggacatataaatttaaataagcttaagaacacaccaattcttgaaaaatttcatgcccactaatatcttttaagcaccttacatcactctgtaacaacataactaaaaggaggtaggagtaaaaagttttctcactaaagatttcatgatttttcgtatgcaaacttaaagaggttaaattaactagtaaccaaataactacaagtataaaagctacaatataagttagaaaattattatttgcaatagtgatgtccttaaaatgatggattactgaccaatgtctatgatttctttatccaaaactaccataacttttaggctaatagcaagatagcaggaggaatatggtatcaagagtctcaatagtcaatcaaatttaagaattcttgcaacgttatgtgttataatagtagagagcatagatgaattttcacaattgtataaagcccttttgaaaaatatttgtcatacttacagctaaataatgtgtgatggaaggacgatttaaatccgccgaggcaatataggatcgagaatatctttagtcgcagcagaaggtccgttgtgacaattctacgttagatttgagtggtaaaataagacacagggctcccactccagacactgaagcattctgaaagtgtcaagagttacttctaaaaaatttacgtgtgtatcaccaaagataacaacaacaagaatgaaggcttcacattcagttagccataaaatgtggtttggttatgttgacagacattatcaaaggatatcaattaacaaaaccaaacatatggaacaaagcatttgtaattgaattgaaaaaa

SEQ ID NO: 101007 - DNA, 524 bp, Cannabis sativa
attccaacatgtgttttcaggcatgagattgactaagaggttgtaataagaggttgacggtagcactcctcattataaatatattacacaaatcatgttaactatttaaatcgatcccataccgcctatatttgtaccgactacaaactaatacacatctccttactttccattttcttaactcaacgcactgttgggaataatggattgtattccaatttcccttcaggatcaatatttacagaaaaatataatggggactctgaaattcttttctgatgtgaaagatcagtcaaaactacaatcacatagcatattcagaattttcagatatcttccaatgtaaatagtattttaagaataataatcaaaacactaaatgcatgccaagaaattagctcgtggcaaataaaaaccacggtaaaccttccactataacaataataatgggtacacaatattacaccatcaagttttgacaaatacttgaggaatacactcaaaactctcacactcactagtgt

SEQ ID NO: 101008 - DNA, 674 bp, Cannabis sativa
agggcacaaaacccaacatatgcaaccttagtctcatatgtggttccattagatactctgtatgaaacttaatggtgagtctttatagttgaatgttcaacttaagactcaacattcatccaagttgttacacttgagacttgtactttgttgatatccagcttgtacactaacatggtttggcaagtacccttaggtacaatttcctagagttttgtctatggcttggaacttgtaaggaactctaccttagccgttgtctggtatgtggtccctataggaactatgttcggttcttttctagctataccgttcttgcagggccttggcctcatgcatgtgaaccgatttcatattcggcctcaaggctttcatgttcttgcttttggcctataggccctctattttctaacactcctaccatttagccttaaagacttttatcatggacatatgatcgttttggctatcttcttatgagcttgacatgtaagtatccgaatttacttttctttatgtcaagccaaagtatgcatgtacttgacttagaggcaggtttagttgcttattccatgtgtaaaaatttctctacataagttctacgtgctagtttgatgcattgtacagtgtaggtgctccccaagtgaacgcgcagacttacagtctcttggtca

SEQ ID NO: 101009 - DNA, 1224 bp, Cannabis sativa
aagacctttataagccaaatgaaacaatatataccatttccttatacttaataatcatttgtggtaaaccacttgagctcataggtggatgtgtgagtgttggaggtcttgggttcgagtcccagttaaaacatattgtaatatataaacgcttaaatcaaaaaaaaaataatcatttgtggtacccaatactactacaaaatgtccatatgaccgaatttaattcttactaattagtgtagattttttttcttcttttgaattttttattttttattttattttgttgttagttactaaaaaaaataataaatattaaaaaattaatattataaagtaatcaatctaaaataatcaatccattttatacttttgtagattaaatttgattcatttgaattattatgtaaattattattattaaatttaatctaaaataatcaatattatagtttattaaaatttaaaatatatttgtatcatgtattaaatttttaaattattattttttattaagatactaattttatatataattctttttaaatatatataaatatacgtggattgaattatattggttatttttacatatcaagtaatgtacaaattttagattttttaatcatgcaagtacgaaatatccacacattgcgaattgaattgaattggatattttgtgaacacccctaactacaagattgtcttacaaataattttttttttcataataactgttgaataaaaatatgtgagaactaatacttaattacaccaataacaaatacaacattttagtggtatcctttgatacttaagtatattaataataatagggtaaatagcggcataaatatctaaagttttaagtttgtaagcgacataaacttaataatttttttagcgacataagtactcaatgtttgtaaaactgtaatttttctctaatttcgtcaagacagactccgttttgaatttgttgtaaaagaagatttaaaagtaaccgatactacatgtttccgtccaaatccaatgatcactattaaaatcttacttttagtcacaacaaaacttgccactaaaaatgaaaaaattgtaactaattataaatcattattcatatattgtgattgttaagcaaaaaatttcacatttagaatattaaaaataaatgcaaaacacaatttcacctatgccgaatttatagcataagagtttattaat

SEQ ID NO: 101010 - DNA, 502 bp, Cannabis sativa
agttttactaatttgagcttttaaagttagacacaaataattatatagaatatatgtgatgattaaattatataaacatgtatataattatatgtgttatgccacctagttttttgcaaactaattatttgtgttatgcatatttcttttaatatttatgcttttttttagataaatttatcttaattctaccaaaattttggcagcataacgactataattggacgttcccaaaaattttaaatatgcatgaaaataaaaaacaaaagaaataaaacaatacaaaacaaacaaaaataacattaacaatataaaatttatccacccatccgattgtagtacatgttttcgcagaacctaattcactatagttgaatatttaagatattcaaactccactaacatgtatattagtacacccatccgatcgcaatacaatatatcgtagaacctacttcactacggatgaatatttaaaatatttaaactccactaagcatgc

SEQ ID NO: 101011 - DNA, 609 bp, Cannabis sativa
ttcatcacttcatcacgaagcccaacgtccacaaatagatttacctcgcccaaagttagatccagtttggaatcggtcacaacattcgaccctaaactagagggggactgactattgagcaaagacccacatacattaccatcttgatactagcaaaagatagttaaaatgaactaactatattatctgatagaagcttgtgatcatgaacaaaaggtgtaacgtctatgccaaatgcgccagcaaagaacaatgaactcctctaatttccgtttactcaaaatatacaagcaacccaacaacaacacataaaaacaagaggcatcctttagagtatcaagccctttcaaaatccattcagaccgagtagacttaaaatgaagggcaaagccaaaatacatatatagtagtctcattattttggaaacaaataggataaaccttaaatgctttcataccatggcgagttaggttagcattagacaacaagaaattcaagcttgccttccaaacaaagtctttaatctttagcgaaaggtttaagactccaaagaagccttcaccaacgagaattccttgaggagctcgaaactttttcccaacccatgc

SEQ ID NO: 101012 - DNA, 512 bp, Cannabis sativa
aaaaaaaaagaaaaaaaaattctcaacattgcccagtggctgcggtgaggacatcacagccgcaacgagataggagcactcgccgtagcggatttatttatagccgcggcgagatactcaagcagagaaggctattattattcgctatctcaccgcggcgaggccatctttggccgcgacgagaatgcccaggcatgaataaaaggggcatttcgaattttcaaccccaaaacaaccattcttcaaccctaacctacccattctgaattcctcatccccatcaccataaaccttcaatctcatctcacaaaaaccacttctcttccatttatttcttaatcattcaaccctaatcacttcaaaccttatttctttcatcaatccatttcttccttaaaaaaaaccacactcaaatccctaattttcactcaagtttaaaaatccactattcatcaccttctacctcaagaacttacaatgtcttcatcaatggaggtagagtgaaggagatt

SEQ ID NO: 101013 - DNA, 570 bp, Cannabis sativa
gaattcattcaattcaaataattacaaagaaaatagtttatcaaatcaaagagttggacgaatacaaaggaacaaaactccaatccgcatagcactcgctttaaaataacaactatactattaattattttgattaaaaaattgtaccaatataacctactcattaaatgaattattttaacatgtgagaagcatataattttacaccatcacaaaataagatgtttgaaactaaaagtaaccatttagtttatttaataaattattaaaaaataaccaaactttatactcaaacaaattcatgaatatataccatactattttttttttttgagaaacatattaaaagtctttttgattgtactaatctataaaaaaaattaattttatagttaagagttactaaatgttattaaaaaaaataagacactgagatatatactaattgattttctatttaataagttctatttcgaaatcatattatcttatatacatccttgttacctactaattaattactttaaaattatagtttcatcttacctaccaattaattacttttaattt

SEQ ID NO: 101014 - DNA, 665 bp, Cannabis sativa
aacattcaacttattttagctattatgtacattaaattaaggccagcttttggaaatataaaaagtttatgaagctgaatttttcttttttctttttttctttttctttctaaaaataatttaactggttggtttttcatctccacaatttatttcttctctcattgaatgtagttcatagctactttttcttctctattcttctactattttgatctaagtacattctcaatttaaaagcaattctaatattaaaatttgaatttagagttaaatcaacactaaaagaatataattttagcactaatttttttttttctatttcaaccataatactaaaatttacattaaaagttattctttattattatattatttttttaaactatctcacattataatatatataaatataaaagtgtaattataaatatattattttaatattaaaaattaaaataaaatgaatttttttatggctaaaccctctcaattatcactctatttgcacttaaccttaaattcaaattttgatagtaaaaccctccaaactattgaatttctaataaatttaaggtgtcatctatttttcacagttaattgccaatatagaggacttatgtgtatacttttgtgcatgcgtcaaatttatattgacacactta

SEQ ID NO: 101015 - DNA, 574 bp, Cannabis sativa
attacttctttatcctttagtaccgtttattcactaaaggaagcgactaaagaaagcgtaatttagatctcatctaaatttgtgtacaacattctaattctagaattaacacttaaaatgaaaatcaacatttgatccattaggaaagtcatgcattcactgcctttgtatattgtagtgttagaatagtggccatcaaataaaattttggtagtgcgcgcactcttagggtctgacacaagggacaatcctgtgatttggtatcagagggttgccacatcattctgaactaggtttttgggatgcctcttagaatgccctttcggatgtatcccatatgctcatccaagtgggatgcctttccaaatttggagagatctagtcttggatgtaaatatcttggacctcaaataggtgtgaggtccatccttttgtacagactgggcctattatcttgtttggcctttgaccagaccttaaaaataaataattactattttgccaatttaaaatagatttttcaaacgacataatactactctttatccccaccattgacagtgtttcaaggtgg

SEQ ID NO: 101016 - DNA, 606 bp, Cannabis sativa
attgttataatgtcgcagcccacttgccggtgctgatggtccgtgagaatattgaaccaaaattggcagaaaaagatgagttggatccccgtgtgggatccgaaaagattttagagcccatggaagacatcgaggaagtgcaagtatgcgacctcgacccttccaggaccctccgcctggggaagaacctagagccagaggagagagacaaaattattgaagcattaagggcgacaacagatgtttttgcgtggtgccaaggagacatgaccggcataagtccacatgtgattacccatgtcctgaacgtcaatctagatttgccgccagtacagtagaagcggcgtccccttgacccaataaaggcagatgccctagaaaaagaagtggacaagctgctagccaatagcctgatccgagatgtgtattacccggaatggctggccaatccagtgctggtgccaaagccaaatgggacatggcgtgtatgtatagacttcaccgatctcaggaaggcttgcccaaaatactgcttccccttaccccggattgaccagatggtggacgccacctccgggttcaagctattgtccttcatggatgcct

SEQ ID NO: 101017 - DNA, 1065 bp, Cannabis sativa
aatttattgttgattttttgttatatgtatgttattttttgttattattttgatgttgtttagatgttattttctattacgacaattagaggcgaaagaatccgttggtaataggagcgttttcagtcagtataagtgattactgatagagtcccgtcggtattgacccgtcaataatacctagtcagtattaatagttaatagcatcggactgacacatccatcgctagtatttattaataccagcggacctatagcggagggacctgccggtatttaatgcgtcagatttattatctgaacacattaatagtggtgagtaccctagtattgtgttttaaataaaaataaataaatattaaatttaaaatataatgtttatgaaatatacaatttataataatattaataatatatataaaaaatatttaaaattaataactgtattaattttatattaaattaaaaataatttaacaataaactaattattacacatctaattaattaataattgtccaacataccaaataaataattatcatctacacataattaaaaattaaactaataattattgtccacacataattaaaattaactgaaactaattattactgtcttcatcaaacacattatctaaaacttttgaaccgctagtgttcaagtttaaattagtcggtttggtcgtttttttctatataaaaatctagaattcggttttcggtttgaattggtgtaatccgaaaactgaccgacaattcaggacctatcttaaaactgaccgttttgaaccacggtttggtcggtttaaactgcccaaggaactttttttaaaaaaaaaatatgatccattttattatataaacacattattttaaattttacaactacaaacatacaaattaattgttcaaaaactaattatcttattgttttaactttaatattaataaaattatagtatattattattatatattattagtaggaaaaggtttcaatggttacatcaaatatgtaatcattatggttacatttatttttagtcattagatcattatt

SEQ ID NO: 101018 - DNA, 1365 bp, Cannabis sativa
  modified_base (351)..(353): a, c, t, g, unknown or other
  modified_base (570)..(570): a, c, t, g, unknown or other
  modified_base (631)..(633): a, c, t, g, unknown or other
tgattgatttaacattgttagtttgaaccgttaaataacaaaaaattgttaaaccaacaatttccgttagatagccatatatttaatatagaatatatatttatatatttagggttaatgtcattttggaccatgcgtttcgcaaaaattaccgattggaccatctgttttattaaatgacaaaatggattctatattttttagaatagtacaaatagaaccctgagcttaattttcaacaattttttttctaatataaccaacttgaaggtaattcctagcacgaacaaaggcaagaaatgtaaccagttttgtcataacacctctagatcaagttattattaagttttnnnttgacaaaaaatcaattcagggtactatttagtactattttgaaaaatacaaagtccaatttgttatttaacaaaatagagagtccaattaataacttttacaaaacatagaattcaaaatactatttagagtaatttacgactgatgtcgtaatatgaaataaatattacattttttttttttgaaaaatgcgtttataaataaaattgaagttanacctcatggtcattacaaaagatattaataggtatagtagatatctctaccatgcccgtannnttgttggcaaacgcccatttggccacattatgggctgcatagttacagtttctagctatactagaaaaattacaattagccataaaagtagagaggagcttgcaatgacgcacatagttctcaacagatatatcaatgatatttttaatctcaataacatataaagggaacaactgatttgagtagattattagctattgagaccaacattatatctaactatctatacttgatatagtggtcaattcatctcaattgattataaatataaaaaatttgtacacaaattaaaacaagtactagaatacagtcaagaatacaaggataccaaccattaagaataaagaatgatctaaacctattcttctacacacaactaaaattgaaagaatctgactttacaaggtattcattgtgtgaacatagtcagcaacacaacaataacacctcattctttgcaatgagcaattcattagttacataacaattgttttaagagtatatgccatatccaaaatagttaacagaaacataaaatattatcaacattatatttgacattaatgtaaagtttcaaaacttttcttttaacattggttattatctttaaaagttgcacaaccaagtctcgggttcgagttcgattcgggtcccgggttcgggtgtctaggtccgtgtcccatgtctgtgttcgcatctggatctgggtctcgggtctgagtctcaggtcct

SEQ ID NO: 101019 - DNA, 683 bp, Cannabis sativa
aaaaaatagtagaaaagaaaacatataatacatttatttgcaactaccaaattttgtatgctaattgctatatgctcaaaatcatagcaaaaagaaccaaatcataaatataaaaaaaaaaaaaatcagtatcgagtagcaaaattaaaataaaaaaaaaaatcatatagactacctcttaatcacaaaaaaaaaaaataaaaaataaaaaaaataagcataacatacctaatcaaattcaaatcatattattatttatcaaaaattaaaaataaggtcaagaaaaaaaaaatcaaaacttgagtttgtattcacctcagattagaagtgtggcactgggcatgtgaggaggcaatatatgtatttaccattcgcacgtgctagaaaagttcccatgtctactcatcttgtcttgtaaagttgtaaataataaatagcaactgaaattgtcaaacgacaacataaaaataaaaaggaaagaaagtaaaacgacaatcaaattgaacttttcatatgcagaatgaaatcggtgcaactgagatgagggaagggaggaggttgtgtcataccacaagctgagaacaacaaactccaatgtctggccaatcgcgaagattcttacgaaacagaaaaaaatgagctccagatccttcaacacgaaaaaaatagaaagaaaagaaaag

SEQ ID NO: 101020 - DNA, 915 bp, Cannabis sativa
  modified_base (706)..(731): a, c, t, g, unknown or other
  modified_base (880)..(880): a, c, t, g, unknown or other
ttttgagaatcttaaaatgaaggataatgagactgcaaaagattactattctagaattaaagaaatagtaaatcaaatgggagcctatggagaaataatttcagacaagaatatagtacagaagatactaatttcttgtacagaaaaatatgattcaatggtttatacgatagagaaaactaaagatttagaaactctatcacctactgaactaatgggctctcttgaagcacatgaaagtagacgagaaaggcataaagaaagtgaagttgaaaatacctttcagtctaaaatcaatccgcggtctcaaaaaccaaaagctggagggaaaaagacataagaaaaacaaaaagaaaataacgacaagtatcctccatgtggcatttgtaaaagaaaaagtcactttgagaaagactgctggtttaaagataaaccacaatgccaaaattgtaaaaaaattggccacactgggaaaacttttcgtttaaagaaatcccatcaagctaattttgctaaagaaaaaatgatgaaagtaatctcttctatgtctgacaatctacaacagaagaaggaaaagatacttggtatcttgactgtggttgcagtaaccacatgagaaagaattcaagcatcttttgtagtcttgatagatctaagactaaattcaaaatcagtaatggtgacttcatggaagcagtcgacaaannnnnnnnnnnnnnnnnnnnnnnnnnaggtaagagatacatcaatgatgtacccttggtacccaacatcgatcaaaacctacttagtataggccaaatgattgaaaagggatactctttgtgtaacgtccccgctttaagcctccattggctccttacacccacggaatgaatgnctcttatacacgagtacgtcactccggctgcttca

SEQ ID NO: 101021 - DNA, 594 bp, Cannabis sativa
tatacttttttgtagtgaatccaaacgaggaagatgccttattaagtacttgctttgatggataccctaccataatacgccattcgtcgatgattttacgacttacaaatgatctcgccacttcaacggtaatgatcacaacttacaaatttactgtagtgattattttaatgtcgaaactaatcaccccgtttaataaactattaacattattattttgacattttaaactatataaaatttccctttaaacttgtgtgtaaaattctttgtaactttactatatactacaaataaataggtattatgctccctaaattttgtaactaataagatcgtgccccctaaattactagccatgttaaatatttcctctctcaactttgaatgctagtaatttatggtacttttgttagactttgttggacttccattaaataattagcaatcttacctcttaagaatgatcactatcatattttttcaagagaatttttagcacgttcacatcatggcccttgaacttctattaaagaaaaaggacatgatttggtagtgataaaaatttaaggagcaaaatatgatactgaccat

SEQ ID NO: 101022 - DNA, 1648 bp, Cannabis sativa
  modified_base (109)..(119): a, c, t, g, unknown or other
  modified_base (1094)..(1101): a, c, t, g, unknown or other
  modified_base (1313)..(1315): a, c, t, g, unknown or other
ctctctctctctctctctgtctgtttgtctctcttctctctctctctacatattttcaagcctatagtgaaagagtacatgcctacccatagcaagtcaagtactcaannnnnnnnnnnaagactgtgaagaatccaacacttgaaggagaatcgaactcatatcttgataatactatgcgacagaaaggaacaagagttagagatctacgtgggaggagacatattatttcgttgccaccaatgtaaggttacttaaattttatatatgtttaattttattgttttagagaattcatatttagagtgttaatcaacataccctcagtctccaccaattctgtgaattctttttgcttagcattgcggactgcctcattataatacttggcgttgaataactctcggaactcttcccaggtcataacagtgacgtcccgagtgagggacaccaattcccaccacactggggcatcttcctggaactgaaaagtagcacatgttacccgatcatttccaacgactcccataaaattcaaaattctttcaattactgtgagccattgctcagccttcatcacatctggacctcccaagagtactggaggtgctttcttacgaaacctctcgtataccggctctatacggttgccagcaacaagttgttctattggcattgcaggaactacgacagcctgagcttttggtggaggcactacaggaggaccctgttgccttagtcttaaaatttcttcatctcgctggcggatacgatcttgcatctccgtaaacctctgctcccaatctagaggagcttggggtggattcacaagatgaccaccctgaactctgccacggcctcggccgcgaccacgaggattctagggaatttgatttccctgaccgccttcggtgtcaaccctattaccctaactccttgtatttcgttgggcatccatttaataagacttagcctacgaacccataagccaggcaggtcaaacaacgatcataaaaacttaacaccgctcttacagattttaacgcatttaaaataaacaactataaccgatatgcttcctaacatgctttaannnnnnnntataatactaaacaagtacgggcttactaaaccgtgagctaagctttctctaacgaagattgtacatgtcttggcgagcttcggtagacaaacctgacggctctgataccgaaattgtaacgccttaacgctaaggcacgctacaatgatttttcaattacagtgctatattttctattcaaagaactttctcaaaaatcgtgtcaaattannncttttatattaaatattaaacttaataaacgttacataatcatttgcaagtatcgggatcccgtttctaaactttttgtgaaatatacaaaatacgtaatctaggttgcacaacgactacaaaaataacaaccccaaatgtcccaagatcgaacactctaggtcgcgcagagtacctaaacagggcatacacaacataatctaactaataaaactcaaaaaaatacactgaatcacaatataccattaaagacctaagtttgagtttcaaagctcaaacttctgcaattccatcaccatacgtgaagactaacatccagagcttaaaatcaac

SEQ ID NO: 101023 - DNA, 1383 bp, Cannabis sativa
ttttgattctgttattgataatgttagtattgtagactaacattttttactctaattttatataaaaaaaattatatttatgaaatagaatagaaacttaattccatttcctttcctttgttcaagtcttgtatttctagttctgaaccctgttttttgtcaattttttattttatagatattgttaaactgtaataaaacttaaatgaaactattaagaaacgtttaaattcatttcagaaactaaccatttgtccaagtgttttctcttttttctactgtccaaaaaaaattcctgcaaaaaaatgaataaaactattatgaaatgatgatgcaactgtaaatcaacttgaaaaaacatgctacttaactcaatttaacagtgttgagatccttgtgcattttcatcagttttatttgaatcagatcaatttccaactattataaaactaatttgtaacttttaacataaatcttaccttgtataaatgctatttgttggtacccgtcaactgaaattcttccataatttgtaaactattataaaacgataatgcaactataaggcagtgacaaaaaataaaaaatagacttatacgtaacatgtcgttccttaattagaattagatcttttattgtgttttaacaagctgaattgcccattataaaccatgaatcaaccaggatgcaactgtacataacgtagatttagtatttaaaaaaaaaaattcatatcataccttgttttggatttgagggggagctccagatctatttaattcagatctacattgcatgaatctggattttcgattttagagggagttattttgaacgattaaaactgaactcaaatgtttaatttcagtttcttcccagtttttctgattttttttttcgtaattttctgtttagatcattgcagttcttctcttccaattaaattttaccggaattgatggttgaattacccttgttttggtttcattctggttgtgttgctgatttgatcgatggaggtatgttcatcttattcgttcattccgtgcagcttaaggtatagaccaggtggtatttttgtaattttttgattctggactgtataaatgttgaatgggccggcccatagtaattttgtaattttgtaatttttttcctttttttatattttcctgtttttttctcttttttttttccttttttttaaataaataaaaaatattaaaatatcactagtcattggcaaaaggtcacctaaaaattattgtttaaaattgaattgcactagttttgaatggaaaggaacaattttcattccattcctttatttggttgcattttaaagtattggaatgacatttcaatggaatgctctttccacca

SEQ ID NO: 101024 - DNA, 655 bp, Cannabis sativa
  modified_base (27)..(40): a, c, t, g, unknown or other
gggattgcacagcttacccggtatttnnnnnnnnnnnnnncgggactactgactgtcacaatggttgagtgtccttgacttggggtaatttcatttagaaaattttaccatgaagcgtgcgattcaaagcaagaaaaaaatgttggaaactcttggattggtctgtggggccagtcatctgtccaggaaacaactagagtgatgcactcgtgtataagagccatcactctgtgggagtaagggcccaatgaaggcctgaagcggggacgttaccagtgtaacgtataaaagaacatcatgaagagtagtggtatcactaaggtaaataagattacctgaattacttaaggtaatacggtaatgatggagagtacttcataattgactggatagtcaatgtgatatataaagagaacattgaaattctagaaaaagattactttattaagcaattatagaaaggaatattcaagcagaatggggaaaagcttatgaattgagatgcaatttaatagacaagtatttatgtgatgggtgaatattggatgacaaagtaggttgtttattaaacaacgaactatataattaagtgtaaaataagttttagagtggttaaccaagtatgaagatagtgatgattgtaagggagcaatgg

SEQ ID NO: 101025 - DNA, 541 bp, Cannabis sativa
ctaagaccataatttaagcataagctaagaaaagactaagagccatagacaacagaaatttttgtattgaacacaaagttgttgtacctccaaatcggttgccccaaaataacaatcttgtatcgtcttcttcctcgtcgacctcatcaccatacccaaactctgcatctctcctataacccggttcgcttccgtacccagattcaaccccttgggaatcaaaacccccaattggaccaaacccagaaaccagattctcattctctccattcccaccgtctctatcccgtctcggattccgggcctcgctcacatcagaagaccagttcgtctcaccgtgcacaaaaagctcgccgctagaatccgtaccaatcgccaccgggaaatccgagcacgttccgtacgcggcggaggagatgatacaaaatagaccccatttcaaaaattaaacccaaaatctaatatcagagattaaactcaaaacccatttcaaagattatatgtgaaaactaaacagaaatttcctcaaactttgcaaacc

SEQ ID NO: 101026 - DNA, 732 bp, Cannabis sativa
tccaaagggagagaatgaattttgttttttttttgtttatggaaaagaaagagaaagttttggttcgagagtcaaaaagagaaacgttttgtttctgtattatgtacgacagttaaaggagaaggtatggtgggagtatatttctcaaaaatatatgagaggaaaaaatttacgtaaaatattttattattattaggataaattaagaatatatagcttttcattcgtctaataaaacatttaaatatatcacttaagaaataatttatttttttttaaaaaaaaattagctgtgagaggtacgtaataagatttgaacaaaattaaatactttactccaaataacatacatatcgatccatctacttcaaagagcctgaaaaaagaatattgttatttagtattttaaggtatggtacatatatttatgtatggtgcaccagtaatttcttatattatttattaaattaaaatttatagaatttgatatttaaattcaccaataccagtttgtcacattttgtgatatttggtactttaaggtgccccttaacatttctccttaaaaaaaatataggcctagctcaattggtggaaaaatgcctacttacatatatagtgaaaaataagagaaagattacaagaatattgtgatacggataattttatatttctgttgttctaggttattttttttttcttttctatagtgactaggctaaaacgagtgaa

SEQ ID NO: 101027 - DNA, 1408 bp, Cannabis sativa
tgtacggcgtaccaaaagagcccttaatgtgtttacgtacttataggactatattatctatagttgcgtgtgtctttttcaggtgtgttctgactggttggggcggtatagttacaactgggtatttcgggtcgaaccgggttcaggcccgaaatgcaaattggattgaaatattggaattttatttaataatgattaatctgagatttatttgagtttaaataagcatggaatgacttaaatgcccatttgtgtttgtgtgcatgatttttggcactaggggcaaaatggtcttttagaccctttatttacacttagtaaaagaaatgaatttttaagaaataaaatgttattttcttattttgtctccccctaaacccgaacccctctctctctttaacatattctctaattgaagaatttcttcaaagttccttggatttggcttgatttggtgttagcttttggagcttagagttgagggattgttcttgctataatttgaggtagtaatttcagtttttaattgattttcccttacttaattttatggttaaagagcatgaataggttgaagaagatgatatgttgcatgatagtgagttcttgttgatttgagcatgttgtacttgaatcttttgggttatgtgtttattgagcatggaatgagattttagggtattttctaggtttgatttcatgtttggtttgttatatgttgctggaaatattagggtggaggttagcttgagaattcaagttcttgttaatagaatttgttgagttatgctcaagttggagctttgattttcatggatttgtagtctgaaatttagtgagttttattgtgggttttgatgcacgttatatgtattttaatgccttatctttgagcttgctaattcatggtgaataactttgagttatatgtgaatttggtatggcgtggatgtggtttgagctgaattttcgagtttaggttgctggttttgtgggtttggaacccaagtgccgcggcatggtctttagcatgacgcggcccgccttctttcaggacctgggagttggtcccaggtgccgcgacatggcttttgcatgccgcggcccgccctcgagtttctgcgcagattcatgcatgtgtggactttgaaaattcatatatttgtaatccgaactccgttttgggagttctatataccgttggaaagctcgttccgagctctatgtgattattatttgtatttaaatgccatgaatatactttatgaatgtggaattaggggttaaccctagctctgtaaaatcccggtattatgactaggattaccgacacctggtcaggagcacctggggatttagaatctctgctattgagggacatcaggtaagatagtagttatcacgtaga

SEQ ID NO: 101028 - DNA, 702 bp, Cannabis sativa
ctggtttctgagagcttcaaagtttaagagtacctcaacattcaaagtaagaaaatatgtccaagatcacaactgtccaacaaatacaatacacaaaacaaccaaaaaaatataaggaaaaaagaagacataccaaattaaaatcctccaccacatccttagttttacttttctttgatgcactagcgtcatcaataacaactttcattttcttgcttgaaacaacttccgccacaaccttctgagtctgaaaaatcatcatcattgactgcttgaaggacattagtagccttcttactgacttttttactacggtgtttgtgagaaacataatcagtaacatcacctttaacatcttgattatcaacctgaaaaaataaacataaacaaaacagaacaaattaaaaaaaaaaaaaccagttttatataacatactcaaatctaataacaaacatataaaggataaaaatcaattttcaaggaaaaaatacttggaaaatttaaacacaataaaaatacaaaccaacaatgaaacataaaataaatgctaaaccgaattcagcaaaatttaatacatacttaaagtttccggggagatcttcttgttggagctttcaagggaatatcttccacaacattatcggccttaaacaaaacaacaaaaaatcagtttcatcccaaaaaaataaataaacaaaaaca

SEQ ID NO: 101029 - DNA, 618 bp, Cannabis sativa
gtttgacaagtgttgtttcgggtacagcaacagatggaatggactgggagggactgattgtagttgctggtatatgtatttgtgactcaggaggtttagcggtggtgtccattaatggatcattgtttgtgatcactggtatggaagtggatgattcagtggctttattgttggtaggtactggtgtagcacttggttgagaaacgggtgctgagtctgagtgtgaaaaaactgggatcgagggcatatgatctttaatgattgtagcagtatgttgttgctgaactggtgtaacagtgggaaggacaacatctgggaataagccacgaatctcagagatagatgagtgattgaataagggaaaaatatgctcatagaaaacaacatctcgtgaaatgaagatttgtttggattctaaatcaaggagcatgtaggatttcatcccttgaggataaccaatgaacactgaagctcgacttctaggagtaaatttgtgtcttgttgaaggcaaagtagagccatatgcaagacaaccgaacactcttaaatggtcatactgtggtggtttgttgtgaaggagctgataggaagtgattcctttaagtaatttggacggtg

SEQ ID NO: 101030 - DNA, 581 bp, Cannabis sativa
tataatttacaaattgtttaaaaattggaaacttaatctacacattttttttagattattcgggggcactgtgtgccaaatatatttttgtacaaatatttatgcagatcatgaattttcaatttattcaaaatacagtcgttatgctgctggattttctaaaaaataaaaaggaatatgttcttttgttattcttattatttgtctgctttggttatactgataagagccatgttgatcatgatttgtgcatattattgtttgacgacttagtctctgtatcatcattggtagattaggtatgtgctcacctgtaggtgaaagacctagaatctacatagggagtgaattagtgacgaagccagaaatttggctgagtgagggcttaaataaatattaagtcaaaatcttttaaattttcatcttcaacaaaataaaataaaacattgtcaatagtattttttcttttaataaagtgttaatttttttattatttgtattcggctacttttaaaatgggcttgattagaatgagggtaggtttatgaattatgattaagatattgagtgagggcttttgt

SEQ ID NO: 101031 - DNA, 618 bp, Cannabis sativa
ataacaactcacatagaaattactggaacaactactgaaacaacccaaaccgtaaattaaaaaaaattaaaaaatagtatataaaataattcacctctatattattcataatacttttataacacacatcaatataaagttcatttttgtaacatttaactttatcttaaagaaaacatttgacttttttattagataccattaattttccccctatctatgtaagatatatactccaaagtagttttaagttttaagttcaaaagccacgtattttttttttctattaaaaattccccatgcatgtcaccttcatataaaaaaaatgcaaataaaatttatcagaacaaatttcctaaaatttatatacataatactttaaacaacgcaaacggtgtaatttcacatgcatgcaaactcacaaaagcataatttaagttggaacattcttattaaatatacgtttcaacttgttctagtgaaaattcacttaaaaaaaaaaacaaaacttgctctagttaaaaaaatattttataaaatttctattatttaagcacatccagttaaattaggctggggcggcttttctattggattttatatatcttacctaatata

SEQ ID NO: 101032 - DNA, 603 bp, Cannabis sativa
gaaatataatggctaagggaaaataacctctaaagccctatcccccaaatcgatttcactttcacatttgtcttcaaccattttgaagatgaaaaagctttgacaattggccatcttcgacccatcgttgatcctccattgtcgactgctccgctcccctctcttcctcgccattgtcgaccactccgctccgctccgctcccctcgcttcctctccattgttgacatctactgccatctcttcctttcaaaccctgctgccctaactctgtgattttgacctattgtgttcaatcgttctcccagacgaaccatcctcctccctcctctcctcgacggcagcaaaactaatacaggtaaagtttcaatgtttttttatttctctcaggcttgtaatattttatatgagattattgggattattggggagtcagtagattatagaatattgtattgtatatacatggtatcattgggttttcctatgatataaaattattttcaatttcaacattgcaataataatgatttatctgtgcaatatctgaagctaaataggcatttggtgtttattaatattagaaagtgggtttcgggttgtaa

SEQ ID NO: 101033 - DNA, 682 bp, Cannabis sativa
caccaatatgttgcattacctaatcagacgagcccataccataatgtggtactcacatgtcactaccgcccgtacctaataaggtatgcctcaaggaagaaatccaacaatggtttcagtatatgccataacccagcattcacatgtcactacttcccatacttaataaggtacactgccaggaagaaatccaacaacggttcaatttatgttataacctagcattctcatatcactaccgcccgtacctaataaggtatcactgacaagtatatcgcatcacctaatcaagtgagcccatatatcacatttgtggtattatcacattgtcattgcctaatcaggcaatctttttattacataacaataataaccatatcttaatcccaatatcaatcaattctcaacaatattgattgtattgcaatataacatgctatgcagtacaatatacttttcttacctttaatccagattcatgcatgtcagccaacccaagtggagaaatatccccgatgatcttggccctatgtcacaacgacaataaacaaataagtatttatcctaaaacactgcttaacacttacgtaagacaatctagggttcttttaccaaacctcgatgtataaatacactaaaaataaaacttatattttggctctaaaacatacaccatattgta

SEQ ID NO: 101034 - DNA, 1263 bp, Cannabis sativa
aaaaaacaaaagatggagcaagttagtagagggttagactttgaagggtgctttgtagttgaagctattagaagaagtgggggtttagcgcttttatggaagaaccaagatgaagtttcggttgactccttttctgagaatcatattgacagtacggtgagattagaaggacaaccaaaatttagatttaccggagtgtacggagagcctaatagaagccttcagcaaagaacttgggaggttcttcaaactctccatggtcggtcaactctgccttggtgtctaatgggggactttaataatgtgcttagtcaatcggagaagcgtggagggaacccgtacccttcatggttgatagacgggttcaatgaagcggttaatttatgtgggttacgtgatttggaattacttgggcatccctttacttgggagaaaagcagagactctcctaattggattgaagcgcgtctagatagagctcttgtaagtcaagcttggttaaacatgttccttttagctaaacttttcaacttagaagtctctccttcggaccattgtcctttattgttggaagttcaagcggggaatgttcatgaccattttaagattttcaagtttgagaattgctggacaagtcatcaaggttgtgaggaggtcattaaagggtgttgggataggatgaggggtttcggtattgaagaaaaaattgctgagtgtggccgattattgcaacagtggggaaaagatgtatttgggaacttctcaactcgtatcaagcattgcaatcaggagctgaaaagatttaaaagcagaagagatgaagaaggaaaagagcttttttatgaggctaaaaaggagttgtttgctgtgttgaatcaaagagaaatattttggaaacaaagatcaaaacaactgtggttgaaagagggagatcagaatagcaagttttttcattcaaagtcatcttcaagaagaaggaataaccagattttttgtcttaaagatgctaatgggaactctcggcattggggcaatggcttggataatgtgctacttgatttctacaccaacttgttcactgctgaagcggctacatgggatgaggttattgcttgtgtgacccctacagttcgtaatgagcacaatgagattctccttcgaccggttgaagatcaagaaataaaagaagtggtgttccagatgcatcctgacaaatcgccgggaccggatggtatgaatcctaaattttttcaaaaatattgg

SEQ ID NO: 101035 - DNA, 833 bp, Cannabis sativa
aaaagtgatgtacttgattgtaatgctattcttgaaacgaagaatgctaaatatttttgaaaatatttttcctttgaaaactgattcaatttctcatgtacctgcaaaaaaataatttaaaaaattcttttgaagagcttaaaaaaagtaaaaggcaaaggaaagaaacttcttttgaaaataatctttatacatttgatgtgatcaatacatgatcactcacctactcctcggccagaacagccccaatggctttagtctttattgatgctagaatagagaggattacaaagttgattacaaagtgttctttgacacattcactcatgaagcaaagcgtcaattacataacaactctctcaccaagaatctctctctgtttcactaaactagcactcgaaaatctctccaagaaaatgctacccgaatgctacagcaattggctatttatagccttagtttagagacccatcttaactgtcataactgacagttaggtaaaaccgttaggggtagtttaaagagtcttagccaatgttgaatattcctctattagtggccaatcacaacacatatcttattgaaagtgatcctttaacctttcttgaagctatttcttcatctgattcatcattttggaatgcaacaattagtactgaaattaattctcttatcaaaaataaaacttgaattttagttgacttacctcctagagttaaatttattggttgtaagtggattttcaggaaaaaaaatataatctagatgggtctattgataaatttaaagctagattggttgcaaaatgctttactcaaaaagaaaatgttaat

SEQ ID NO: 101036 - DNA, 532 bp, Cannabis sativa
tggatggcctattgaagcaagagtgtcgatgaggctcttaatcttgagcgggtaatctccaagggagtttttcatctttgtatttcagaggagagttttgtactggcctatgttggctcgattcaaggcagtgtaatgatctcgaagtgtactccagatttgagttgctgtgtcacatcctaccatgcgagtaagaactcgttcagacatggaagaaagaagccaagatacaagcacgttgtcttgctgttcccattcttcaaacttaggattctccttgttagtgcgtcgatcttgatcattgaggaactgcggaggtgcgttgtttggttcaaggaatcgttgaaggcgactgcctttgattgcagcaagaacttgctgtttccaaggaaggtaatttgtttcatctaaacgaacagagagagagtgtgagaaggaaacgatattggttctggggagttgatttgcagtggacgactgaggattcgacgaacctccattgatggggattgaagatctttccatggagaaa

SEQ ID NO: 101037 - DNA, 681 bp, Cannabis sativa
gagagaggaaacattgtattcttcgttctcaaatcaatacgatctaaggggagtgggctattatcgaagtaaagggaccgaacctctttaaaatcttatgttctttattacttactgatttttgctctgtcttggttacatttcttatcgcttattaattgactcattatcgtttgctaaaagcgaggtcaacattttggttctttcattgagagcaaaaatccaagtttgctctttaccttaagttttactagacacacaaaatggtggtgcaaactcgcagaggcgtggttgaccagagtgacccactgttaacagatcttgcattgcaaactcctggaaatacaagggtcctaccaggaaccaatcttaaacaaccaaacacgcagccacctactgtgggccaaggtgtgacatcccctctggctgggatcacaccaggtgtgcaagagactgggaataccagttcggcagcggatcagagcattcctagcactagaatcccatccacaaccaatgctcagacgacaattggagatgatactgagattcaaaacctccgcaatgctcttggactcatgtgaggtcacaataatatcttgcatcatgatcaggttgagctccatgctgctatgaatcttgcgttcgaggagcagaggcgtcagttcattgagtggatgg

SEQ ID NO: 101038 - DNA, 714 bp, Cannabis sativa
tgagttgtttcaggctcacaaagaaattttgcaatcaattagagagtatgatggctaatttttggtggggtagcaatcaaaatggtaccaaaattcattggaagagatgaaaatccttatgtaaatcaaaatatgaaggtggtatgggttttcgatcctttgttcattttaatcaagcacttttagccaaacaagcttggaggatttttgatatgcccgattcactcttgagctgacttctcaaacataggtatttctctaacagttcttttcttgatgccaacattggtcactcaccatccttgacttggcaaagcatctattggggtaaggagttgttagttaaagggttgagatataaggttgggaatggtactcatattgactgcaagcatgatccatggattccgggttttaatgagttcaaaccagtcagcttttcagggtcaaactcattgccggtttcaagcttcatcactgaggaaagagtttggaatgtaccaatgttgaatagatatttccaacctatagattcagatcgcattttaactataccattgagtttttttactgatagagatcggttgatatggcattacacttcaaatggctcatgtactgtgcaatctggttttcacttagcaaattccttggaagaacaactttgctcttcaacttcaaataaccaaagagattggtggaagttcttttgga

SEQ ID NO: 101039 - DNA, 739 bp, Cannabis sativa
ggtgtatataataatttatcatttctatattaaattgtattatatatttttataatcaactaataaattaaatttattttgtattttttttgtagctaacacttaagccatatacaccaaagcaaattgatgacatgcgtcaacaatgggcagctgatatgcttccttcaatccaaaatcacaaacctaaaggctgttatattacttaagtcttttttcttttgaacttgggaaataatattgttaattttgtttacaatttttattattgtaacaaatattaataccatttgaaacatgtttatttaatgaatatttcaaggagttcaataaattttgtatcctatagttgattaataaatataattatattaccatatattaactttaaattaattttttttatatatataaagtataatatttgaataaaaaatatatactataatttatttatatatttaataatgaatatatattaatataaaatttaatttatttttttaaaaaagtattacacttaatgacatcttatcatagtagacatgcctactttcagcatctacccttactagacatgtaaacatatatttaaaaaaataattaaaatagaaaattataaatgtctctcattggtagacatacaaagactttaggtgtctcaccatgggagacacgtaaagaaggtacatgcatctccttgtgggagacaccgaaagtctttctttgtctaccttgg

SEQ ID NO: 101040 - DNA, 578 bp, Cannabis sativa
acattctgtaactttttatctatcactacccaccatgaagataaactaataaagtaggtatacagtacggtatgaacttattttaactctgcaaattgattataactcttttgtttattgtgactatgcgtacaacatatgattttaactctaattacgttattattttaaaaatttgccggtgatctattttgagtcttgtgattataatgaatgatgtcttaaaaaaattagaactaagattaatttaagagaaatgctaacagacactagtactgtctaatatactagtactatctaatactcttatatgtattaatattgatattagttcaactaagtatcgaatcttatataataacttttaagaagtattactaatcaattgcaagacgacatatctaaaaatattaggctaggcactacaaatactcaataacaatgctctttatttaaatacttaaaataaagttatatatttgtaccaataggaaaacgagaggactacacataaaactcccctaagaaacataattaatatttattattccaaaataataaatgacccaatgcatatc

SEQ ID NO: 101041 - DNA, 612 bp, Cannabis sativa
gttacaaaccgtaaagttcaggtagtttagccgccaatatccctattattttaattgatgaatatttttgtctcttctctttcttagtgtcacattgtttaaactcaattaagatgtatatacataaactaattaagatatacatttaaagtaattgtgaaataaaaaaattacaaatattataagtaaatgaaaaaaattgcaaatattataagtaaatagaaaaatattaatttttggatatttatacaaagttgatcaattgaatatatattcatatataaatatataaaattaattgggtaaggtattcaattgtacctacaaagagaaacaatattaattatttttggacaaatcggtgtgaatgaagaaatattttacttgtagtattttcttaatgaaatataatatatattgtgtttacttgtagttaataagtatactacttacatagtttgtaagcaatgtgagactcttataaaatatatatatactacttagaagacatactataaaatagataaaatattaatagataaatagtaaaaaaaaatgttcataagatgatatctcatttgatttgtatttttctttatatattgagaaaaa

SEQ ID NO: 101042 - DNA, 1024 bp, Cannabis sativa
gcagctaatccatgtgcaaccccattggttgtccgacgaacatggattagggatactccaaggaaactagacatcaaactagctaaatcctctaacaagaaaccaagttcattgaggaaagaagagcatttagaaaatgcatttacaactgctaaactatcagattcaacaaaatgtaagaaaagacccacaataagagccaaatccaatgctacaaataaagccaaacactctacctgaacaattgaaaaacaacctgcaaaaaaatattaacaaacataacattaactctccaaaaactaagaaaagataaattaacatgataaacttatttgttcatgctaataatgataatattaagattataatgaaatatattatatatatattgaaggggagtcccccttataaaatcattaaataataattaaagttacctattaataattttgaaagacaagcaactaaagaaccactcgagtcccttattatatctcctattctaatcgtctgagaaaagttatctattgttgcatcaacatttaatttcaaacaacttacaagtgaggatgaccatgtagcagtcgaattacaatcttttttcaaggaaaaaatagacaaatttccagcctataccaaaagcacaaatacaaaggaactagtaccgaaaacaactcattgcacaagataatccttgaaatcatatattattattattattattgttgttgttgtaactatacaaattcttttgcaaaaataacgtaattatttataaattatattcctaacatccttaaattaagaatatgttagattatttatatgtatgtgtatagcaaatgccgaataaacgaatatatacactatataacttaaggatcgaaatacctccagccattgattttttgagcttcaatcccaacaaactttgatctgcaaaggaaattgactaccatgggtaatcgggcttcctcgctctctcaactctctttagatagaattttgctgttatgaacagaat

SEQ ID NO: 101043 - DNA, 841 bp, Cannabis sativa
taaggcagttaatcaattacacagttaatcttcgtacttggaccaacaggattttcttcacttgacaccttgtgaagttcaatagtcccttattcaatcttatcccttatctaaagtagtctcacatctatgtgttttgatctttcatgatacacacttcatttgtttctgtcatattgaactattttagtactatctccaagtagtaactttgagataccttaccttgtggcattttctatctctgaatatatcaatgcctaagaccttcatctcaaattctcctttcaaaaccttcttgagcttgtcaatcttgctagaatctgttcccattattagcatatcatcgacataaacactttgagtgtttctcattcctagatttatgtagagagtggaaaacactgttgtaatagagccaatagcttttcattttgctttgtgttttctttcttgtacaaatttatcttttacttctctgttaaccaagattttctatacatatagaggtgataataagataatgacctctattttttttaaaaaaaattgtctaggggactgtttaagttcatagatggacctttttagcaagcaaaccagtttccttccttcagattccaccttgaatccttcggtttgtgtcatgtaaatggtctcttcagaatatatgtgtatttttctgcaacaccaaatatcaagaaagctcttaattgagtctgtcaaaaaacttaacaacccaggctttttggcaagttgttatttgaaactattaggtttatgagaattacacaccacagagtttataaaaaaaaagagtaaaaaaatcacacccctaata

SEQ ID NO: 101044 - DNA, 721 bp, Cannabis sativa
  modified_base (297)..(298): a, c, t, g, unknown or other
acatttgccccccaagtctgtacgggacttccgaagttgcatgtagactttatccaagctgattctgcttttagatggggacacgtgtcgagcgcgactgtttgagaccctatgtgaggctgactgggcgtccctttggttttcggctaataaatgctctaaaacttaataattcgaaatccaattttctgtctccacggctgacggttgcacttgattattttttatttcccatattcatttttaaggaaggaaactgaggcatctgaggctcctttgagacaattacctcttttnntgacttgcctataaataccaacaacattggcacataaactaattttcatcacccttctttgctaagtaatcttcatagcgaaaagagaaattattggcttcaaagttgccgaagtgccttcatacaaattggttattggattgacgttgctcgcacacaaacatctgatcttcgagtaagtctcttgttttctttatgcttatctttgcatgtttatatgtcaactgcaacctcaactttgctgtagaaaaatgtgtacaaaaccctaggcccagaaaccattgcgattctcctttatcatgtcttcgtccattttcataacgcttgtttctgaactgcataacgtccatccttcatcttgcttattctaagcttcatgaacttccttgccctaactcaagaaaattttgacttcttgagttc

SEQ ID NO: 101045 - DNA, 530 bp, Cannabis sativa
gatgagtgaagaatgaatacttaaagctctatatatataggtctctagccaacttaagttaagatttaaaataaattaataaatgaataaacctcctaattcccaccatactcggtcaagactaactaaaaaggagaatttacctctatgtaaagtgaaatagactaataaataatagacttagtgttatattgttttagacttttactccataatacccacgtgtgccatttgaccaagtaaaattggtttgatgactaaacaactatccattctttcctctttgtgctacacgtaacccttgactcttatatctcatacattacccaaacaatattgccacatactaaaggttatcaataactaatatatacatatatattacgttatagtgccatacactatcacactcccaaagaatctaaagcccaactataaccaaatgattcccataatatcactacactaaattaaataaaaatgttctatttaaaatccatatcttagtcaactacatggcccaaggcttt

SEQ ID NO: 101046 - DNA, 1819 bp, Cannabis sativa
tatctaagtcaatatcagttagtttatcttaggttaatagatcttaatcctgatatggttaggttcaatcttaattatgtcatttatgttcttagagttgcactacaagaaaatgcctttttactggcgcatttcgtcaaatacgccggtaaaagttgtcgacataaagcaaaacttgaaatcccactttcaattaggattcacttttgtcggcgcattattgtgctggcaaaacatattaatgtcggcgtaataatgaatatgcgctggtaaacgtaagaaaatgaagcaccaaaaggcgcgagaagtttactgcctttcatttcatttttgccggtgcatgtaaacttttaccagtgcatatatgcgccagcaaaagtctcaaaaaaaagggagggaaaattctcgcgtggatttgtggggatacttttaccggtgcacaattgccccagcaaaagtattaaactaaacgtgtgttttgaactaggccaaaatattttttttaaagacttttaccagtacaattggatgcgcaggtaaaagtatatatgtatcagggagcacaaagccacttccccatttttatttttgtctaaaaaaatttctcaccctctctcgttctctctctgtttccctctcaatctctctttatctctttcaatctctcttaatttctctcaatctctctttatccctctcaatccctctttgtttatctcttttttccccaaataaaaaacctccgatcaccaactccgtccgcaccactgccgaccacaccaccgcccaacgcaccacctgaaggtattttttaattttaatttattttttaaatatttagatttatatatgtgtgtatgattatgtatgtatatatgtatatagtatgtgagtgtatgtatatgtgtatgtgtgtatataattatatatgtatatatgtgtatgtgagtgtaggtgagtatgtatgtatgtatatatgtgtatatgtgtaaataaatatatatgcatatatgtatgtatgtatatatatatttatatatgtatgtatgtatatatgtatgtagatatatatatatgtatatatgtgtgtatgtatcggtgagtatgtatgtatgtatatatgaatgtagatatgtatgtatatatatgtgtgtatgtgagtgtatgtgtatgtgtatgtgtatgtgtgtgtatatgtgtaagtgagtgtaggtgaatggatatgtgtatgtgagtgaatatgtatgtgtgtgtgtgtgtatataggtatatatgtgtgtatgtgtacatatgtatttaggtattaaatttttaatattgttttacttttttatggaattaggtccctgtttgaccggtgcggattaccccgagctacttgcagttgttatttttgcactcgcttcaggtatgtttttttgctttctcttactagtagtttttgtttttagttaatatgtctatgcatgttagtgaagtaggttctgtgataaaattgactgctgttggatgggtggattatttttttgttcatttattgtcgtgaaatatttgtttgtgttatttataggttttgaaattttttgatttacaatttttaagctattatgctgtcaaaattttagtaaagaaaatgtaaaatatattgattgtttaaataaaataaaattgatttactatgaagaataaaataataaattaattgttgataaaagaaaataaatacggtaaaaaatataattgaaaaatgtaattaaaaatttagtaaagtaatattttcttttttttaaaaaaaaaaaacattttcaatttaaataat

SEQ ID NO: 101047 - DNA, 1304 bp, Cannabis sativa
aatgaaacgacgtacggatccatatgtaaatatagcatttatttagatacgctcgaatcactccttctcataattagaatgtatatatataattctggtctagttcaatatggaatgaatttataatcatggaatcgactcgatcattagattatcagttataagttcataaccctaatccattccccttaagaaatatgttttagtaagatataatcagcttagttgttggcttcgattataataagattttctgttttatgaattctcttactatatataatatttgatttttatttttataagtttcatacaacatttaatttaaaagttaaaatattcaaaacaagagttggcaacttcaacttgtgttatattaatcgttaaggccaacacgtatggaatagaataacttgcaaagattcctaaaacctaaactaaaatctgtaatttattagggggaaatcttattagggtgtataaccataaactataactaacaagcatgcaatcaaataatcaaattggacaaaatccattatatgaaaatataacttaaacaacaaaattaacaataataaacttacctaaccgtttacaaaaacatgaaagaaaatcttaatagcaataagaagtatgaagtatattagatttctaaatcaaatggacacttaataatctttcagttaaaagtgggcgaaataaccctattacttaaaagggatttttacaaaaaatattagattttgagtaaaagtttataattttactgcaacacggaattttttacaaaaatattgtctttttataaaataactgtaaaataacaaaacaaaacaattaaaataacagtagaacaactaaaaaataattgtggaacaactgtgaaaacttaacacagtacatattatttttgaaaaaaattctaccacacaacaaacgagtaaaagttagaaatttcaatatgtggtgtaaaaaccccttacttaaatcataaataaagaaaataataaaactaactatgttatgatactcaaggtcgccaaacattgggagtttgggccattgtacaagactccattttttaccattttacatatataatataataaatatcttttttagaaaaaactacatgaaaaatacaaatattactcttttacccacacacggattggataattttttttgtctttattattgttttatttatcaaaatacatgtaacacacacattgcatgcattgatgatgtcatgtgtttagattgacactcaaccaattcttcctctcttttcttatcat

SEQ ID NO: 101048 - DNA, 551 bp, Cannabis sativa
gacactggtgtgagtccaaattgtatattgctcatcaattagattaagggatacaacttacgagaagtttcgaggataccatgatagactttaaaatgtatactctaaacttattgttttgatttaatatacacacatttggaaatcctaagagatatggtacaatgataattagataatacgaaactttttcactacgtacctgatttagtaccataaagccaacactagtatctgctttgctcccacacggggatccatgtcatcttctctttatgcatcgaggtcatcgggagcttctaagaatccggacgagagctgcttggaagacgtatgtcagaaaagggaatggggaaaatcctcaaatttattttctttgtggaaaactcattttgctgcttgtgcagaaagacaagctacattgcttttcataattatgcactgcaaaagttgggaccaacacatcaggggggatttgagaggtcttgaccctcccagaagttattttccctttatattttgtttgagtaaattctttgggcgtcaactcc

SEQ ID NO: 101049 - DNA, 709 bp, Cannabis sativa
ttataagaaatttttcttaccaatgtactacaaaacataaaggcacatactaggtacatgatattttgtactctgtttttactaaacatcatccagaaactataaatgtactcggtacatgatataacgtactccactaccaccgcacagaaacatagaaaatatgaaggactgaaaagacaaaaattacctcagtccgacaacatggacccaccctctacagtactactgtagtattaactaccaccaactgtcatttgattaaatcttttttgtacttttttatttttaaattaaaaaagaaaattgattaatggtgaagaaacttacaactggttgtcaaataaattaaaaaaacacaaaaaaaatattaaaaaataataaagtacgtaggacccactatacagtacaacagaatacaatctctaattttcaaaatggacacaaaatcggttgcctatatatatgggcatgttcttaataggtattacttatgaatgtgtattttattattaaccattgaatcaaatctaatagttaatatttataactattaattaaattttttaaattaatatttcttatttttaacctattacatgataacatgaaagttatttttttttatctattctttctattttctcctcattatatatatatatatatatatattatattcattatttataatttaattatagcaatt

SEQ ID NO: 101050 - DNA, 660 bp, Cannabis sativa
ttttttttttcacgaacatattatacatagatatcaaatgaaactagttaatcatcttatacttataaatgaattatatataggagttgctgatttaagtccagcagtatcaccatccggaaagcagatagcagtggcatcattccagaattatgggggctgggatggcgaaatcgaagatctaaagactgatatttttgtgatgaagactgacccgcccttgggtcgcaaaatggttataaggaatggtgggtggccgagttggggaagtgataatgtcatatttttccaccgcaaggttggagatttttggggtgtattcagagctgacattagcaaaggtcgcgcaacagaattctttcgtgtcactcctgatggaatggatgctatgactccagcagccatcaatgctactactgtggctgttgcaactattcgtcaaaaatctaaatttggtgacattcgggtagagacacaatatcgacacattgaaattttcgatacaactggacaacaacaacctagacaaattacgatgaacataagaccgaaagccgaccattttaacccttttgtaatagatggtggaaagcgcattggttaccatcgttgcaagagtgaaatgttgaaggtacgttaccaattaatctaatcatatac

SEQ ID NO: 101051 - DNA, 710 bp, Cannabis sativa
catgtagctactatctttaaaggactaccaagtgagtatgacacttttgtaatttccactaatacctgagttgaatcctacttagtttcaaaaatagaagctctcattactaaaagtatgtctatttttgtcagtttctaattgacatttaaattttttttgtcaattttataaattgacgtatatgttgcagacgcaaatttatattaattcgcgtcatttcttcaccgtcagtattgcaatatcgtgtcattttagaatagacagaaatgaagtaaaaatcaaatatttgattatatttttgtcagttttgtacagacacatactaaaaaataataataaaaaatcagatctagctcaattcaaatccctccacacatcagaacaccaatatacgtttttacaaaataacaaatcgaaaaccaccgaagatcctcgtcgttgccaaaaaaaattgtgcaaacaccactggagctcccgctatcgacattgggcctacaaaagaaataggaaaatatcaaatttacaagagagagatcctgagagaacgaaagatatagagagatccagagagaggaggagagagaacattacctctttgatttcgacggtggcttgaatgacgcgcggtcgttttagttcaacagtggcaaccaccgtataagagtggtgcgagagagcagtttagtggcctatggacagtaatagcc

SEQ ID NO: 101052 - DNA, 727 bp, Cannabis sativa
gaagaggttagaatggggaatgaagttaggatagaaggtggtgataccttagggaattatggggttaagagtacttctgaggcagcaggtaattctaaacagggggttaagccgactggtttaattgctacaactagggtggacgattctgtagggaattgggaatcccgtaagagagctcatttgcttaagtgtaagtggacagttagggagcatgggacttatcataaagaaaagaatacttttgagatgttgcaaaacaaggagagtgggacacagggggactgtgctttttttccatcattatgaattgttgtaatattttgtgttggaatgttagaggccttagtaaagagaaaaagtaagaggctgtgattaacatttgtcatataaagaagattggagttggagctttggtggaaactaaattgaaaggaaagaaggtgaaggatttgatgtcaacaaattttgttggttgggatagctatactagcccaactattgagggtagattgttgttaatttggacgaaaacttttgctagggtgattgttatagaagagaatatccaatatgtccattgctatgtgaaacttgctagtcatattgaggcatttgtgtgacttttgtgtatgggatgaatggcattgaagaccggaagatgttatggaagggcctagctaatcttaggttccagatcggaagagcgtcgtgtagggaaagagtg

SEQ ID NO: 101053 - DNA, 788 bp, Cannabis sativa
atacacaaatatttaataaggttattttaaattatataacacaatttagttgattacataaatttaataaattgacaaaatatttaaaaattacttatatgttaattaattgtattgtagttgataaaaatatttagaatctaccttgttaatttttaaatataagaataccctcgcataatcataaccttattttcataatattaatttttcataacttaaaaaatatattttttaatataattaatcacactaaaatggcaattatccaattatcaaaactttattatgagttggtagttacttagtgtaataaaataaaataaaatttgtatcaacatgtacaaaattaaaaattgttcaagttgtataattgtcaagcattgatattgttaaacgatccaaattctatttggtaaatgggttgattattcaaggcgttttgttattattgtaggtcctccactttcattacatcgaacgatttgactgttccagctcccgcaacatttgcacattttgatcttcataaacatattatgtcccaacttcacaaatatgggaaaatatataaaataaagtaaagtattttgtgatataaatacttatatttaattttttaacaataataatagttaagttatattttcaaaacttatgtaggtatctaacaattaaatatcaaattaataagcacgcgatattagtaccgtcatatttcactacaaaaaatcttacttttaatcacaacaatacttgtgactaaaataaaatagttgtgactaatt

SEQ ID NO: 101054 - DNA, 1090 bp, Cannabis sativa
  modified_base (45)..(62): a, c, t, g, unknown or other
attttttggaaaaccgtaaaaatgtaaaaaaaacattctttgaannnnnnnnnnnnnnnnnnttacaaaaaatggtgccttatgtaattattccatgatagaactcaccattttttttttttaaatggtacccttagagcatctccaatgacggttgtccattggagtgatcttgccacacatgcaatgtggtctatttttcaaagagtaatttatgtgaagtgttgctcaatataaacaatggtcacatgatatttttttttaattttatttattaggataaaattattatttacctaaaaagtcattaattcaatgtgatgtgagatcatggtgggtaacttttagagttgtcaattattggagtatttattttaagagaataagacaaatcttatgtggatgagagagaaaataaaaaaaaatattttaggatgatatatgtattttagtaactatatgcgttgccctccattggagatggtcttagctcaattttcgacaattttttttaataaaaccaacttaaagacaattcctaacacaaatagatatagaaaatataatcaatattgtcataatacatctagatcgaattattatttagttttatatttgataaaaaaaaaaagaataattagcatttttaccccctcaacttatgacactactatattgtgccccctaaactatatgacatgttaaaaactccccttaaaatataaccattgcattattatagtccttctgttagcatctgtttgattttactgttaaaatgatatgtgtcaatcttttattggtccacaaaaaaatttattttaaaattattttaattcaatttgaacattaaatttataatttataaattaaaaataattacaataaaaccaaaaatcacaacccagaaaaaccattgcatcaccgatgcttctatatatatgaaagattcatattaaattaaagatcatctatatattcctattcaaattaaaaggttagtaattgataaaagaaaaaaaacattacaggttactgtgcagagaaaatcgtgaaagacaaataaaagtaccctaaatcagatctaatg

SEQ ID NO: 101055 - DNA, 828 bp, Cannabis sativa
ttttttttttttgagaatcaatattttggccttcgcccccaatataaaccttgggacccggatcagaccccctagctgcagcctctcgagccaaacctacccgaaccccgatcccagacttggaacccgagctaagactcaaaccctagctagcccgagaccaacacacaatgaccccccgccaccagacctagacccctccccgaacccaaccccacccctagacccgaccccagcctggaacttggacctagacctggacctctaccctggctccggacatggatccctaccctgaccccgaacttggacccctgcccttgacccaatccttgacctaacccagaaccacgaaacccatcctggacctagacttaggacccgaccccggacctaaactcagaccctcttaaataaaatcaattaatgaaataaaaataaaattttgagaacacacttttgatttttgttcttaaaataataaaaaaagtgcttatgtacacttttgtttttcaaaaataaaattttaaaaacaacaattctacttatatttttgtgagaaaaaaattataaataaaaaataaaaatattaccaaacgctaacataatttataaaatctttaaaaaaaaaaaaattaacattcctttcattcctacgaatacttatttgcataaatgaataaatctccaacttataatctacttttttgcacttattatagctagctagatcacctaaacaaaattgtaagaaaattcttgttttcacttctctatccaatttttttgtttaaaataattaggggtgcgtttggtaacaatttttta

SEQ ID NO: 101056 - DNA, 761 bp, Cannabis sativa
ttcgagtcatgttcaggttgactcctctaacctccttaataaataggttatgttcgagttgacacggctaacacgaaactgatcctttaatgacttattagtactttaataggtcataaatgagtgataagcgtgttgaatatgtgataaacctattattgattgacatgtttaaacaaaatatacttataaatgggttacacgagtcgtgtcgtgtcaacccgtttataaacgggtcatgttcgggtcaactatgtatttattatacatggatctcgacgaatataacccacgaacacaaattgctaccctaccttatagaaatttaatatatgtggtgtttgctcttgctcataacaaattgtaatgataaaagatctgcaaaagcttatatactaaaggaatatggactaagtaccaatgacaagagagggcagtgtatggactaagtaccaatcaagcccaataaaaccaacaaaacagttggtaccggcccagtcaaaccaacaaaatagtttggtaagctgaagaaaaatgggagcttctgctcatgataggctttttctacactattgatatgacactacttcatttgggaaatcttaggtagcgtttataagaaataaaaacataagaatagaaataagaaaataatatatttttctcgggcatgcttgatagtatgctatgtggagttatgtctaactcgacgatgcttaaaaatgatgatttttatgaaaaaaaattacattttcgctcaa

SEQ ID NO: 101057 - DNA, 670 bp, Cannabis sativa
taaaaattgatcccagaaaatgggtaggccccaaaagggcttgaattatttcaacattagaacgggtaccagccgttgccaatttatgaatctcattcagcccattacgaatggctttgtggaaaataaggaaaaacaaaattggagaatcatcatccgtactaatagtactcctaaactgcaaacctagtgatgatgatgatgatgaggccatatttagatggtcgaataaatataactctctcttggggtctctaggaattaaactttagtagtacatatatatatatatatatatatatgtagctctgaatattgactgtccaattctaagagtggtagtccatatatatataggagacttatgggatatatattgctatatattctatatataaagtggatgcagatgtatgtgtcctcatatttgtgaaattaataaataatattatatatattaatgtttataaggtgataataaagtgatctcatcatggctatgttccatgctgatttggtaaaacagagaaaattttaataaaatgatggacaaagaaaataagacaaaacgacaaacctatctatctatctatctataaagaataataataaaggaaatgaatagggcatataaattagctacgtacataatattagataggtggcacta

SEQ ID NO: 101058 - DNA, 710 bp, Cannabis sativa
tttttttacttttatttaaaaaaatatatataatatttattaaaattagtaaaaaaaatttataattttaaacagggattttttttttgtcctaagctaggtgagtccaaacgcaagcttaacccacttatatagagagttgggcatgagtacttaaaattaaaatgtgtgtctgtcacaacactgtcatataaaaaattaaaactaaaactattttaatgtcaaaaaaaaaaaaaaaaaactaagagtgtatcggtacacttatttgaagaggtacatattaataaaattttccatcaaatattacacaaatgaaaagttcaaaaacatatgggtgcttctgcgatgcacttctttttgggtgtaataatgtatattataattatttaagacactttctaaaattttgagaaattcaaaataatatacaatttaaatagtatagtttaaattatctattttacaagcatataaataaaagatacaagtataaaacagatcgtttgaatcttattttcagaacgctttaaattatttgaatttctaaaaaatttatagaatatgataaataaatatgagattatcatatatatatatatacctataattaaaactaatgtggaaaataagaaatagtgcatcactgaaccatagaatttcccaaaacatacgtagtcacaaatagtgaacaaaagttaacctcttatgtt

SEQ ID NO: 101059 - DNA, 753 bp, Cannabis sativa
aaacaaaatagtaacatgagttattttttgtccaaataaaattaagtaataaaacgatattaaggtgttatataacaaaactgattacataaatattttttgaatttattcgtgttataaattatcttcaagttggttatattaaaaatatatctatcgaaagttgaatttaatatagtgttttgtactattttagaaaataaaaagtcaaatttataatttaataaaataaaaaaaataataatttttacaaaatacaaaatttaaaatagcattaatgagaaacttatccaatatatgttattaaacattaaaatgtcagcataatatatatataaaaaatactatatcaatgtcggtatggtttcaaattaggaaaatatttgtagagttatgaagatgaaataagaaatgaaaagaaggataattaggtaattttgttgaaagattttattagatttagataaaagacaaagccaactaaccacttggaaaaatgaatgatgggccacttgatctaaagcttacgtgttggattcatgaattcatattttactaaattacaaagaaaaaaaaataaagaaaaaatatagttggtttttttaattgttcatacttatgttttgacttatcttttaatttaataattattataaaattatatataaaacttatattatttttgtaaatataagttagattttttgatacattacaaaatcagcataagttcagaaaatacgagtacaatta

SEQ ID NO: 101060 - DNA, 755 bp, Cannabis sativa
tggcatcttatcaaatgaccactgtagcttatgtgtttctaatttggaaaatgagcagcatttatttttttgaatgtgatttatccttttactgcttggatgaaatcaagcaatggcttgacttgaaggcttgatcaggtccctccctaagctggttcgttggattggcagggcaaggatttcaaactttaaaagaatggtgatgtctgttgccattgcagcagtagtttaccatgtttggcaagctagaaatggaagcatttggcatggaaacaaggtgaataaatgtcaaatggttgaagacatcaagggaagcttaagagcccgaattagtatggtgattccaaagaaaatacaaagtatagatagagattggttttatgctttatagttgatttgtaaagtgttggaatgatgtgagaaaagaattatagaattgtatagattgttaggcccttgtatggatgctattagtttgtaaatatgttttgagcaatacaaatcactgatttatcaaaaaaaaaattatatgagactcggtctcagtccatttagtgaagaagtcaactgctaccactgtgtacttggctcctcctcacccggtgggtaatgccccaattagatcaatcccccatatagcaaatgagtaaggcgaggtctgttgggctttgtgccctaaataaaactctatttcaatgtaatcttttccattcaattatcaataaagaaatagaattattttcattacttattta

SEQ ID NO: 101061 - DNA, 614 bp, Cannabis sativa
tgacacgtcgttttccacaagggacaaacgacatgtcgtttggctgtatcttcaacctccaactgggtcaaacccgtttccagccacgtgggtttaacggacccgacccaaacccgatcgaaaaagacaatttcgacgataaaattacgtgttttcatatctaaaaggttctaaatcaaataataaagagatccacatagattttatgcacgaaaataaaaaaaaaaatatagactttaatttcaaaaggtgttttcgggtccgaacgtgttcttcaaaatttttttccagattttgatgtttattcaaattatattcatgaacgaaatcactataaaccatgatatgtatatgataatgcaaaaacgattcaaaataaacaccaaaaatgaaaatgaaaaattttcttaatcacgacgaagaaccaaaattttatgcatatatgtatactcaaatatagtgattatatattgcttaaaaaacatgataaatagatagaataagatattctaattaatgttaataaaatcaagaaatagttgagtattatatataaatatatatagaggaaatatatacatatatatatcgtatatataaatataaatatatat

SEQ ID NO: 101062 - DNA, 844 bp, Cannabis sativa
gtggaatgtcttttccaaggtattgataaagtaaacatgtatcaaatgtattggctatacatcaaactggaccgatattgacagtggacaagatatcataaacttagttacatattttctaagttaatatcacgtagttgatcatagatcaaatgataatattagtgtagcactttaatccttaggaacgccacatgtgtacttttataaattagtttataataataaactaactgtttaataaaatatgtgatttaattaaatactttactaattaatttgaatatgaaattattttagcattataaactatttatggtttggaatctccttttaaattttttcaaaagatagctaaacaatactatatcaacatatacataagtcaaaagcgccataaacaaaatcctgacaacttagcactactagctggatgagccgatatgtatatttgtctaggaagacttttaactcatggttgtcttatcttgccattttctttacctacaccacaaagtacatgtgagtcacaaagacacaacaagaaaagtaataacacaaacatacatatcaatagacaaatataatcataaccaagtaatcacatacttaatccataagcaagtacagcaattattgatattagatatttgcctaataagacaaattgataccgttaataaaataaccatatttttcattgcctaatgagacaatcttctaaatatcgttgcctaatgagacaacctttctaataccgttacctaatgagacaactaatgtcaataccgttgtctaatgagacaactgatatacatagatatgtaacgactttaaaatagag

SEQ ID NO: 101063 - DNA, 1148 bp, Cannabis sativa
atcgtgatcatgtggcagcgatcttcaagggacttccaagcgaatacgacaccttcgtcatttccacaaacaccaaaactgaacaatacactgtcggagaaatcaaggcacttctgctggcttctgaatccagaattgaaaagtcagggaaggaaatcgactttagtgcgaatcttgttactggcgatcaagatcaacaaatggactctttaatggaggcaaatcttgcttggaggagatttagcagcagtatgggagaggaaattcatcgtttaataacaacacaggtcagtacaatcaacctatgtttagaagcttcaatcgtggagatgcttctggttctggtgttagaagtaatttctctcccaaccaagcaaatagaactggttctagttctggtatgaacttgagtaacagggtacagtgtcaaatttgcttgcgtttttgacacacagctcatgactgcttctaccgttttgacaagtccttctcatcaacacaatctggatccagtaatcagggtactgcatctcagaaaccacaagcaaatctgaccacaaacagcagctccactgatcctaattggtatccagattcgggagcaacaaatcattgcactcctcaagctcaaaacttggttgtttgctatgattatgaaggacaagaccaaatgtatgtgggagatggtacaggtttgtcaataaagcatattggtcattctttttttactccacaacatgcatctcactctcttgttcttaataacttgcttcatgtccctgaaattacaaaaaatctcattagtgtttccaagtttgctaaaaacaataatgtgttttttgaatttcatgatgatttttgctatgttaaggacaaagtgagcaatactatcttgctgatgggaatccacaagaatggcctatatacttttgataagactcatcttggacctgttcactcaaccccctcctccaaaatcaatttccaatcattgcagcagccaagtcagtctcacaccagcagcccctcagtaaaaaccatcactctatttcagcccgattctaagtgtacctttgttgctacacttaatgactctactgttacagtgtctagttgttataggcgtaacacaaatgtacaaaacaatt

SEQ ID NO: 101064 - DNA, 620 bp, Cannabis sativa
tttctgtctttaaataaaaaaaaaattgtgaacgattctgtcaattgaactttcttaaaaattcttgttatttttcttgttatgtttcattattttcttaggcactatttttttttcctctctagtgttgattggtttttatgtatctctatgtgctctcttgttcgttctttgcacattattttggggggcatattttgaaaaaattaaagaaaaaggggggcataattttcgattctctaacaatatttttcttttatttattggaaacatgttttaattgcattctatctattgtgtttcctttatttttggagatttggtcttatttttgtggtgctttaggaaacttgtttttaattatttaattattttgcggtttcttttttggtggcaattttggttttggcagggcgtttaattcttagattttgtggggatattttgtttactttttccatttaaggaaaccttgaccaatttttgaaaaatcttttttgtttccctctttcctctccacacgtggtgtctaaggtaaggaagttactttccttttttgttttattttttctgattttgggtaattaaaatcaaagtgttatatattctcaactacccac

SEQ ID NO: 101065 - DNA, 1001 bp, Cannabis sativa
  modified_base (52)..(67): a, c, t, g, unknown or other
gtttattttcatcattttagaaattcatattaggatgttaaaaacatacttnnnnnnnnnnnnnnnncctagtaaaatatattccaacaataacccctcttgacgaattaccagataaggtctggctgcctaccgctttgaccacaggtggaacctgtgaccggggattggacggctgaccgttcagagtttgggaagcgttttgtccctgtcacccccatgttatttaggatgcgcgtaataatgcttatccactgctcaaccttgatgacatcggtacctcccaaaaatgttggaggttataacttgacaaaacgttcaaacactaaatctcgatgtggcagaataaatcatgggttactcgccactttaacaggagctggttgtaacacttgttgtactcgagctaaccggtgccggttgtaacacttgttgtactcgagcttcgcatttctaggaacatttgttgccaatcggcaggtggattagcattactaacccttgcattatccccccgattctgcagaggtgcaggtggtcccggtggattgatttggtcattacccgactctacgtgctcgccctgtggtctagaaaatttagtagggtccattctttttcaaatagtcctaaaaccaacaaccccagcgaatcaggcaccaagtccacacttacgcacttattgccttaaccctaacttaaacccactatttctctttcacaataaacatttatcaatttaaacactaatcatgctattcatataacattcatttctacttgctcatatactgcctaaaatggaaagcgataaacaattaattacataaccagttaagcatttactctcaacacttactgcactacgagtcgagcttatctttgacaatgattgtacatgttcagccagtctataagaagtttaaacaccttgcgctctgataccaaattgtaataccctaacaattaggcacgctacgattttgttgggttttatgccc

SEQ ID NO: 101066 - DNA, 576 bp, Cannabis sativa
acagactgatttaccctttcttgcacagtagagcacccgtgagccaagtccagtaaaacaacataaatatcaataaacgcaataaacactccacatatataatattgccatttcccttattgtctatttgatatagacctgcgtgttacgctaacacgcctatttatgtctatgtggcatagacccatgtgttacgctcacacgtctaattacaataaggccttagaacggttcatctcgattctaattactaagtccaaccaaattatgccttgaacgcataatcctttaaatcaacatatacaaatcatagcatagcatttcaaaatcatataagcaccaaggtaataatctaaggccatataaccgctcatattagggtaataaccctaatcctggtttctaattattgacaactataatatcaatcatgagcaccaccgcgcttatctctagtgctaactactgccttacctgatgtcttgaaaatatggagattctaaatctccaggtgctcctgaccaagtgctggtaattctagtcacaattttagggattcacaaatagggttaatcc

SEQ ID NO: 101067 - DNA, 622 bp, Cannabis sativa
gttaaacggtctgctaacagagtcgcgcactgcatggcacgtggtgcttgttattggtcaggtcgtctcttttctgagagtgatattccccttgctcttcaagcctatgtattagcagatgtttctgtctaataaaaatgattttcattcaaaacaataataatataactaataaataaatttattataaagtataattaattaaattaatgcctaattcaaatttagattaaaatttataaaaaaaataattatttaatttcatcgatatttttaaattaaatttaagtatttaaaattatttcttttcaaataaataaataattaattaattaatttaacaaaattattttaacgaaacaaaatgttaaactaataatttttattaaataactacattaattattataattaataaagatatatgcaatgtaatactgtatatatatatagaagatgatcatatactatcatatgtaaatatatagataaacttgaaatggtctaattatcattaataggtttgagcttcgtgtgtgaacctttgttttgtcattgaacatgtatttttatatataaaaataaaaattataaagaccatatatataaatataaatatata

SEQ ID NO: 101068 - DNA, 542 bp, Cannabis sativa
tctattagccataaatggagggatcacgtcagatttgacttcaaatattatatatgcttacttaaaaaatctagagtatgcgaagaaaaatccgactgcattgacatggccaccaaaaaataagaatatcacaaaaaaaacaatggaaaaaatttgtagcttcccaaaataatcctgaattcaaagtaagttttattttaatatttcaatttatatatcataagtataattgcaatgataattatttttgtttcaattatttaggcattgcgaaaggcccaacaagagagacgttctaagcaagaatatgttcatcgaacaattcagacttcaatagcgcaaatagggacaagatacaaaaagagcgtcgtacatctaagcccgttgaccgagctgaactttggaagcgatcttggatgaattctaaaggggaataccaaaaaaattggtgaaaagattgtaagtaattatattaactaattaactaaaatatatttaatcttttgataatcatccaaactaaagtaatcatgtttatttgt

SEQ ID NO: 101069 - DNA, 750 bp, Cannabis sativa
gttggagatccttaaactcctttggaagccctttgaaaaaaaaaataagatttccatgtcagttgtttgagctgaaattattcattcctgcaaggtgcaatttttcataattttcttaaaaatatctattttgaactgaattacattgatattcagctggtcaaagtcgaggagaactgagttaaaagcaaatattcctcatgtgagaagaacgtgtagaaaacctaaagaatatgattgacacacaaccaaattcatatttacaacgcttacagtgccaaagcctaaggatttagacaaggctcatggtggaaaagttttgtccactcagttgctcactgcgactattgaaagtgaggacccaagagatggaacctttgaactaatacctcttgtctttagttctattactcaacaccaagttgaacttatcaaagatgagtattcagtacctaatcttattgtcaaaagatacagaattggatgtccttgtggttcttgaaatccttgttgtagtgcttggtcaaggtttcatatgaatgcaggtgcattttgtcctctacaaccatggctttttaattacttattactttgaggtcctcccatatcatataaatttgaatgggtaccaaattttgtcaacattattcatcttttatcatttgtgggactggccatttccagctccccattagataacatttttctatgatgtaaaaagaagttccactcgtactgaatacttttata

SEQ ID NO: 101070 - DNA, 1037 bp, Cannabis sativa
gcaacgagctgcacagtatgtttgaaaatcacgtaatacgcctaaattagttagggtgttacaactagtttggagtagtatctttttagttaagaattatttcaacccgaaaacataaattattgatttgtgataatgaatgttattcttgatttctctcatattaaattgtttttatttttctatttgaatgctatgaatattgtgaattcttgttaggagtataactaatttttttctttttgaaatggagtacaactaattaaggttttgcattgttctattatcatcttaaaattacttcttacctaatagtttagattctaagtagagtaataatttgcaattaatagtattgtcaaaggtattattgattgtgatgaaaaataaaacctaagttaaatgaattatatgcttcattgatttgttacctaaattaacttatctccatataaattaatattttttctaaatcaaatagattgcatgcttcatggatctattgcttggtaaaaaaaattaattattgagtgtttcgccttaattacttgaaatagggagattttaaaaattgattgtgtcagcattttctgcagggttaatagtataattgagaaattgaaataatttttattattattgatcttgaatgattgttaagagtggagattaattcttatctatttcttagtagggtaatatatatctttacttactttctagattatttttttttatctttataattaaacccctccacttttcatttttgttactattttttgaataataaattgataatagtcctcgtgagatcgacgtcattgtcggagactattttattcaatttcttattcttcattttttgtactaatttgttcttctagttgtggtttcaaattttaggtcttgtactgaaaatatggtgatgtacaatcaacagtgttgacctcgcttttagccaacgacagtgagtctaatttagtaagcgataagtagtttgtaacgattggaatataataaagcaatataaagac

SEQ ID NO: 101071 - DNA, 798 bp, Cannabis sativa
cccctaaactgggattactagaaaggtaagctcgggaaagaattaaactttatttacaataggatgaaaattaaacttgtaataatttttaactttacaaacaatcaaaactatacatgcttaagaatcccaaaaatattttcacaaaatattataagtctattttacgtgacgacctaagcgccaaaatcatgatgacaaaatacgtcactcgtagaccccaatcggtttggtctagtatggcccaaacatgtacaagcatccccaagccctcgcactcatggttgatcagtgacagatttaccctttcctgcataatagagcacccgtgagccaagcccagcaagacagtatacatatcaataatcacaattataaatatcacatacattataatcatgccattacacttactgtctatttagcatagacctgcgtgttacgctcacatgcctatttatgtttatgtggcatagacccacgtgttacgctcacacgtcaaaatacaataaggccttagaacggttcatctcggttctaattatcgagtccaaccaaattatgccttgaacgcataattcttaatctcaattatatatagcatggcatagcatttaaactttaacaattactagggtaataaccctaggccattaaaccgctcactttagggtaataaccctaatctcaatttctaattaatcacaaatgtaatattcaacataagcgccaccgcgcatatctctacatgcaactattgtcttaccgatgtcccacaaatgtggagattccaaatcc

SEQ ID NO: 101072 - DNA, 661 bp, Cannabis sativa
taaactgacgcgaataagcaaaaatttaaaaaaattcgttacattttgcgtcgtttattaatagtcaattattgtgttagcgaccttttaaaaatgacgcaaaatacagtagtgagagttaataaccgacgcaacaaaaaagtgaaatccctaaaactaaacctaaacacaatatattgttcatcatttcacgacctaagccaaagactccatagtcgatctaaacgtgaaagactccacaatcgacctaaacgcactgccgccctcaacccttatagtcgagctctcagtcgctagcagtggcgtttctcgtctcctctcgcctccggttttaaaaggaagctaatcgatctcccagtcgcagcagtggagtttctcttctcctcctccagcctccggtggtctctcctgttgctgctggtggtctgtggtctctcttcagacaacggcgaggagatatatcagatgcaaaggtctaaaggtttgcttaccatctccaatctccttcccccatctctctttataactccattaatgagtttcacaatggatatcctttcttcttcaatgctcactaaccaaagtcttatgactcgtccttcatgtccggtcaacttgtctagtagtgggtcggtctctgttcttgggttctctttaccca

SEQ ID NO: 101073 - DNA, 1004 bp, Cannabis sativa
aaagctttacatcatatatagtactagttgatgagggttataaacaaaaaaaatgaaagtcaattgtatttggggataactccaattacaataaattgcaagtagatctagtatgagttggcgatcagaccggatatggatagaacttatagcggggtctcaaaaactgagtaattctgctgggccattatcctttttttaggttcattaggatttttattggttggaacctctagttatcttggtaagaggtccattcccttgactcgtaacgatgagaatttgactctacgagaaattgaacagaaagccgctgaattggcctttttcttgcgtctaccaattgaagtgttttgaaaaaagtgaagaattttgtagcaaaagggaaaaaaggatagcgccagacgaactatgcttagaacaacaaaaaaaagtaaacgtacatggaataatcctaaaacgaaatagtttttgtccatctatccttttttgttaatcaacgttttttatcttttttgtactctttataataacaacttttctgtcttgttttgacactcattttttatcatcacagtattcttcaaaaatttctctcaattattataatcaacacgctcatttgtactctttataataacaacttttctgtcttgttttgacaccggcgatgttttttttcaacattttttgacattttgagaaaataaaattgagaattctttcgtctcgaaattcaaatctatttattatttaatagatattatttgcaaaaatggctctttcgtgcctttatcgaaaggcttcaatttgattatatatttggaaacaatattctatataagagtctattttatttcttcattcaattcaatttgaaggcaactctttcttattctagttctgtttttctatagtatgtttatgtattctttctaaatttaaggaacaacctatggaccgaatcagaaataaaaaaccgggaatagagttatgggctcgat

SEQ ID NO: 101074 - DNA, 780 bp, Cannabis sativa
accccgggaaagccaatgttgtggcagatgcactgagtagaagaggtccctagcaggttttcaccactgtaatgatatatcctcaactagcctcagagatggttaaagctgtgatagaatttgtaattgaaaagttgcataacctaacacttcaatctgatttactagagagaatcagaaaggcacagttggaagattctgagctaatcaaaatttgagatgaggtgatggctgatcggcctaaggacttttcaatctcgaataataaaatattactgtataaagctcaggtttgtgttcctaatgttagtgagcttaagagagaaatcctcgatgaagcccacaccacaccttattcattgcatccgggaaccaccaagatgtatcaggatttaaaaccctacatttggcggtatgggatgaagagagatgtggtagagtacgtgtctaaatgtttaacttgctagcaaatcaaagctgaacattagaggccagcatggttattgcaactattagcccttcctgaatggaaatgggaagacattgcgatggatttcgtggttggtttgcctagaaccacgggaatgtatgactcggtatgggtcatagtggaccaattcacaaagtcagctcataaactgccaataaagattacttatacagtggatcaatacgctgcattgtgtgtaaaggagatagtttgtctccatggagctcctaaatctattgttttagacagagatccaaagtttacatcaaaattttgggtgagtcttcaaa

SEQ ID NO: 101075 - DNA, 824 bp, Cannabis sativa
gttgcgaatagtcgtctcagactcgaaggcgcttggtatagagatgcttcatgtaaacaatcttccaagaaactgtctctttgtagcaacccaatcatcgtcattgcctcgcgatacgttgggccaaaactttgttcactgtccttagatcttcgaatgacaatgaccctcttacatggttcaacaatatgcgtagataatatctctcacccttaaatggatttgttgttacaatacgtcctatgactgttttttttagtagaccatatcttgtgttgttggttccaaacataactttctgggatttgtttgtatagtaatgagtttgcatttttatcagatcgattttttaaaatgttagccttgattttttaaaatgttctgaagtggaaatgtttgatgggtcttgatctactctgaaagttactgggtgttgatgctcgaggtgcagatgcaaactataaactgacgggtacatctcattaacaacaaacccatatattctccacatagcttcaggtgctgcaatccatctggccgtttggagctggcggatttcatctacttcgtcatttccttgtttagatactaagttgaaagcaacacgatcatgacccttataaatgtacttgtagagatacttgacagcctttactgtagagcaaatttcaacattaatgtgacagtcaaaggttgcaagaaaatacgggttgtatgggatgacccaatgattgtctaagtgtgtgcctctcaccttcacatgcgttccattgtttcagcgtctatatattgggtagcaatcatttccaacagatgtaaaaggt

SEQ ID NO: 101076 - DNA, 565 bp, Cannabis sativa
ataaatgcacattttgttattggttttccattgaaatttaatgtgtaagagtgcatttgtttgcacttaataatggaacaaatttaatttggttggatcacaataatagaagagattcatgttttttaacacctgaattatttatttttagaataataattcacataattttttatttctcttttttttttttaaaaaaaaaaaatgagaaagttttaatgaggcactctctctttaacctataatattaatcatttctcctctcaatcattctctcttagaactctatcgtgaaactaagagcaaattagattaagatcaaattaattatatattttttttttttaaaaaaaaagacaaaacaaatcatatttctccgacatcagtctgtacaaccatcgccattaccactagaggtgtacgtcggtcggtttgatcggtttatgttatattttatttaactaaatgtaaagattgggttacaaaaatctaggtgcaactcgttcaattaagaaaaaaaaaaataataacccgcccaataaaatttatcgatttggtcgggtta

SEQ ID NO: 101077 - DNA, 1090 bp, Cannabis sativa
tctacctatgatgatacagagactaggtcatgaaacaacgatatgcacaaatcatgatcaatatggctctcattagtataaccaaagcaagaaaataataagaatagcaaaagaacatattccttttttattttatagaaaaattcggcaacataacgactgtattttgaataaacccaaaactcataacctgcattaatatttgtacacaaaaatatatttggcactctgtgtcccagaacagtccagaaaaatatacagattaagttttcaatttttcaaacaatttgcaaatcatacaaatttagattatgtctaatgttatgcaacacatataaaattcaagtccaataattaagttgagtccctacctatcccaagtcgttaaagtttggtccaaaagatgatcttagctctcaagtcccgagctccatttatttagtctaatcttagatgttactcttacctataccatcaaatggctaaataattatcatcattgcattctacattaaaaatcgagtccaacgacatataatatgactatatttaaaatttagagttctgaagcctcacctaaacagtgcacattaactatcggtggcgataaaaattggtgaaccgaaaacatcaccgaaaataggggtattgtatatcaaaatgattacctcaacgagtagataatatccacactaaccgtttgtcaaaacagtacacgatgtcgccgaaaagtagctgaaaaggggcggagctacaaaaatatcattgaaaaaagtagcgagttaggcaaaatagcttagtgtaggttgttctcctcgacaagctgaatctagtggtgaagacagttcgtcaaacagacaccggaggtggccgaaaaattcgtgcaaagtttgaattgccaaactttgacttgcgatcccgaactaacgacggcgaaagaagtagcgtcgttttgggggtgaagtcgctggcacttgggcttttgattggtctgggaagtggggccagacggtggttggagatgggtcgtcggagagtggtggtgatggtggttatggcttctttgaagcttgaagagagagagagagag

SEQ ID NO: 101078 - DNA, 877 bp, Cannabis sativa
gctgatattatggttgataatactatactacttgacagtatcacatcggtacggctagagtacgactagcgtaccgagtataggcatgtattatggtcaatagtactgtcgtacgaacgttctagactcagcatcgcgttggacacagggatagggttatgattgggggtaagggcgtctgatcataatttgggttattgctatgttattgtttatgcttttcttactgagtttgttgactcacaattgttatttccatgtgtaggtaagggcaaggctaaggctgagcagccgtgagagcgagcaaatggagattgtacatgtcggggtggttagacctggagcgtatgatctttgggacatcagggtttattctgtatagtcactaggcgatagacttttgtatttgtacagtgaaacttttgtaaatgcttttgtaaacgagatcccaaaattttatatgtatgctattatatgtttttaattaaataagtaacattttaattaataacgattttcgataacctcgttgattagcaacgagctgcacaataaattaaaaatcacgctaacatgcctaacttagttaaggtgttacatttaacgtcatttttagtgtttgttaatacctttaggatggaactatgcttatttttctatgttttcaggttcctgtgatttttaatgtcaattgcatcaagattcaaaaggttcaaggcaagctcaatgagaaataaaaacactcaaattgatatattctcatcgcaacgaccatgacttatggttgcggcgagattaaggcagaacagggctactttaggatttcacagtggccacgatgaagaagcttagggctacgaataggacttctcaccac

SEQ ID NO: 101079 - DNA, 742 bp, Cannabis sativa
acaatccttaatattttgaagcactccgcgaggtctaaggtacagattacactccttcgggcacgtctcttgtcttttagaatccaagggtctcctcttctatctctttgctgggtaatttgtgttgacatttaaatgatggtagataatgtttgggtcaattcttatcatatctccatggttccaggtgaactgatcctggtttgcccttgaaaaacttattagcttctatttcaattgttcatctaggttcttcccaatgtaaacaaactttgtaagatttcctaggtccagaacaatttcttccaattcttcaattggtttcagtaagcttctttcacctaaaatctgaggatcaagatctttgcccttcttcttgctttcttctatcaagaccgccatcggcaggcgatcgactattctgtactatagctctatacgatagtatttgcgagccaccatctgattacatcgcactactcccacacccactagtttctgaaacttcaggggtaagtgcttgatcgaactaattgcccctagttcgattaatgctggaggaccactgggtcaacgtgatagtatctcatgttctcttcatcttccttcggcaatataatcggaggctctttattttcttcacgtacctcttttgggcgttattattcctctcctgcaatatgtggtattcttgagataaccagggtatcctctccttcaacaggaggaggttgtaatcctt

SEQ ID NO: 101080 - DNA, 723 bp, Cannabis sativa
aaaaatatagatagtgttgtattgtgccaatatttctaaagaataggcttggtattttcgtatcgtactcgaattcgtgtcatattttcctcgtgccggtctgtatttcttatacaggccagcctattttcatatatggacttaaattcgtgctttacttttttatatatattttttagaattaagaacttatatatatatatttcaaaattttagttatatttatataacttttgagcaatattttaccataatcatacaaaaaattattaatattattaaaatttaaatatttacttataaatactcaaattttataacactctataaataaattactatataatcttaatttttcatatttaattataaaattataatattcagtatatatttaagttttattattatttaacatatttatataattgataaatttatgcattattattattattattattaataacaaagtataagattttttaatatatcgtgtcgtctttttttaggtttgtcgtgtgtcgtgtttttcagactaatctatttgtgcttacgtgtcgtgcctttcgcgtttctcgtattgtgtcgtgcttaattaaggatacatattttttgtgccgtgttcaaatccatatttataacaagtgatggtggaatcttcgggtatataaatatatatatattatacgtatagcctatatatataatgagagatctggt

SEQ ID NO: 101081 - DNA, 1810 bp, Cannabis sativa
actactaatcttattattctttgaaaagaaacaacagcattattgtcacaatagattagcataggtgtggaaatagaatcaaacactcgtatctctgaaataaaaattttcagtgacaaagcttgcaaagatgtcccataacatgggacaaactcagcatacatagtagatgatgtgatcaaagtgtgcttaacactcttccaataaatagcagcaccagccaaggtgaaaatatagctagaagttgactttaaatcatcaacacaaccaccaaaatctgaatctgaataaccaacaattcgaagattgtcgacatgcttatacacaagcataaaaatcttcgttctttgcaaatatctcaaaactttcttggttgcaacccaatgatcatggccaggatcagataaatatcttccaagaacattgactacgaaagttatgttaggtccagtgcaaacctatgcatacatcaaactccctactacacttgcatatgggatgtttttcattgcttatctttccaagtcgttcttaggacattgttgattagtgaacttgtccccttttagaatatgaacagaaccagccttacataaattcatgttgaaccttttgagcacacgattaatgtaagcttcttgagataagccaagaacttttcgattcctgtcacgatggatctcaatccccaaaacataagatgcctctccaagatctttcatatcaaagttggaagacagaaaatttttggtctcatttagtaatgacaaatcactgctggcaagtaaaatgttgtctacataaagaacaagaaattcatataaatacactagtcaaacttattctcgacgaaaccaaatgatgtcacaaccttatcaaacttcaagtagcactggcgagatgcatgtttaagaacataaatggatcgttttaacttgcaaaccaaattttcttttccattctccttgtagccttcaagttgagacatataaacttcctcattcaattctccattcagaaaagaaattttaacattcatttgatgcaaatctaaattaaaatgcacaattaaggccataataattctaaatgaatcttcggtggaaacaggcgagaaaattttagtgtaatcaataccttctctttgagtaaagtctttagccactaaacgcgctttaaacctttcaatctgtcctttttttcccttttagttttcaaaatctacttacaacctattagtttaaaaccaccaggtaataaaactagctcccatacaccatttttcttcatggagctaatctcatcatccgtaggtgctaaccgttttgaagattgtggactattaagtgtttcactataagtgacaggatccacaaaatgaccaatatcatattctccttctctaaggtaaacaaaattatcatgtcactttgttgacttctcttgtctctgagatcttcttagcggagttacttctggaataacttctatttgttgatcattgttttgaataacatcttccacaactggaatttcttcgataatagatacctcatcaacaaaaagagcttcttcaataataggcctctcgtcaataataggcccttcattaataatataggaccctcatcatcttcgatacgacgagagcaatatattcatcagcaatgggagcattaccaactggagtaagattaagactaccactatcatctctttaaaaggacataggaataaaaattcctttagatgactctcccatttcaagagatgttgaaggaatattttcaacaacatcaaattccagaaa

SEQ ID NO: 101082 - DNA, 660 bp, Cannabis sativa
ggacaaatgctatttcctccatgggtttccaccaggttatggtgacaaaaagaggtctgaaaaaagcaaggctactgccaacatagccactgccagttccaaaccagaaaataccagcagcaccactccagttgacctttcttctcaatgtcagcagctcatctccttactcagccaacaattgagccaaggaccaactaaggatgaccccaatactgttcttgcgacttctaacatggctagtaatctctccttacatcaaaatttgtcatggattattgatagtggagtcacacatcacatgtgctccaccaagtcttgtttttctaactttactaatgatgtttttcaatttcaagtgcttcttcctaatggcactaacatccctatccatggcataggtattgttaaaattaacaaacacttgattattcacaaagtgttatacgtacctacattccacatcaatttgttttccattcctactttccttcacaaccccactaacatggtatatttcaaccatgattcttgcttttaacaggctcattctccgagtgtggtgattgggacagctagaagatttggggaactctaagtcatcctccaagattcatctctactagctagttctaatagttctttactttgtaccaataa

SEQ ID NO: 101083 - DNA, 615 bp, Cannabis sativa
cccccgatcaggggaaaccgcgataagagggacccgaaaaaattctgtaagtatcatgaagatattggtcacactactttggagtgttgggttttgcaggacgagattgaagagctgatcaggagggggaagttcagcaaatataaaaggaacgaggaaagtcatccgcgggcggatgacaaggaggaaaatcaaaacgcgagcggctcgagaacgcctcgcaatatattgaccatcatatgcgggcctcatatcataggtgactccagaaagtcgcaggagcgatatgcaaaggaagccaaggagaagcctctcaccaacgtgaacaatctcagtgagcgaccagcgaagttgttcaaaagagaatgcgatgacatcacgttcatggaaagtgatgtgagatgggtccatcacccgcattctgacgcattggtcattgtcgccaatattggcagagataacgtccactgtatactcgtgtataacggaagttcagtgaatcacttgaacttccaaccctttaaacaaatggggttggatgagaaggatctgcgacctgttacgtttattatatacagttttaccagcgacgtcattgttggaatttattttacc

SEQ ID NO: 101084 - DNA, 803 bp, Cannabis sativa
  modified_base (405)..(418): a, c, t, g, unknown or other
aaaattacttttttagaaaataaaaatacaagtttgattcaaataatgacatgattatgaattaactagtgaattggcccgctctttgtgcagtcttaaaagagaattgctaaaaaatattagtggtacctagcacactcctcggtatcagattgctattagtgtaattaaatatcggatctcatattaagaaatatcgctaactaattatgggatgctacctataaaagttgttgggcaccactggtatctaataataatgctcatcttaaaatatattataattaataaatatttttgttaaaaattatagattagctaataaatttattttaatttaggaaaattaccttatatactattttttttaaccttttttttctttcaaatttacggtttgggttnnnnnnnnnnnnnnagcgctagttgcaataggaattttctatgtagaatttcgtaaaaatgtaaaaaaaaaaaaaccctgttttgaaatgtaaaaataaaaataataataaaaaaaaaccttttaattgaagcctaaaacactttttaatttaaaataataataacacacttcttttgtatttatttattgagtattttcatcactactaatttatcatacttaacaaaattttaggtgtgtaaaagttatatttttgtttttaaaaattaaaaaatgggtttgataactatttttttttttttctaaaatgtttttttaattaaaataaataaatacccttggtaactattgactggatttttagccaactgacgcggagtcgtaataaatgagattt

SEQ ID NO: 101085 - DNA, 611 bp, Cannabis sativa
ccttattgacagctcacacacggtatgtataagaccacagctcactagacaattccctaaaatagatcttcaatcagcccaaaaaaatttatttctgtacctacaaaattgtgagtagtaagtgcgacttttcttttatagaaaaggaaagttttgtttagattttctcctcaagaaatctgatcaaacataatagaaaactcacacaagatcagattaacacagctggatagatagaaaagggatgagtcaccaaacttaacatttttaccttattttccataaatagaaaagctagacaaatttcctttcaaaaataaattaattaatataaaagttaaatacaaaaaatatagaaaccaatttaaataccccagccaaatttaaacaataaattataaaatatttttgtcacaataaagatgccaaaaatggaattaacaaccttccaccatgtgaattgtaggaggaacctcttgagtaggtctccttggagcaagattaacttgttgatgtatctccatagcaccaggggctctcggtgatcattacctattccttgattaccccagtgacctgagaaatccacctgaggccatgatccataagat

SEQ ID NO: 101086 - DNA, 556 bp, Cannabis sativa
tgatattaaatcgaactgttcttaatgatttagtttgaaaaatatattggtttagtattcaaaaaaattattatattagtttacactcttaaaaattataactattcatatatcaaaaacataccaaaaaaaaaaataaatatacattggtctaattttcagaaagtacattggtacactaattttttgaaaaagaacctaatatttctaatttatatcaaatcaaaataacttatcattatatttttttttcttttttaaatggcaaaataaattaatattaggttgccaatatagaatgaaatactatatagaatatttttcttttgttctttgtaaaccgaccattccaaggagttttacctatatttaagctccaagcctccaaccccacaaatatatttattcatttcagttttcccctctacttttttttttttttttggtacaatacaggtaattgttaatctttttttttttcgttatacatccatagatctattaggtttttcaaatcggagaattgtagggattcgtaaatcatcaatcaatatat

SEQ ID NO: 101087 - DNA, 942 bp, Cannabis sativa
  modified_base (390)..(395): a, c, t, g, unknown or other
aaataggagttgcaaatcctttaatttgatgatcacttgaatagtaaatttacttctttttttttttcctttaaattagtaaaagatcttactaattgtttatgaatgataactattgaaaatatagctgttggagacttgatttattcatttataaagtgtataaatgaatcaaaatcaagtgaaagtgatttgaaacattttggaaaagaatcggtcaaagttgataaaatagtaactagtaactacttactttttttaacatacaagtgcatacgttttttaaagtatgggagtctttttaacaacccaaaactcatccaaatcacccaattaataccgtaaacgagcaatttatgattggaaacatccaagggctttatggtggtnnnnnntgttcatatgagagtgaaaactctataaatagatgtcatattgctcacttgtgagagatgtagttgaaatcatttgttgtggttagaaccttgtgatgatatgttcatccttagacactaggatgagcatataaggcttgataaatccttaagagcatttctagagttttcctaagtgtccatatgatggaggaaatgacttttaggacaaaggcccttgggtcttggtcaagcttattgcgtgctattcttctttttctctagctttcttgtaatcttgatgtaatatttttatttgtaatttgagtattttgattgtaatcctcttattccctcttgtaatgagaacattttccaacaatctaaaagtcattttgatggcatattcttctttctaaaagacttgtcatggaggtcatacaatcaaacaaagttatccatgagggagagcatcaattaggatcatgagaaaaaaaacatgtggtaagagattcaagccatccatgggtaagcatggtagatttattttgtgatatactatttattt

SEQ ID NO: 101088 - DNA, 609 bp, Cannabis sativa
ttttatttcacaatttagacatttatatttgattcgacttataagatactctaggaagtatttccactgtactcgctttttctttaatgcgtttaagtagttattggtctactttgtatgtgcgcgaacagttataatctctgtatagtctcaattcgtgagcatttttcatctgctttattttatatgagcagtttcagtctgtcttgttatacacgagtagtttataatctaccagacattgtatgaacagttttaatctaccgtacataaaaaaaatttagagcaaacttaaaaatactatgaataatttactttaggaactattttgtatattttttgattgctcatatgaatagttaggtcttctattcttattttagcttaagtattattttttcaaggcatttttatgcctcgtttatagtacatgccagaataatgcgagatgttaagtattcagcttcacatgtagcttttttttgttttatgagttgatatcatacacaactgctacttttaactttttttttccttcttttctagaggaaaagtttttcaattctatgactttataatatccacagaaaattttaatcaattatcttt

SEQ ID NO: 101089 - DNA, 783 bp, Cannabis sativa
tcgtaaagacatattttaaaaaataaatttgtcgttatatatttaatattaaaaaataaaataaaaataaacaaaaatcattattacccacattccttaaaaaatagaagtattttttttcttatctatcaagctctctattttatatatttaataaaataaataaatataaagaaatgacgtatcttactattaattcttgctatttattagtaaacataagtttcatattaataatcgatttcggctacaatttaatgtaaagcttttttctgtgaactttataaaaatatagttgataaaatattacatgtaaagaatgatactaaattgagggccaaacatttttttaatagagattaaaaagctatccggtatttgataccttaatccatggaacttataataaaaatacatgtaaagcttgcatatttttttttcatatgaaaagagaaaaagaatgaaagtgatgtgatgagtccacatacaaaactgatcaatattccttatataaacatataaatataaattatacatatagatatatcaatatatatgtaatatagtgctccaactccaatattgattacttaaaattctatataataaactaattaacagctaattaagccattttaatatatatatatatagcacgtagccaggccaaaagttttttcttcataaaataattcactaaatatatattttacattaatattgaaaccatataaaaaccatgagagcttaaaggaatttagacgttggtgccttcattttttt

SEQ ID NO: 101090 - DNA, 533 bp, Cannabis sativa
gaggcccggcagagggaggcttaggcggagcgaaggcatcaggaggcgctgaaggctaaggctgaggagttgaaggcccgggatgaggtcgtggctagggtgaggcgcgagcttagggaggccaaggaggcagtggaagatctgactgccaaggtgaagtccctgaaggagttgcaccagactgacttgcagacgactggcaacctaaccgttgaagtgaaggagcttcgtaacttcaaggctcaggctgaaaagaaagcaaaaagagatgagctcctggcccccgttacttttcagcactgcaccaaacgctttgatgatggcgtctttatggcctggcagactaacggtcaaaaccttaagctcgacttctatccaaagcctgaggaggttctcgtccgcttttgggagaagaagaagagacttgacgccctgttggaggagcatagggggcctcgtcttccaccctgaaatgattaagccagccgtttattaccattgtcattatcattatctctcttttttttttcttt

SEQ ID NO: 101091 - DNA, 1086 bp, Cannabis sativa
  modified_base (393)..(398): a, c, t, g, unknown or other
agtacataacaatttagtgagggtgtacttatcaaaaaaagtacataacaatttagtgagggtatacttaaatttttgtaaactgctcaaattaaacaactcacacagattaaactgagataattcaataaaaaatataaactgaaaaactcaataaaaatataactcacttaatctttatactagacgagttgaaaataatattaaactgcacaatcaattcgaactaatccgactaatatgattaagaggatttttttatatatatttatatattttatatatatttatgtattatataatttatataattatttaaaaaattataaaattgaagctaatatatttttttatagttgttgatttgaactttgaatttaatctatatatttnnnnnnttattacaattaactaaaatataacaattacatgtaaaaataaaaataaatattagtggtcggtttggacgggttaatccgaccaaacccactagttttattaggcgaattactattttatttttttaattgggcgaattgcacttaaatttttgttacccgattatattagattgaataaaatataatataaatcgatcaaatcaactgacgtaaactcttacaatttagtagataaatacttattagttattatgccgtgtattttatttttagaaaaattatatataaaaggaacgtctcaacccaaaagtttatagttttttttttttgttagaaaaacatttaaaaaattatttgaaatttatttttatttttttaaaataaaagacttattttgtaaattttatccacaatcccttagcaagggaaaaatttatattttaatcagacaccatgcttaagtgaaaaacttacaaagctaaaatgtaaacgagtactgaaaagatgtaaatcatgcaaaaattctcagctaattttgattctaaacgttaagaatgccttttataatatttaataattttttttttattttttaattacaaaaaaataaaaatattttcaaaagttctataaaactcttttcttttttaatttttgatataagaatcaaaatttaaaaaaaaaa

SEQ ID NO: 101092 - DNA, 604 bp, Cannabis sativa
  modified_base (406)..(409): a, c, t, g, unknown or other
aaatgaattagtgaagcgcttcttttatatggaaggaggtcctattaaattataaaatattacaaaaaatatataaaaaaaaaatacttctgggttaatcttgtctacttataatgatctaatggtaaaaatgactttggatgacgatcatcaatttttggagctgttggagaagacacttttatgagaagacacttgaaactaacctaggttgacaaaatatcaacctaggcactggccccaagcaccaggtcaacatgggtgttgggtcctaattttgcccattacatgcatccgattttcgaaaacactcgacctctattattgataaaaattgagaatattctcaaaagactttgttaactcaaacttttaggtcttcttgttttgatgattaacaaatatnnnnttattatttgttactaatgatttgttgattttgtagcaaaattaaaagataaaataaatttttccaagataaattagtatttttaccaaacttctcaaagtgacccaaaataaattcaacaagcatatcaactatttcatacttgattagagcagaagcttcatcaagaggtcctaaatggatatttaaaagaaa

SEQ ID NO: 101093 - DNA, 630 bp, Cannabis sativa
tttaatatgtgtataatattttttattttttgaataatgtgaatttattttaattaattttttattttttaaaaatatttatttaaaaaagaattattagtttggcctatactatatttacatgtggtactttattgatcaactaatagaatattaaattgggtgttaagtttaaaattttaaggatatcaataggaactagaatgacgatatcaactttatatgatcgggatataaaaaataatacattatgaaaaaatttgattcataatctcacacatgtttcttctatataatctcacacctgtttttttttttttttgttcaattcataatgcttgattcataatgtattttttctataaaaaaaacactcttcctatattctgcaaagtaaaaaaaatcttcacacatatatattaaaatattaatttgtaaatttatgttataataaaatattaaaaatgaaagaattaaggagaaaaaaaatagttttggagagattttagattgtcatgtcaccttttcattcatctcctttatctttatatattaaaagtgcctatctaacgccatttcttggtttcttggtttaacagaatataccttaaaaataaaagaatattctgt

SEQ ID NO: 101094 - DNA, 641 bp, Cannabis sativa
ccaaggtattatgaacccgaaatgggttttcctccattaataaactcaacaaaaaattgcaatcttacaatacaaatatgcaataaccgtccaaaaaacttgaaaaaaaaaactcattctaaaattttaatttcagattatccattaatagcatattaattcgaaaatttatgttattaatctgatttttttttttttttgaataaatgggttaagcacaacaaatattaagctctaaaattaatagctttgactctagataccaattgttaaagaaatattcaagcaagagcattataaacactataatcaaatatattaatccaatgatgctcttacaactatccaagatccaagcatttatttagagcattaatggttaagaaaacatacctcccatattgctcatcccataatattgagtcattgttgaatatccaagtccaaaacacactaacaatatgctagagaatgaagagtaatcaagagacaattgtggagcaaacccacttatgtctaaccatcaacattcacacaaactatccatccttaatatatacatacctcacatacccatctaaccctaaagggttatataacttattgggttaataaggactaattgatggtggactataact

SEQ ID NO: 101095 - DNA, 1065 bp, Cannabis sativa
ttcttgataatatgatcaataattactatacatatttctttttatagtaattaaaattgttgaaaaatatatgtgtaagtatgcttgtcaattcaatctgtttgaaaaagcaactctcaatatcttatatttaagaaatcaatttgttaatatgcgttaggaaaatggtttacattaatttaatataaaagtgggatattgtttatggaagaaatgctaacattcatagtgtttagtaatcttatgaggtgtaatattgttattgatgtaatttaatattggatttcacttattttagtttagtaaaaatattgctattgggtaccagtagtacctaacattttttttagtattaggtggcgccttattggttagcgatatttcctaaaagctattttcttaagttatatgagacctgatacttaattacattagtggtatgacaccgaggaggatgttaaacatcaatagtgtcttttagcaattcttatttaataaagattataaagaaccgttaatctataaaacgtcatgtcgtataagtatagacactttagtatctcatagcatagcaagactcctactatctttttggggatttgtatccaacatgattagattaagggagtattaatttgctcaaaatgattatgttgtttattttttttttaaaaaatgattatgttgtcaaatgagaaattgtgacctaaaaatagaagattattaggagaaaatggccttgtggggatttgttttagtctcacatgaaaatggccattgccaacacaagtttttgttcttctccaatgtttagaatatatatattttgctttaaatatatgtgaatttttgctttttaaattacatagccaaatatttttaatatatatatatatatatatatatatatatttcaaaaggaacttgatttttctatcacaatgttattaagttgatcacaaactgattatattaaggaaccttttttctttcggtcttttctagtaaactttgccattaaaagttaccatatactaaaacaaagtatccatataagtaaaactt

SEQ ID NO: 101096 - DNA, 1241 bp, Cannabis sativa
  modified_base (160)..(163): a, c, t, g, unknown or other
tccttaattgagttctactaatgatttagtatatataattcacatactaattgattcaatatatgcgtgcattaggctcaattagaggagcagcttactcagagacaaatttaagtccagggccaaaacgatatcctgacgcaggcgctcgggacaccannnnatcctggacgtgtcagggctgctgagtatgctagtacttgaaatgttgttttcttatttatacaaaaaaaaaaatcgtagctaatttgcattttatgatttgtaggttcctgaccatggcatctaaaatgttcgctaggaagaaaagggaagtgtctgatgttgtggctcggcaatagaaggagattgaaaaattaaaagtcgaactccaatcccttaaacataagaaaagcactgccgaacaagaggaaaaaggagaggtggctggggaggcgtatgttccacaaccatacgctcgtgaggatgagggtccaccacaaacctatgctgaggagtttgtttccctcaaaaagccagatgtcctgtacaatttcgatgaccatacggcccctgatcaacaagtatatctctgctctgacaacatcgacaacattgtggcatgagcgtatctatacgacatgaaggtgatatcacagttcactacacgccatacgatgattcacatgcccgggttctgatttcaaaaatgctacaagaggatgctgaaatcccaatctcaattgaagggtgcagatatgttagggacgtaccaaagatgttccttccttggcctaaacacttaattgtaacatctggggtaacttctcttataaattaattattaatgattagtggagtttgaatatcttcaacattcaaccatagtgaagtaggttctgcgaatatatgtgttgcggtgggatggatgaacaaactgctgttatatttgtgttatttgtcattatacaggcatgtttaaaattttggggggcattcaattacagtcgttatgatgccgaaatgtcagtagattttggatcaaatttgatatattatgttctgttttgtttagggtccacttcttcaactgccttcaagacatgatgcgtcgaaggggaaagctcccatgctttctccacaaagcggtcatgcatgggaagatgaattattctcgaaaagaacatggacaggatccctaaatcgctgaaaaggatggttgttgaatttttgaacctcaaagataaacgtgatataatcac

SEQ ID NO: 101097 - DNA, 717 bp, Cannabis sativa
aacgcactgtgatcaaatttttttccatcctgtgaaatttataaggccacttttatcctgagtgttgaggctaccatagaagacgcggtgtaattcttcagcaagcccattactagattggttgattgaaagttcattcgaaaaaaatacaaggaaacccttactagaaaaaagagacaattgcttaatataacttgttatatttagattatgtaatattgtgttgagatttagggtttaaggttcatatcatattacaaaattacttttttttaaaaaaaacttgaatcaatttacacttctactgtgattctgatatgaaccgttaaaataaacacataccacgtgttattacgcttgccatttcactcccattaaaatttgggtaaacacataatattgtagaaattttttgtcgaccacgttcacgttatgtgaaaggaattggtcatttcctatgcttaaggaaattggaggaaagggtgcactggcatcttcatcttccatgtcagggtcctagtcgatcgatgtggaggccattatgcaagaacattaaggcaattataaaggaaaatcgagctctcaagacaaaccaagtcaatcaagaccgaataatacgagcattggtgcaaaaattgagtgccattgtttcgggatttaagatagacctcctgccactgcaatttgatgatgttggatctagccgggaagaggtag

SEQ ID NO: 101098 - DNA, 651 bp, Cannabis sativa
tccatttagtaattatatatatttatcttttaggaaaaaaaaaaaaaagaaaaagaaaaaattgtgttagttgtatttttttgtttttttgaaaataaattttattattattagtagggttagaggtccgattcaattcaatatttttcttttaactcgatcaaatataattagtaattggatttagaaaatcatcatccaatctaatccaactagacttcaaaattcaacccgatctaatctaatccaattactaattaaatttaatctgttttttaattagatatccaattacacgcttgataattttaatattaacttgaaaaaataaagaaatacatataaattaagtatcactcttttttttagtttaatactatataaaaatattatccttacaagtttaatgcaattaaaattttgaaataagtaaaataacattactaattaataaaataaaacaaaatatcatgaaaataaatatacaaaatgactaaatattacaaattcaacacaacaaaaacaaacaactactataaatataattaaaatatatatttttgtttttcaaaatattttttattgtagattaataaatataaattgtaacgtctccgcttcaagtctctattgggtccttacacccacgga

SEQ ID NO: 101099 - DNA, 908 bp, Cannabis sativa
agtgagggcttaagccccgtaagatcttaagtgggctatccctgattgtcgttcttttaagtttttaagtgtgtctttgacggtgtaagtggtggaggggatggttgtgctttaggggctcatgctctgttctcgcctaagtttttcgcagttggaggtgggctcgaattgtcagagagaatatgtatagccttgatgaataaaactccattgtttggaaaatttggaaatatttcatttgatatcttgtctcttttctctgatattcacgagcttcgttgatcatttattgtaatggtattatttagtattattttaaaaaatataaagtctaatttttatagattatctaatcagttccttttgcaaaacacataatcaaaaataatatttacctttaatataattttagttacatttttttataaaatatgattgtgaagtattttttttttgttttaccccaatatttcacatatgttaacatattgctaataatatttataatcttttcaaatatgttttttttatatatataatattcacaagagagagagagagagagcatataaattaacatatttaatataagatttttgataaaaaaaaaaaaaatattgatcccgaaattgttgaaaataaaagaaatttattaatttcctatatatataaacatacaaaatgggatgattgctaatatatgtacaatttcatgcaacaatgtatatttcatgttatagaaaactgatccaaaaaaagaaaaaatcaaatgtctaatccttaaatttgttcaaataataattttaaaattgttacatactactttcataataaaatagaaaagaattagggtttttttgttcttaaatcttcaaacaagcccctggccttctctagacttagacaca

SEQ ID NO: 101100 - DNA, 511 bp, Cannabis sativa
ttatatttttacgattaattttttatatttatatttgtacggtattctataaaaataatatgaaaataaaaaaaaatacataaaaataacaaaaaaataatatcaaaataacataaaaaaaaatatacaaatatataacatcaaagtactgtattttttataaataaaattaatatatatatcgtaaaaatatttaaaattctatacaaccgtatttttattatttttgtgtatttgtaatataatcccaaatatatatatatatatatttatatactgtatatatataatacatgtggttaggataagagtgtaaatagtttgggtcggatctaatccgactataatcctacttgaattcgtaatattccttattcagatcagattcgaatgttttttttttaagtctctttaatttttatatatatatacacatgtatttcaacaaatattaggactgaaagtgttattatactttattttaatcaatagatgattcaaatggtatagt

SEQ ID NO: 101101 - DNA, 540 bp, Cannabis sativa
ctcggcttcaaaagtcccatgacatagtcaccaagcaagttttggtatagtggttattgaacaacccaaaaaatgctacacggaaacattttgattcgttggtggacatgtacaatctgcataacctagaggacaaggttagtttaggtgatgggagtaatgagtgaagctaccttaccaaggccaattcagttagatcccaaaggaatacaaaagagagtggaagattgggattgtggctcatccaaactcatagaagcctctactcccaacaacagaacattagaacggaatgctcctagcaccagagagcgagccaagccacgttcattgagggatttcttaatgaagcttggatgttagtgtgtgtatgctgaattttctgctagaagtttgttaagtttttccagtaagtatataagaggattttgtaattttttagagataatcatgaatgaattgagcagtagaattgtatttttttttttgaagattttccttgtcacaaaaaaggcctgtcctaacagtgtggataaatat

SEQ ID NO: 101102 - DNA, 648 bp, Cannabis sativa
ttattataaattatgtgctagacttaagtggatagtgatgttatattgaacaattcaccaaaaaagtaagtacattttaataaaatataaaataaggtgtttttaattaatggataccaaaaaaggtattcctcaacttattctatttgtttttgggttgtaacttttataaggttcatttttgttgttctaagtgggccttggagatgaacattagtgggtttcttgaggcttcctctatttacaaaaatatgaagaaaaaaaattgatatatatggcatgcaatttttttttttttttgaaaaaaatcataagatttattaatttataaattcgttcaaaataatagaacgcacttcagatgaacagttctccagctgaagcacacaacctctagagaaacaagagtctcttgcttagcaatgagccaacttatttgcagattgttttacaaaacacaaatcaacaaaagataaagccaaaagcaaatttcgaacattttgaacaaaaagaccaaactgtgaaggcataaaaataccgctctaaatcgcttggacatataccaagctatctgtttccaacatgactctatcccacgaatgagttgcatgttagaaattattagggtcacaattgtatatataaaat

SEQ ID NO: 101103 - DNA, 1663 bp, Cannabis sativa
  modified_base (947)..(955): a, c, t, g, unknown or other
atgagcgctctatcatttatcgtgttaagccaagctctaagaaaactatcgtttcacttctaatagttatagaagctataaattctatgtatataattagcgttccgactcaattgcactaccatgttcccaagatgtaagtatttgaccgacctatttggtcagctttaatgaacaagtcaaagaacatatataatacatttaagccaaaacttaaaccatctcatgattaagatcaactaagtgatattgacttagaaaagacataacggtaagtttatgatatcttttccactatgaatatcggttaagtctgatatatacccaatacatccgatactagtatactttgctaatgtcctggaaatgatatttcacatatcatggtgtaagtaagctttatcgctgattatcacgtcattgtaaatccagtgcattgataaatcatgagactaaatacttagaagcatataatcatgattatttttcactctgtagacaacactataatcatgaagaactatatattcaagatttaatagaatttatgtattaaacatataatcatgaaagtaatcatgtaaaccatgcaacataaaatgatttctcgttttttattaattagtaaatctgattatattaagatgagttttatttagggcataaaatctcaacaataacttgttggcttccctcaccacacctcatctagcatcttgaaatctagtgttgttgacggacatttatttatcaaataaactacaatgcacacagctttcgcccataacactttgggcgatccaacactcaataacatgcacctaactctttctagaatggttctgttgaactgttagggtttatacccagaaaaatacataaagacattttttattattaataagagttaaatattttgatatatgcatgaatgttaaattattaannnnnnnnnttgaataatttatatataaatatagaaaaatttcttattcatatatgaggctatgactatgtagttgtacggagaattaagaccacttagccatgaataaaatagtcagcaacataataaaattttagatatttaattaatggttgctagtagggttcactgatgcccgttcttcagtataagtaatctcagttcagatatactgatgacgtatatcatcaattgtagaaagaaaatatctgcttacaactctatttaccatcaatttaatcatatacaaactttcaagttttagccacacacctgcgactgtatcttcttttgcaatctttctcagaaccttatctccaagattcaaaatgatcgcactatgaacctttgtaagagtctttttcttgtcatttttagacatcgaattaggaagagacttctctcctagtaaagcctcatacaacccttggtgaaccaacaaagccttcatcttcaccctacataatctaaagtcattcgtaccagtaaacttttgaaaattgtattttgcgacagccatgattataaaacttgctctggtaccagtttgttgtgctaaacggtaggggtgagcataaaatttgaaaaaccgttcaaatcgacctaccgaaaaccgttagaaaccgaaaccgacgaaaccgaaaaccgaaaaaaccgctaacggtttaaaccgccatt

SEQ ID NO: 101104 - DNA, 685 bp, Cannabis sativa
agaaaaatggcaagccattaatctaggttccctgccaagaaaatggtagaccattttcccagaaacgacctaccttttacgtaggaattaaaaacactcgaatattcttatcttcaacctaccctaaaatcaatcaaatcttatcaaactttacaaaatagtcccttatcatcattataacataacctaattcactaaaaccacgattaattcatacttcaaaaagtgccattaaagtccaagctttgagttcataaactcaagcttgattacacacaataatagttgtaaactatgcttaaaaaaactcaacacaacttcaattctaacttaagaacacaatgaagaccctaagtaaactcacaacaaccagaataaggaattccaacttaaaactcaaaccttctaactagaaaatcaagaactaaagagaagaactgtaccttgacaattctagctaattaattccttcttccaaaaagaattcagaggtgaacttggaaggattttggtctaaaatttgtgatttaggtcttgttatagccgaaattcagttggtacttcagagaagaacacgtgttaacttgggagaatatgaatccacaaatataatggtaattatattagaggatattaaaatggaataactcattaaatgctaaattggtagagtatatctataact

SEQ ID NO: 101105 - DNA, 747 bp, Cannabis sativa
cttataggatgtcggctctacattgtcaatctaatttataacagtgcaaaccctgtgaagtctacaagttaagaaaatcttaatctatttggtgggtgtatatctctcctttctctatatctggcaagttggtaagtctcaagttcaccttgagatgcaaaagccttaatagatgtagattcatctaacctcttctgttaagatttatgccctgaaaatcttacaaagacattttctgattattaataaaaaaaaattgaatattttgatatattcatgaatgttaaattattaatatttattattgaataatttataatatatatatcaaaaaattctttattcatatatgaggttgtgacttgtatagagagaactaagatcgcttagccatgaataaaatagtcagcaccatattaaagttatgggatctttaatcaacggttcctaatacagtacactgatgcctattcttcagtgaaagtaatctcagttcaggttacggatatagtatgacatcaaagtgaaggtgttgtatataatagagattgtatatgataaggaccgatatgaatgaagtcatctttatctaacatgtcatttactagaaagacctaatccatatcaacacgataatcaatagtagatcgacctaaatcttgagtaattatgaactcatatttatgttattagtttctttgattcactcgttaaaatttttcggaaaagatgattcttacaacttct

SEQ ID NO: 101106 - DNA, 520 bp, Cannabis sativa
tgacatgtcactctaaaatcactctaaaagcctctatctattctctccttaatttttcttattttttttaatttttttattaggtttattaatattgatgattgatcattacttatttttattcttactttttaaaattattaattaataataatttaaaaaatttaaaaaatctatttattcctaaccaattttaaaaacacctacgtaatctatctatatatttatgcatgatcatttcattcttttacgttaattaaatttccattaatgaatatttccttttttttcctttttagttcactatatttttatttccttttctaacttttatattttctttccttttgttattatcgatgatgaaagaatattattaattcatatatttcttttttgtcttttaattttttgcaggttagtttaatctaagaacttaactatcttctttttttctttttctttttaatattaactaagtctcttaaaaaaatttaaaattcttttattattcaaatat

SEQ ID NO: 101107 - DNA, 508 bp, Cannabis sativa
gtcaattgtatagtcatacaaacgttctagactcagtacgtgtgggacgcgggatacggttatgattgggtgtatgggcacctagttataatccagtttatgttatgatatgattaagattttcttactgagtcagttgactcacagttactgttttcatgtataggtaagggcaaagctaaggctgaacaatagtgaggttgagcacatatcgggggtggttagacttggagtgtttgagcttcgggacagcgaaatgtattttgattagtcgctaggcgacaagttttgtaattaatatgttgtattttagttgtaacttttgaaatataggatcccaacttttgtaaagtttattttgttttaattaaaggttaattaagaaaagtttaattaaacatgatttctaataaacctgttgattagcaacaaattgcacagttaactttaaatcaggataacacgcctaagctagtaggttgttacaatttctctctctctctctctc

SEQ ID NO: 101108 - DNA, 948 bp, Cannabis sativa
gcgttacagtttggtatcaaagcgtcaacattttttaacttcttgtagacctgccgaacatgaacaatcatcgtcagagacaagatcgactcgtggtggagtaagtgttgagagtaaatgatttactgcttatttgatcatttatttaccgctatccactttaggcaatatgtgagtatctagagtatttatgtgatgtatgatgccatgcttagaatgttatatgatagatgtttatttatgttaaatggaatagttgagttagggttgaaggcaataagtgcataagtgtggtattggtgcttaactcgctagggttgttaattataggggtacttataaaaatggacccttcgtaatcatctagaccccagggcgagcaagtagagcctggtgttgaccaaaccaatccaccgacaccgcttgcgcctctacagaatttggggaataatgcaggggttagcaatgctaatttgcctgctgactggcagcaaatgtttcaagaaatgcgaggtatcatacttcgtcaagaggaagagttgcgtcagttaaggaaatcggtaccggctgcccctattgagcaagtgttaccacctccacctatgtgagtggtgggtaaccaggggttcatgttgccgcatagagatttcgtgtttgaatggtttgtgaagctggaacctccaccttttctaggaggtattgaaataattaaagctgagcagtggatgagcacaatcacctgtatccttgataatatgggggtgacaggaacacagagataaattgtacagcttttatgttacaagatcatgcccgcgtttggtgggatattgtggggcagaatcgcaatgttagtgtgatggcttgggatgagttgaaaaatctatttgaggaaaaattttataacatcgctgtggggacttaacatatggaagattttgttaaact

SEQ ID NO: 101109 - DNA, 658 bp, Cannabis sativa
gatagaactaaggaaatataataactagaaattgcattgtatactcactttactttatttgttttcgcttttatttttattatatattctttaaaatatacccacttttattaataatgtccctattatactatttagattaatataaatcatgtgctacatttaagtagagggcaagggtatattaggcaactcactcataaaagtgggtaaattttaatgaaatataatatgaggatatttttgattaatggataaaaaaaagaggtattcctcaacttatcccacataataatgaattagtggtcttaagcttatagtaattgggttttgaaataagacactagtgactagtcatcacacactattaatataagggtaaatactattttgaatcttgtgttttgcaaaagttaccaattgaatcttctattttgttaaatgacaaaatagactaaatatttttcaaaaaagtacaaataggatcttaaactgattttttgtcaaaataaaatttaataaaaatctgatctaaaaatgtgttatgacaaaactgtttatgtattctgtatctgttcgtgttaggaattatcttcaagttagttatattaacagcttgtgcacccacgagtttgaagtaggggacaagctctgtcat

SEQ ID NO: 101110 - DNA, 792 bp, Cannabis sativa
ctcatcggatcattcattggaagggaacgcctatgcccaatgtaagctaccttactccttattccaacagatggggtttcttcattgcatgttggacaagctttataccctttagtattccatccagacattaaagcatatgcagggtaatcattaatagtccaaattactgcagcacgcattcagaatatagagtcatctattacatctcgagtaagtacgccatttttccataagtccttcaactcatctacaagaggcttcaaaaagatatccatgtcttttccaggtgcattaggaccaggtattaaaagagataacatcattgactctggtttcatgcacttccaaggtggtaagttgtatggagctacaatagctggccaaatactatatgaaagactcatgtttccaaatggattaaatccgtctgttgccaagcccaatcttacatttcttacttctgccgcaaagtcagggtattgctgatcaaagtctttccaagcttgagcatcagctgggtgtcgcatcacacaattttcttttggtctctcggcatcatgccacctcatatccttggatgtatgtctagaactatacaaacatttcaatcgtggagtcaatggaaaatagcgcagcactttatcaggaactttttttccacttcccttactatcaacccaacgactttcaccacaaattgggcaattttctaacttagaattttctttccaaaatagagcacaatcatacttacaaacataaatggacttgtaccctagcccaagattt

SEQ ID NO: 101111 - DNA, 1079 bp, Cannabis sativa
acttaaattggtttaacataatatgacacaactttttaaccggagatcttgattcattacttaataagaaatattgaacaaataatattgttaaccagtttttcaaatttaattttttatcttcccatattattttactatatatacggacattacctttatatactagggttatttgatcatgagtttatgtattttcattgtaccattttaaatatttgagtgatctagttataatcttaaaaattgagacattaataatttaaaaataaaatttttgaataatataaacaatatcacttgtagattatatattttaaaagattaaaaaaataaaaaaaaaataaagcattttttaaagaaaaagaaaaattaatgataaaatagtgggaattgctatagttagggagttaatagtgatgatgacattaatttcgaatatcacatgaaagaatgtgtgtatagataatttctttcgagcaccttttttctaaaaaaaatgaagttgtgtttgaaaatgtgtgtttaaattaaaataacaaatgtggaggaaagaagacgaagacgagtcactatagtgactcggtgacggtcttgtagcaggaggattgtagtattcgcttccgtgagcatgatgattgctgtagtgagtcgctgagtcgactttagcatttttggctcaataatccaaaggaagaagacgaagacgagtcactatatagtgactcgctgttggaaaggtagatgacatttctgatctttcggtttccttccttgaagatgagagcgtagacccgagttctttctttgaccgaggtttggaaccctgctgcgagagggacgcctcgcgaaccgggcttctagagatgaggccttttggcaaagagaagatcaggcaagtgggggtctatgcgtgcggctaaagaggaatcttgatcgatgaacatgaagttgaaaggcagagtaccacaatagacgattttggagactgaatcttcgaggaccagtggctcgggtatgtagaaacaacctgtagaatggtcttggaacaagccgaagcagaccggcaaattaatcat

SEQ ID NO: 101112 - DNA, 688 bp, Cannabis sativa
atttttagtaatttaacactaatttctttattaatataaaacaaaacgtgggcagtgatattatttaaggaatctttatatatgttttaatttgaacctttagattaagtttcatccaaaggtttaaaattagtatataaaaaattatgtctattgaactcattccatatataaatgaaatattgatatttttgatcatgacataattatagtatattctatataaagaatgtcttatatattatgaaaataccaaactaaattaattccatttattatttagcgacttggacttatttgtagtaaaatttattgatataaagattctttcaccctcaattataaattttgttataattaatcttttcttaatacttttaataatttgacaccaaaaaaaataataaatacatgcttaaaaaattaataataaactcaaaagaaaatgtaaatagggataattttacaaatacacaaaaacaataaaaaaaaactacaaaagtacggttttacggaattttaaatatttttacgattttttcaattttatttactaaaagtacaattttttatgctgtaatcttgttaatttgttgttgaatttttgttatctgatattatttaaatgttatttttatgtagttttcttgttgttacatgtgtttaattctaacaatttcatgttttt

SEQ ID NO: 101113 - DNA, 608 bp, Cannabis sativa
  modified_base (570)..(576): a, c, t, g, unknown or other
aaagaaattaacaaaatttaaatttaaaaatgaaatgtgacaaaataaaatagtcatagtcaatttttaaatttaaacctcaaaatattagattactaataataatctattaaaatcaaatactattaatttaaaattgatatttaaatttaaaaaatcttaataataatattttattttaaaattagggtttgaaaattggaaaaattcaaaatttgtggaaaaatcccacaaaaattggattttggtgggaagatacacatgatgcgcacgaagaggctacatgcagcctcctacgcgcccggaatggggttcagcagggtgctgtgccgagaaagctttgcattggcagcctcaggacacgcaaattgttgggtccatgcgcgcgtgtcccgtgttcgaactgggagctaactgaggcttcagaccacgcgcccatcacctccttgtctgaggcctggtgcgtgcgatagagcctctgcatcccaaatttttaaaactccataactttctcgattttcatcaaaattgagtttcgtaaaaactcaaaattgcttaatttttcacaannnnnnnaaataaaatattttcaaaatgaaaataaaatt

SEQ ID NO: 101114 - DNA, 949 bp, Cannabis sativa
ttttttttttttttgataaagtcataatattgagattttaatttattgagtaatactaaattggcaataatattgatatattgatgcagattacataaatgatacaacttatagattagttaagcatatatagtttaaagttatacacaataatctttcttcgaggcaaaaaactcttcatttcttgtgtaactatattatagtgcaatctcaatatgataagtattttctagtattaagtaatttaagttagtaaatactaagcaacacatgtcttgctggtgcaaatgtttcctagtattaaaaatttatacatgtgatttatatctacaaaccgagattcgatctcaaaggttcatgaaacccatgtcgactaattcatattctttacaaatctaaaacttcaaatccaaaataaaactcataattaatgactacaacacgaaaacttaaaatttacaataaaactttagctagacgatatatgtgtgtgtttgttgttatacattaaataaatattgacttagtcatataaattacatatttacatatatggatcgatagttattatctatgattaattttttttatataactaactacttaaataaatagtttactaaatttgataaattgaaattagactatggagaatttacatatatatttatgtatatatgattatatataatctaaaatttaattattatagtttatatttgaattgcagatatgaagaaatattatccaatagttctaaatttatcacatcaaattgaatcagaggttgatagaagttcaaagagacatcgtaattcaataaatatggcaaatcttccaactaatcctggattacaagctccgatttctgattataatcccaatattcaagatgaaattcgaagacattatttacaacaagggccttgtcaaccaagaagtcacaatt

SEQ ID NO: 101115 - DNA, 547 bp, Cannabis sativa
ttcaataccaccagaatctctattacttcccacaacaaatctatttagtgtttgcaaattttgtagcttcccaaactgcaatggcatctctattaaatcgaagggaacactaagatgtcgcaacttgattaaatttcctatatcatttggtagtcgagaaactgaataacattcctccaacaatagtgtctccaaattatacaacttacatattgtattagatatttcttcaatgttgcgacaatctaacttcaaatatcttaaatacttcaaattgcctattgaataaggaaacttggtgatgttataatcagatatgtgtaataccctcaagcttgggaatgacttgtccaactgctcaatcattagctgatcaatggttagacgttctttccacaatattgtgtgcaggtacttagctttaaataactcctcaaattccttagggtcattgcctttcgcacatccttgctggtatgaaaaatgacgaaccttgtgagaacattgtttgatattatttattgtcaaagaaaactcaccagaaata

SEQ ID NO: 101116 - DNA, 732 bp, Cannabis sativa
  modified_base (26)..(40): a, c, t, g, unknown or other
  modified_base (160)..(164): a, c, t, g, unknown or other
ttgtttttaaattttttaatcacaannnnnnnnnnnnnnnttttgtttttaaaattttgattttaaaaaacaacatgcgttctataacaacttttagtttttaattttaaaaataaaaaataaaagtgtgttctgtgtaaattttatttttattttcatnnnnngattttatttaagttgggttcgggtctgaaaccgtgatcggggaccgggtcgggtcgacagtcgaggccagggtccaagtccgggttccaaggtctaggttagagtcagagtcgaaaatattgattaagaaaaaaagttgtttaaaaaaatttagaaagctattttttttttccaattttttaaaattttgattctcaactaaaaaattgaaaagtgagaatatttttattgagcatgattttagaaaatatttttacttttctaattttaaaaataaaaaattgattaaaaaagtttaccaaacgcaccttatatttaataaactaataaggtacaataaagttaataaaagttttataatggtactaatcagtatatatttgagatacatttttggtttcctccaaaacttatttgtatacatcttaataatgaattagttgttttaggttatattatagtatcttgttatttaaaatacattcgattaacttttaagattatttttgaaattaatgacttgttatatagttggttatgatattgataagatactaattagttact

SEQ ID NO: 101117 - DNA, 509 bp, Cannabis sativa
atcttgattccatgaatgtcacccttgtcttgggatcgatcaagcatccttgagagtacatcattacatagaacaaacaaatagggagatatggggtctccttgcctcaatcctctccctggatggatcttcttttggggtttcccattgagcaaaactgaataagaaaccgaacttacacatttcataatcaacttcacaactacatcattgaaaccatggttttccaacactctctgcaaaaagggccattctattcgatcgtaagctttatgcatatcgatctttatagccataagaccacctctccctttctttttcttgatcgtatgcactatctcctgagttaagattgaggcctcggctatccaacgccccggaatgaaggcagattggtaaggggacactaaccgatcgattaccatcttcagccgctgagaaataatacgacttataattttgtacacaaaattacaaagagcaattggtctaaatcggtccaccgtctt

SEQ ID NO: 101118 - DNA, 544 bp, Cannabis sativa
acctagacccagaccaggactcggacctagacccacacccaaaacttaaatcttaccctatgacccaaaatgtgaactggaactagaagcaagcccttgaaccctaaaccctaaacattaaacccttaatcctaaactctgtacacttacccctaaaccctaagccctaaacccaaaaaataaaatccctaaacactaaagccaaaaccctaacctggacatgggcctagacccatacccatactgagatcgaaacccaggacccaggacccagaccaaaacctgaatatagacccaaacctaccaagactcatgaccttaacccggatcaaaacacagaccagaacgtggttcgagacccagacccttactgggactcggatcgggaccccgacccggacctgaatagggacctgaactcagaccgcgacccgttcctgtactcaaacctgaacccgtactgggacctagactcagacccaaactcaagatccaaacccgaacctgaacttggacctacaccgagacctaggatccagaccta

SEQ ID NO: 101119 - DNA, 894 bp, Cannabis sativa
gacgcgcgagagctgttataacacagagagagtgagagagagatagagagaacgcaagagaaaaagagagggaaagagatagacttacggaggtgggaaaatttccggttcgaaatcgcagttcgattgagaccttcagaccttcgaaatcgcaagagagaaagagagggaaagagagcgttgttcagagaaagagagggaaaaggagagctcgaaatgaaagtgtcattcgactgtttgggggtaagtgaacaataggaggatttgcgtcgttttttcacactcgcaatatctttaccgtcggttttaaaacgccacacaaagcatgagtgaggcttttaaaacgacgctaataatgaacgaatttttttaattttttgacttttaccgtcggttgagtaattagtgacggacatagaaccgacgcaatttatttattttttgtgacattttaaaaatgacgaatatattgaatatggtactattcacgtcggtcaacgtgatgaaccgtcgcgttgactgacgtggatagtgaattttgtagtagtgatacttattaattgttatactaattgtgtcaatacgtgtattggatcttctacggtcatgaaaattttaatgtatttcttgatgtagtatccacattgtttaccatcagattatttaggacatataggagttatccactggataagtctatccggctgtcttatcatttgactgtatatggtgaacgatctacacacaaaaagtaaagttagcatatataaatttataaatataaaacacgcttacgcattgggatgttggatatagaacttacgtggaaatgatgaatttcaaatcattcggtacgtcgccattgcctgaatccaagtatgccaccgtctacgt

SEQ ID NO: 101120 - DNA, 811 bp, Cannabis sativa
aaaaagaatcaaaattagaaaatattaattcaaagatactaaaatagatgactttttcttttctcaaaaaaaaaagtacataggtattaaatagacatatttgtttctaaatgagagatatttctttttgtaatttcataattaattaaaggttattattaaggttatagatatatatatatatatatatatatatattatgatctaatttcacatttggataattcaggttattgtcaactttcagtgcccagcattacctaccaatatatatatatagcgttatttataattaaaaaaagaaatatattgaagaactataagcatatatgcagaatgtggattgttttttctctgaaagatatcaattaaatagaaaaaacatactctaatcataacaatgagcggcgcctttctatgctcttctctccataacgacaaaatttagaccaccaattatgaaacatgcgtacaactcacacacattagaatgttaatatataatataatttcaaagatataaatgagtaacaatcacctatggatttttccttcttcatcttcttctgctctgtctagaaacacaaagaccttaacaaccaatcattttagtccattattatatgtacagaaaaaaaaagaaaaagaaaagatcatttcctttactcatacttctaccactattcatcaaagctttcacaaaaaacttcatttgaaagcacacccaacttcttctgtacttcaccttcgtttggaacgtagtattaagtcgtattgtattgtattatattgaattggattatatatcata

SEQ ID NO: 101121 - DNA, 595 bp, Cannabis sativa
atactttgcattacttaagacaagaggaacttggtagatacagtcggaggtgcccttatgaaatttatagctccatatttcaaaccatgcttctcacgtattcattcattacatatgtcagtattctcttcatctccataattaatgtggtctactacggttcagaagtattaataacaatttacagtttaaaataataagaagaagaagaacaattacgtaataacttttaatcatagctgttacttctaaattgcaagagtcaacagtatatataaaaataataatattaaatattatatatattttagtgagatacaatttttataattaaagataataattattattattagctgaattaagtataataattaagctaacttgacattacttttttcttaaatatagttaatttgaataagtgcacattacattataagttaattataatttttgtttttgaactttaacatatattaaatcatgtttttttgaatatttttaaccattaaaaattctcccttgaactattaaaattgttgaatttaaggacatttatccagtttcatcattcaattttactaattctatg

SEQ ID NO: 101122 - DNA, 588 bp, Cannabis sativa
tgtgccacattccagttccaggaggatgccctggtttggtgggacatggtgtccctgactcatgatgttactattgtcacttgggaagagctctaggagttgttcaatgcaaagtattataatgaggtagttagaagtgccaagaaaagagtttacccacctggtcaagaaggagaatatgagtgttactgaatacacaactcagtttgatctattggctaggttggctttgggaattgtgccaaccaattttagccataaagaaaagtacttagatggattaaatccaaaaataaagcatgatctaatgattactactgacgacaacaccacctatgctgacatggtgggaaaggaactacgagttgagggtgcagttgagtgcactcaggagtcttgagggacttaggttgctggtgaagcccctactcctcctatcgttggtcatggtaggagtggtagtgactcgaccaccgaccagaaatggaaggcaccatttgcaccatgtggctcaagtcagaacaagagcttccgagggaactagggtcaaggtaatcgttagggtggtttcgaaacccaatatactta

SEQ ID NO: 101123 - DNA, 582 bp, Cannabis sativa
tagtactagcaccaccgcactccttggggataactctttctagagggaagcagttgaattcccctagagcaacggatctaatatgacatctacgcctttgattgatatcgcatgacattaaaacacgacaaacttattctccaatgactctcaccttggactcaataagttcagctcaaaaagttatattaggatcctgggggtctttgatttacgaggcttggtggacataatttcaaaatcaaggtcacctggtaaaaaagcaatagtgactttgggtaaaaacaagagactcgctaaaaggatagaagataaaatttggggtaacccctggttgtttgggttattgggaagactgggctggttgtatctgtggatctgtcttttcacgtactgtttaaagtgacctcgagctatgagactttctatctcgtctttcaattggcgacatttgccgttcgtgtgtccaatatccttatggaatttataatacctgttagaatctctttggatcatcacattcctcatgggctcgggcttgccgaaggcaacctttttctcatgtgcgaggtaaatattctc

SEQ ID NO: 101124 - DNA, 801 bp, Cannabis sativa
gtaaaatatttccaacaacaacagctaaagaacaagtgttgctgcgattcctcagccaaacccgcaaacagggcactctttagtatccaactcaatatgaaattgaccgagtttatcttgggtcaaaatctggatatttacaacttgccataagatgaagcgatgtttgggaatatttaaagagctccaaacgctgctgctgtaatggaatggctgttgatttatgaggctattatacagctagctagtcttgaatttcccaccagtccctgctgcttgtatgtccctgcttgagaatttgtccctcaaatgacataacttcttccaataccaactagtatcaagcttaagatcataggtccaaatggaaacattcttcaaataaagattgttgatccatttcacctaaagaatgtctcttttgtttgaaatggcccaaatgtatttagcaaggttagcttgattccatttgattccctccttaaatcccaaacccccataagcttttgggaggcaaactttttcccaagacgctacatgaatcttgcttctattgccgtttagctcccaaagaaaacctatgcatagccttttcaatgtctctaaatttttcattttttatacaattaaactaaaagaaatggggtgcttctacaatgcaccccattaatagatatgcaccaattcaccctctatctatttcgacattcaaaaaatagtttagtctattcttttgggatattggcggctaaaccacctgaactttacggtttgtaacacttaaccacaaaaactgaattt

SEQ ID NO: 101125 - DNA, 794 bp, Cannabis sativa
attggatttaagttttattatgttataccatgagatatatgagtttctttttatctgaagatatatatatatatattgtaagaagacatatatctttcaaaaaaaaatagaagacatatatgtatatatatgggaagatagagaagacttatatacattatgatatatatatattatgaaatatatgagaaacgtgagaagatgtgagaagatatagtactatgaccattcaattgtatataaataatataaaaattaaaattacatatgatgatggtgattactgattaagttggactattcaattgtaccaaactatatatgtcaatgtgacatttatattatagaagatgtttttcaattaaaataattataaaacatgataataaatataaaccatcaatatatgcatcatacatgcatcatcaaaaattatatatataatgaatgataaagaattaaaactcaccttgatgttgatatgtggctgttcctttctcaaaaaaaaagaagaagaaaagtggctgctgcagaaagagaaacgaaagagaatagaaaagtggtttgtttagggtttagggtatataatatatatactaaagtatataatatttggtggcaaatttctctttttgtttttaataataaaaaataaataaaaaactaagaagtagcattactcgtcatggtttatactaaagaaattgggaggagaacttctcccattcttttcttctaattttatgtctttcccttagagtattccaaccattaaataaagtaaacaaatgaaa

SEQ ID NO: 101126 - DNA, 606 bp, Cannabis sativa
ttcgtagataatcacgccacactctagaaaaattatttggatccgatttggtcccaatataattgcccaactcctaataaccttctccgacataaagcatattgtcatgttgtgtaattggacccaaagctcgagtttcgttaacggaactagctggggattcaccccttgtgtgacccgttcaaagattaatggtgctcgatcaaacgtccatgggctaccttcgataaacgctcaatatccacctcgtgataaaactagaataaaaagagatttggatcgagttccttgacatataaacctcttcccgactcccacaaagtggccatcttattctgcatgtcttggaagtcaatagatcggttggttaagaaacgtcccactaatagccatctatcatcgatttctattaaaccatcatcccccgcatcaaacaccaacccttcctcatcataatctttaatcgtgatgttggcatagtcatcaactatgttctggtgttgggattatctttgattcatcatggcagtacaaaagaaaaaacaagcaacacagcacaatcggataatacaaaacttttggaagacacactaaacaaccatgtca

SEQ ID NO: 101127 - DNA, 639 bp, Cannabis sativa
  modified_base (575)..(598): a, c, t, g, unknown or other
gtggatcgtctatctaccttggagcctgcccaatctgcatcagagaaacactcaatctgggtatgtccatgatccttgtaaactatacctcttctggtgctcctttcaaataataaaatttactctagtgctgcccaatgatgaatttatattgactaatgacactaactggcaatgcaatatccagacaagtcacagttagataatttaactttccgaccaatatgcgatagttctcaggatcttcaaatgattccccatcacgtgtaagatgcacaactagattcattagaccattacaaggtttcgctcccaatattaatgtctgagtaaacaaatcaagtacatactttctttgagataaaaaataccttgtttactctgagtaacttcaatacccaaatacttgagcttccctaaatccttcatgtgaaactgggtatgaatgaaatgcttaagggatgagatgccgtcattatcatttccagtaataatgatgtcatcaacatacaccactaacaaaataataccagcaatctgttggaaatattttatttaccaggatctagatttannnnnnnnnnnnnnnnnnnnnnnncctaatatgaattctaaaacaacgaaataaacacatataaa

SEQ ID NO: 101128 - DNA, 619 bp, Cannabis sativa
attgtgccacgtgtacactgtgtccacgtagacattccatcatggcagttaaaagctaaaaatgaatgcaaatgttaaaatgctaacagaacatgagtttaggaggttttaccaccaaaattttggaattggggttagttacaaaaacctggccacttaaggtggttaggccgcaaataactctaatttttaataagtggtgtaaatgaagtactatttgttttgtggtgtaatcaactgaattgagtttttcctataaatatatataattttttcttctttatgtttataatatatatagggagctaatataataggtattgtattttttacctattaatatgtataataatttttagccatttatttaatcaaatgagttaaattaattcttgaaaactacatcattattaatcattttttatttataatataactttaaacattaataattcgatccaactaacaatactacaaagctaactccaaacctataattttttttacttatttatcttataattttaattaagtattttttaattttgaatttatacattaattttattttcttctcaacaatagttataactaaaagagtacaaaatattcaagttat

SEQ ID NO: 101129 - DNA, 539 bp, Cannabis sativa
gctgtgaactcattgcatggctttattccatttaggattagccaaggcttctttgacagtagtgggttctttttctgttcttatatctgccaagtatactttgggtttaaaaatgcctttcttggatctagtgatcatggggtggctgttatgagtactgggaggttgtggaatatgtgatgggtgggaagaggaggtagtatggggttcaagtatagcagtaggtaggtttggagaggctgtttgtgaggctgctggtgtatgagactcaaaggagtgattattactgaattcttgttgttgtatgggagcaggcagcggctgtgagacacttaaggatggattttgagtatggttgataggtggaaagacatgtgtgggagatatgggataggcagtatagttgatagatgggttcggattgtgattattctgagagttggatttagaaaataattcttgataaggaaattcagcttcattaaactgaacacttctagccacatatatcctaccactagggtggagacacctataac

SEQ ID NO: 101130 - DNA, 585 bp, Cannabis sativa
ttctaaaaaataaatttaaaaaaactcaacaaaataacgtactcgatatgcatgttaaacaaagttgttgacttttagattgtgtttatcggtgagattcatataattttttctatttaattatttttcttttagtactttctataccatgtttgagaaacaaatgaaataccctaatatcaatttttcttatatttaacaagcttgcttatacgatacaaccttaattcttaattgatataagaagtatataattcagcatttttatttcattaagttatgtaagtttgagttggctaataattttaattaattgtatatgtttcgatcacaactagctcaattcagctacatacacacatctatgacaccctcttgttattctcatctttagatttgtttcttgctaaaaagtttatcctttaacatcattcaatatttcattttggtctcatctttagttttgcttgtggcaaaaatattacagttgtctaaaaaaaattattttttaatcttcatgcaataaaaaaaaaatacatttttttatttaaaattacattaattactaacttttattataaatta

SEQ ID NO: 101131 - DNA, 737 bp, Cannabis sativa
atacatagaaagaaaccatttacaaattcagtaaaggtaccttttttttgttctgctagaaagtaaaggtacctattctagtacaaaaattgtaggcaaaaacagagaaatgggtataccatagatcaggagagatgatttgtagggactcctcttcacgtcattgctcttacaaggtgagagagtactgagtagtaataaggatgagctagtatttagcaaaaacataaaaataaaaaataagcatgagctggtgaataacgggtttagaacttggaagaggaaaacaaaatcaataattgaaattactagttttgttgtcgtcggggagagaagagaggatggttcgtcgaggagaacgattgggcgtggtgggtcaaaatcgcagagttagggttcgaatattggggcaaatgtcaacaatggagaggaagagagagggagtggagcggtcgataatggacgatcgacaatggagagaaagagaggagagtggagcggtcaacaatggagaggatcaaagatgcccaaattgtcagagtcatcttatgtgaacagtgggatcgatatttggatatttagggatttaaatgtttttttcgtcggttattaaccttagggagatttcatttctcgtctgttttaaaagctcacacagcttttaatctatattttttaaccgacgagaataagcttctctattttaatttttcctttctttattttacgtcggtttt

SEQ ID NO: 101132 - DNA, 694 bp, Cannabis sativa
aatagaatataaatataaatatatatttacatctttatatatatatatttacaatatatatatagttacatagttacatctttatatataaatatataggagaaacttagaatgatgtggctatttttcattccaatatttttttttgaatggtcatttcaatattatattttctctaaattgtaaatttttttaagtttttatttaatatttactaacaataattaattaaaagtgaaaagaattttaatagacaaatcatattattttttaatttttaattaatgataataaattatgaaatcattatccattaagaaagctaattttatcttttcattttttataacttaaattatatataatacttattattattattataaacctatttaaattctttatttaattctaataatatatgttatacaataaatttttaatataaatatccaatgttctaccataaaaggactcattcaaagtagcttgcgaaaaaaaaaaattggtgaaaaagtaatttatactcatgaaattgtgaaaatcgtcaccacacttcaaaatttaataaagagttatcgatgcatggttggaggttctacaaatttattcacgaattaagaagatgtgcttcaagatctttatcttatgttgtcatcaattttcttattcattttctacattccactttgcc

SEQ ID NO: 101133 - DNA, 888 bp, Cannabis sativa
  modified_base (52)..(52): a, c, t, g, unknown or other
  modified_base (716)..(717): a, c, t, g, unknown or other
ggatcaagaagttttaccacaaatttctaagctccaagcaccaaaatcaccnaaactccttaacttttctccaatccaagccttaatttcaaaattttaaaatgttaaagatgataaagagagaggaagagggaggtcgggttaaggagagagagaacccagaatttataatttcatttcctcaaaattcagctttaattaaagtaaatcaaataaggacaaaagaccattttgcgcctaaggccaattttcacctattcacacatacaagggcattctagtcaattcatactcaattattttcaaataaaaattcagattatcactcataaataataatgccaaataaatcaatccaatttatatttcgggcccgaacccggttcggccgaaatacccggttgtgactataacgcgccaacctgtcaaaacacacctaaaaagacaacacagtcatactatataataatatagttccattaagcacgtaattaaactaatttcatcattttacccttctcgggttataattactaaaatacccctgactcaccaatgtggtcttagcatataattaattaaattaattcacatatactgaattatataataatgtaattcctcaattattcataattatctaattagggttttgctaatctatttctaaattttacggtattacacatcagatgtctttaagatatttaaaactnnagtagagaaacaatgcaacaagcaaattaagatagtgagatcagatagaggaggttagtattatggtagttacacagaagatggacaagcacctggtccatttgcgaagtttcttgaagaaaataggattgttgcccattacaccttgcccggtacacccgagcaaaatgg

SEQ ID NO: 101134 - DNA, 530 bp, Cannabis sativa
tgttcacacttctagcaaagaccaaatagctgacatatacaccaaagctcttcttcataaccagtttcaagttctcaaaaataagatgggaatttgtaatatttatactccatcttaagggggagtactaagagttgtaagctggagtgttagttaggagttagttgagagttagttaaggttgttagctagttgttagaaagtggttagcatgattttcgtgtataaatagacattgtattgctctgttttctgataatgagaatttcagtcactttgatcaatttctctcttcttcttgtttattctttcctctctcgtccctaaactaaaaataattgaactaattagacacaagagaaataaacaaatgcaacaagagttaacatggttcaaatttaatttctcgagtacatccatggagaacaaattatataggacaattaatttctcgagtacaaccatagcgggacaaatactaagccttcttctttattacctccaaaaatattgagttacaaataacaagg

SEQ ID NO: 101135 - DNA, 991 bp, Cannabis sativa
tagcgggtcgcctagtcatgacccgaaacgacgacgttcaacttaccaaatctttcttcatagactgcaatggcactggcggtgctttccttgaccacatcaccttttacgacgttacagttgccgatattctcgatccgctctacatcccagacgatgtcgtttattctttctttcccttgaacttggtttataacttccaaggagtttcgagaccgttgctggcggctcaagtaacggagttagttgacggcgttttcattagtctctcagcgaatcattgcgttgcggatgggactatgttttggcttttcttcaacacatggtctcaaatctgtcgccaaaacggcgtcgtttcagaccctccacacccagtttttgatcgtcaccaattctttaaaggtatcaacccatatcttcttccacttagaataccttttgatccagatcaaaatacaaataacactagctcaacaccaatctcattgaagcaaagaatgtttcgcttttcaaaagaaatcatagccaaactcaaagctaaagccaacactgagatagtccatttgtcacccacaaaacccattaataatatatcctctcttcaagcggtgatggctcacctttgggtatccataacccgaaaccgaatttacttgaaatccgaagacaaagtgaagtacattgtcatagtgggtctcaggcaaagaatggagccgccattatcagaagcgtattgtggcaatgcggtgatgtttgggaatgtggagaccacaacaggaaagcttttgggtaagaatggattgggctgggccgcattggaaatgaataagatggtcgtttcgcatacctcgaagaaggtccaagagtacttaaagaattgggtagaaagcccaaacgaaataaaaataaagaaagagttagggtgtgaactattgaccggtagttcaccacggttcaatgtttatgagaatgattttggttggggaagacc

SEQ ID NO: 101136 - DNA, 809 bp, Cannabis sativa
ggtttgtgagacttgatcatgtggaaaagctgattgaatgctcgagggttccccaaacctcgagcattccaacttataaagctcactttcctgggcgagtgtgctccgcaccacccgcctgttcagcatcaggaattgaagaaaaaccacttacatccatatcaccagctcgagctcgcttgagcatagagcgcaatgaaccccctacattagtttgacaagcttgaaaagtgggccttttgaccccagaagcacacgccaaacctttacctctaacctgagaatcaggcaatgaggtttccaccacagagacagcagaggtctgatttgagttgagaatcaaagaaggcaaagcttcagcaagagagcgagcagcagaattcaattctggattggtgaaactcggggaatcattaacaataacagagtcagtatgcagtggggcagacaaagacgaacccgacaaagaaaaccccaaagaaaggttaggatttacaggagtagggatcatcacattataagattggcaggaaccagtcagaccagcaatcgaggcgacattagagttcaacagaggggtaaagctaaaaggatagttcagaaaaggattagggaattgacttccctgaggaaaaccggtaagatccatatcagtgatagttatagctgggggatgaggatattgaaaaggggattgcctttcagcaggcttttctttacctctaagagggagatcataaggacaaggaggtggggaaatagactcatcacacttctgaagatatgcatggcaatattttttggtatga

SEQ ID NO: 101137 - DNA, 581 bp, Cannabis sativa
cttcaactagggaaaaatacttgtcagaaatactttgaagcttttctagctcaataatattgactcgtggactagattttattaacactcgaaccacgtaaaaatcttggtctctccttctttaatttacttctttcttaaacttatttaaatattttggtaattttattgagagatgaggaaagaattaccaaagttttcatttagaacgatggttgcaacacaaaaggcaatggtcatgctgcctactcaagatggtaaaaatgataacgccaatgatggtgagaaccagctcccctaacaaacgcttaggtgggtgtcgtgggggacagggaaacatcaaaagtaggtaatcatctgcacctagaagaccagtaccacgacaggcaagttattgatgatcccactaacaaggatgagcaggatggtaatggacatgaccctaaggatgaccaaaatgaaaactacaacaaagagtacgaagaagagtactatgagcaagatccagtagtggtaaggatggcacaggaactcacagatactcaaaaaagactggcaacattaggaagaattttcctaaa

SEQ ID NO: 101138 - DNA, 607 bp, Cannabis sativa
taccccctgatgtttcgaaagcatcagccttccgtttatgatcagggttaccaccgtcggtccccttactgacattaccaatagcatgaggattcgatgccgtggtggcatcctttgcactctgctcttttattacatgttgctcaacctcctcagcaattaaggctagctcaaccactttcttatacaaagtgtcatgggtagtggtaatcttcaagtcccgactaattgtggcattcattcctctcacatatatttgtttcctggtgaaatttgtaggcaccagatcactagcaaatttgcagagctgatcaaattgtaaagtgtattcgaccacaaacattttttcttgagtcagtttcccaaattttctccatatgagacgttctcatggcgatgttataaaatttttcttcaaacagactcttaaactcatcccaagtcatcacactaacatctcgagtctgccccactatatcccaccagacgcgggcatgatcttgtaacataaaggcagaatagtttactttctatgttcccatcacccccatgttatcaaggatgcgggtaattgtactcatccactattcagctttaattatatcaa

SEQ ID NO: 101139 - DNA, 504 bp, Cannabis sativa
ttccctcatgcatttagccctataaatagtgatccattatcactgtaaaagggatcgagagaattgtttgagagagacctaagagaaaatactcagagatttcattgtgagagctttgagagaagaaacactgtattctttgttctcaagtcaatacaaaccaaggagagtaggctattaccgaactaaaaggggccgaacctctttaaaatcttgtcttctttattgcttattgattttcgctctatcttaattacatttcttatcgtttattagttgactcaccgtcgttggctaaaagcgaggtcaacatcttgatcctcatttattgcgattcttcctttttctcaaaacccatactgtcgttacgattttttttctcttccaaatcaatattgcaaaaaaaaaaaaaaaaaattagttatcttcttctaaccctattgatagctgcaaaggagagaatgcaggtgaaaaaccagggtcgagagatttcgtcatttctag

SEQ ID NO: 101140 - DNA, 1456 bp, Cannabis sativa
tataaaagtaaaaatatgaacacgtggttttgcagttaaaattctacatagtccacgagtcaatcttattcagatttctgattgtttctcagggcctctcttctatgagttttttcgtccccctttctgctcatgcttaccaccatttataattacatagtgggcagttaattacaaagttgactgtaatctttttacaatgattatctcctagaatcatgagatttgatcacaaatcacgctaagtaaatacaatttttatttagaattcacatagctgtgaatatcctacttttattaggccgagataaacacacattaaagatatacagtaagccttatctcatgaagatgccttgctgagttaactttgatggcgagccgaagctcatcatatatcttctcgaggttgatattgcttttactttaattctgacaactacaatttttggtatcgagatgatctttctcgcatgtattctctcttacagtgagatggatgcctctctacctatcacttcgatttacccatatacttatacttagtttgtataccgtgtactatacgctaagtatttttgttgtcattatatctcatccacgcgacaaggtcaatgcctcgtctagcacgcttgcagctacatggtttctcatcgaggcacaagtcaacaattagtacatttttatctcgcataagactgttcagctagccgagttataaacatactctgcaaattgtacttttaatgagttattccacatcaagtgtaattgtgattacatatttgagttctttattcttcctagtttgacatgtgtcttcctctgatgtgcttgctgaatttcgggtataacaagtataaatatttagctttagttgagcatgaatgacattttattgttgtccatttgattttgtgttaggttttgattttacaatcgtatttgaatacttagctatatatgtgaatcttgagtttatcgggtttgttgaaaatatatatatgtttactgatttgctcaaaagaaatatacataaagatatatattttgttgagtctatcatggagtactaggcgattgatgagtggcttcaagagaagaatgagattacgatggctgcagttcaagtttcaaaaaaaaaaagtcagaaaatggcgacttgcattgtgaagaagaagacccatgtattaccctaggaggcttgggcttggactgaatgcttttaataaatagcctatgggctaattgagaaaaataaagatggaagcccaactaagaagaaagcttgctcaaatctaagtataataggttatgatgttatagatgatattaagataaattcggatagcaaatgtcattgttttgttataatattatttggaagctatcatatttcttgttttttatattctttctttcatatgtccagttatatgcctgctacctttattct

SEQ ID NO: 101141 - DNA, 1162 bp, Cannabis sativa
gtcaaattaaaactttagatttaatttctaaattttgtaacttttacacatttatttacaaaagccgggatcccgtatttaaacttttacgaaagactcaaaatatatttagtcaggtcgcacagtgactacaaaataaaacccgagattaaacacactaggtcgcaccgccatgacatgtacaaacaccatcttagcccagagctcactcctattcagcctccgcctttcctttacctacacatgaaagtaacaactctgagtcgacagactcagtaagaaaagcatataacaaatcatataatatcgacttgtacctaggcgcccatacacctatttacaaggcttaataaatgagtaagaacgttctttactaaggtacaaacactgtaccacatacactatgtatcaacactatacgagtgttggtagggtttgtttcgtaccttgagtaccactaagtgctataccacacacaccttgtacttttccgtacttgtgctggtaacatcgtaatgtactctttaaacattatacactataccaatgcactatgtaccactttcgtacaagtgttggtagtgtactaagcataacaagcatgcatatatatcacacgtacatacattcgcttatatatatatatctcatatgttctacgctattcttacctcatttccgaattcaagtgagttggccaacttgaacggaaaacttcgtgctggatggatgccctccacttgaaaacacttagatttcttgctgaattttaggaaaattgatgaagatttgcttggtcctcttggacttgtggtggtcgagcaaaggaaagaaagagaagataggtttttcttaattttttcaaaaaagataaatcccactaaattaattcttgactgatactcaaaatggccagctgtcatgtcatggagacgccacctaatccccataataaaaagacaaaaataccgttttagcttataacttaagcaattttaagcctaggggtaaaattatcaaaagccataaccccgctcgaattcagtattccatttatcgccattattaatcccactaagaaaaaggttctagaggtacccatgtgactcagatggccatccatcgcattttttgtcgtcaccgaacaaaaatcataaaaatt

SEQ ID NO: 101142 - DNA, 804 bp, Cannabis sativa
ggtgtaaggacccaatggaggcttgaagcggggatgttacacttgaaaaagagagtcgacttaaattaaggttctttaaattacaaattagggcaatagactgagataattagagtacgtttggtaacaatgtataattttaatcatgttttaatttattttaattagaaaaataataaaacatttctaaaaacatgtcctataaaactgtttccagatttaattttttaattgaaaatcaaattttataaacaaaaaaaaaaaaaaaacacactttcaaaattcttttaaataattttttttaatcaatattttggactccgatcccaacctaaatcatgagacccgaaccctaaccctgaccccaacctagacctagagactcgaaccctaaccccgaccccaacatagacctttagacccagaccttgaccccgacctgggccacggaccaagaccacagactcaaatcccaaactcgaccaggaccctaaacccaaacctcgaaccccaacctgacccggacctagaccttaaacccgatccgaacctaaacctttagacacggacattgaccttgactcagacccaaatcctgactcaaacatatatagaccacggacccaaacccgcacccggacccgaacatcgatctcgaccaagaccctggactcgaatcccaaaccccgaacccaaaccctgatcccaacctagctagacccttgacccgaaccccgaccctaaacctgttctcggacctcgggtccgaacgcagacccagagtggcatggaccctggacccca

SEQ ID NO: 101143 - DNA, 599 bp, Cannabis sativa
tttttttttcatcatgtgagtaatgttattttttggttttttttttttgttcaattaagatatttgaaaataatattttcaaaaaaataataactccaaaattttttgctatagcatttttatactttttttagttagattttttttttaaaaaaaaaactaagatatttaaaaatcatatgttttaaaaaattgataacttcaaaatctatcatcatattttggcttttggcttttttttaaggatatttaaaaaatgatcaacttttatcacttactgaattctctatgtgtatcttaacttacgttctctcttcttctctggagtgttattttttttacaagagaatttaattgtttttttctttcgttgtgtttgcccaagcctgtacgttgatctccttgttgttgccagctcactcaaaaaaaaaaaaaaaaaacatgttattatagcatattgccatgaggagtaatgttatcaaaaagactcatggtattgtgctatagtcattgggaaatttgattttctatacttacatatacctaatattttatttctaaactaatacatatcatcattgaaaatatatgaccacttt

SEQ ID NO: 101144 - DNA, 580 bp, Cannabis sativa
ttttactttcattttgtgatttaaaaattagaaaataaaagtgttaccaaacggcacctaaacattaccttttcttttctgaaatcttttttagaaaccaacttgttactttctcaaataaaattttagaaaagtataaacgtatactgtaatgacattttaaacattaatttcaaattttacagcttaattatacaaaaactacaattttattagttaactttaaggcaataagagttacaaatactcaagaaagacaaaagtattacaagaatatggttctagagttgttttaacatttttatggatttgaagtagtgttttttttaaaggataagttgaaaattattatttttttattatatattaattaaatataattataaaataattttaattaataaatactttttatgaaatataagctcacgtaacttattaagattagagataatgaggatatgacttataaaattaaatataaattaaagattaataaaaaaaatatataaaaattaaattagaaaataaaaaatgggtagacagtgtatttctccctctttttttttttttaaaaaaa

SEQ ID NO: 101145 - DNA, 581 bp, Cannabis sativa
gaattatgcctcaaatattcaagatctctcaaatcaataaaccaaacccattcttctccaatgaaaaattttgaacctatctttctaaaagctttctatgttgtaagccactgtcttcacacattacatgagtttgaaaggggcagatgaacttgatcattattttgatgctcacatgtgctagtcttgtgccacaactacacacctaaaatggcagagctaccgaaggtggaggcggttcggagggccgtagaggaaattactactactacaaaactcacatttagtgtcagttttaaagtgacacataaagaatttagtgtcagttttaaactgacgctataaccatagatgcaaatattgagatttttgcttcattcattaactgacgctaaaagttttttgtttcaattcataaccgaagcaaatagtaatgcactgacgccaaaatatttttgctttagttataaactgaaaaaaaaaaaaaaatcggaacctctaacttcgaggttgtgcttttgagaaagactatcgttgtcgctcaccgcaataagaatgagtttcataattcaatctcattt

SEQ ID NO: 101146 - DNA, 774 bp, Cannabis sativa
cctacatatatggataggaacgttgatatttgttgttgttgatttaagattcaccttaaatgtttgaaacaccattcttaaatggtagcttttggacgaaattcacgttgagaagttctgaatttttttagtgctacggtctgttgatcacattaaagtactttttatgtaataaaatatcattcttaaatgatatcttctaggcagaatatccggttgaaagttttaaaattttaatcaagtctgacgaccacttattattttaaataaatataagttatttatgtaactacacattctgaccaaaaaatatttaaaaagattttatatcattcaaattgtctctttatttatatataatatcttgtaaatacttagtggttttctaaattacggatcgcttaacatgtgtacaaaaaagtctacccaggaatttaggtcgaacagatttctatggtatactctagttaataaatttgcaagtgacgaagagtctaaaatttgctcgctcacttggggaccacctacacctggtacgacatacgaaaataacacatgaaaatatttaagcaaaaattaagaattaagtatgtgcaaaagaaaggttttatcaaatgtatatatcgtaagtctgggattaaagactgcccaatcaactgtatgtctgcatagagaaaataaaaccaagattaaaagccccttggtcagctaaattgtattaaaaataaggccacatgccaaaatgcgtacaatgataaataaaagaattttttt

SEQ ID NO: 101147 - DNA, 548 bp, Cannabis sativa
ttctacataggaatgtttaatatgaagattgattattttttagaatttaaaggattaataatttcgttgaaaaataatttttaagggtaaaatagtaattttacataattttttttttgatcaaaaaggaaagcttcattaatctgaaccaacaaatacaaccaaatctcaaacaaaaagctcaaaacaccaacaaggccaaccggcccacctcactccacactatctattacataatgtggcaagatagtctttctcttgtatagtcatctttcttttgtttacaacttgccatctatactttaaagtactctttacatcatttacgatatcaataatagttctagatagccattaaaaatacatttgttcctgttgatccaaatgttataaacaacagctgccaaaattgagatgttaatccttaatttgagtccaagagttacctgccatacatatatataacctgcacatactaatgactactcataaaaaaaaatctttttctttttcatttactaaaaccaacaagttgaatcaattagctg

SEQ ID NO: 101148 - DNA, 1220 bp, Cannabis sativa
  modified_base (569)..(577): a, c, t, g, unknown or other
  modified_base (705)..(706): a, c, t, g, unknown or other
ttcataaagggggaaataatcttcttggacaaaagtgtagaaatcttgttcaagcttttggtgatcctcatctcaactttaggtatttcttcttctattcttgctttgttatattctctagttttatgttgttctcttctttttctgtaaacactcttatatatatacatattatcatatatatatatatatatttatatcttgattatatagtattatatatattatatatacactctttatatatactttatatctctattatatattatatatattctacattatatataaaaatattattatatatgtgttttttttaatttatatttatttatatttttgagttttgagttgtaactctttttctttagttgtattttatgctttggaatattgtaactctttatttaatctattgtccttgtaatattttgcttatagttgtaattgtcttgatcttttattcatcttattttattcttccattgtaatatctctcttatttctaacagttttgttgtatggtatataatttttgttgtgtatagtatatcatttatttaagnnnnnnnnnagtttttattttattatatatatagattatatattaatttttttagtatgcatacatattttaatagtagtatatttaattttgttcgcataatatatattttttgagtattaatttattattgttannaatttctttgtggtatataattttgttactacgatatattaattttcagtgatacgatatatcaaatactattgtatatatttaatggtccactatatttattcgtttttgttacaatatattaatatgcaatactaaatggattatataactaatttaatttatacatatttttttaaaaaattaacatgtagtaaatatatttttataatttttattagctaatttattatatttgatcattttattaattttttttttaaaaaaagaacatttactaacttagtttctaaatttaagattattttgtatctcaacccaaaaaaaatttatttttagttgtatttatatagacttcttgttatttttgtgcacaagagtctaatataattgtgagggttgtactatgcattgtggcatatttcttaaatgcatcagaataataaaggaacatacataaagctatttgggctatttacaaaaatatgggaaaatgaagataagttttgatata

SEQ ID NO: 101149 - DNA, 725 bp, Cannabis sativa
  modified_base (352)..(357): a, c, t, g, unknown or other
tatactatatatgatataatacaacctccaacacataatatatattaatctcatattaatatataatatgtcacatttaaatgttttaatctatattatttattaagaaataatataacaacattgtcactctcaaggccgagtgaccttgtcactctcaaggccgagttacattagtcagtctcaaggccaagtgacattgtcattcgtaagactgagtgaccttactctcatggccgagtgacttttgccatgtcatctttcaagcattagtcagccaatcttggaaattacaagtgccaattttcggagttaacaagactgaacattgctttctatattgtaaattatnnnnnnttttttaaaattttgtaaaatatcttaaataactataacctacatgaatataaaaaaaaaaattgacttaaaaattcttttagatgttaaaacaggtagaggatgcaatgtagaaacactcaaatatttttataatatggattaattaaaagaaaaagtaggattaatcttgaagaagtgtttcactgaaatacgagtacactacctgtaaaagaggagaggtagaggcggtcacaataaccactactacaaataatacatttagtaacactttttttaactaaaaaaatcttaaggcaacacttttataagtgttgcctcctagaatgttgctaaatatatgtatttatagcaacactttaaaaagt

SEQ ID NO: 101150 - DNA, 807 bp, Cannabis sativa
tggatatctaatgtttggcagtgagttataattagataggtcggtttgcattggattggatcaatttatgcacaagggattgaagattcttgggttgctgtggattttgggccagtttttagtgtgctcgaaaatgagttgaatggtattgctttggctctgcaaatggcaaggaacaaagggatagatcatgttagaattgaatctgattctatggctgttgtgcacgcctttaaggttggtgtgataccttttggctggagtacctttccttcgttttcttattgcttgaatctttgtaagttgtttaagaaagttgttgtatttattcctcagtcggagaattctattgctgattctctagcgtgttgggctagagtggcaaaggtcaaaaattctgatttggaagtgacccgagaaagtgaacgacgcagggaactctcatttaaaccgagaaagtcttatgactatctcctcatgacggacgcgtcgtggaaggatggagttgttggtattgcagtgatcatgatccaacctgctactggtttgtgggcttcgaactctgctcatattaccgcggtttcagccttggacgcagagattcaggccatgttgtgcgctctcaattgggccaagaatgaaggctgggaaaatctagctgtgatttcagatgcgcttcttgctgtagaagcttttgatgtgagaaaatgtccttcggattggaaatgttatcattcatctttcttagttttggatgggcttttttcttttcagtgttgtaatttttattttgtgcctaggaagttt

SEQ ID NO: 101151 - DNA, 775 bp, Cannabis sativa
  modified_base (31)..(35): a, c, t, g, unknown or other
aaccaaaacatatacaaatgaatgaaaaatnnnnntgtttctttattgatgttgagtaaaatagattacattgaaatggaattttatttagggcataaaacctaacagcttcctgtcaccttgtgcccagacacaccccaaagcactttcaaatactgcacatttatggtggtggactgcccaacagcttataatgcaatccttggccgaccggccctagtagattttggtgcagtcacgacaatacgacacttgtggtgccgcctgctgaagttccccactcatcaagaagcttggataggaaccgtgagaggaaatcaaggggtgggcaagtagtgttacaacgttgctgcccacctacccgtcctaatggtccgagaaattattgagcctaaaaaggcagaagaagatgagttgcggggatccgaaaaaattgtagaaccaatggaggatgtcgaggaagtgccagtgtgcgacctcgactccaccaaagtcctccggctaggaaagagcctagaaccgatgaaaaagaacaaataataaagacactgaggggcgccacagatgttttcgcgtggtgtcaagaagacatgaccgacaaaagtcaacattttataacccatgtccttaatgtcaatctggacatgccaccggtccagcaaaagcgacgtcctctcaactcagtgaaggtcaaagccttagaaaaagaggtggataaactactaacgagtggcatgatccgagatgtctactacccagagtggctaaacaaacc

SEQ ID NO: 101152 - DNA, 1066 bp, Cannabis sativa
gggtatgaatctttaaccccatccccgcccccgcctccgaaagtctatctcgtacccgccccattaggggcgagtatccgcgggtacccgaactcgcgtgtataattgccatccctaatatatatacatatatttatctagggttggaaaatacagcaataaatatacgtatagggttctagttgtattatttaatacataataaatggtcagtattactttgtattacaatatttacaaagaatctggatctcgtacctagatcggaacttagatttgacttgtgattgagtttattgaaaatatattataattttactaaatttattaatacaagtcaatatcaaacatagtattgtattaaataatactaaaaaaatttaacataatataatataatgcaacatataaaatataaggaagttatggtatgtggacaatgtgttggattaattagtcttaatcttattatcatttaggaatgacggataaaaatttgaggcacttttgacttaataaagtttgctcttatagaagaaaagttttaagagaattgtgaaaaagaatgaagaaaagaaatagcacatgtataatttggtaagaaagaaaagtggaggtaagaatattgattgtggttcacaagacaaaatatgttttctctaaattagaattaaaaatggtacgaacgtaatgtttagagaagtaaattataaaaaaaaaaaaattgaaaaacaagataagagtaattttggtatgatttatactattaagacaattgataggctttgataaggaggagtgaaaaaaagttatgttagtggttaagattgtcattacgatatctttttttgtttgagtcaagagttcgaaactcactataattttttttttggaagagattatgtttggtctctaaagactaacttatttaggtggtgtcattttagatagaaattctcgaagtattactgatgacttaattaagatagattgatgtataagactcctataactagtacatgatctccgaaattataaaaaaaatttatgaggaagagatttgtac

SEQ ID NO: 101153 - DNA, 1047 bp, Cannabis sativa
  modified_base (907)..(911): a, c, t, g, unknown or other
gcttgggaaacaaagaaacaaaacaagtgtggcaagtgtggacaaaagggacataacaaaaagacctgcagaagaattacagcatagaagtacaaacaaatatagagcaaccaaaaaacaactatactaaaacatttagaaaaacatactgaatattattattggttgttacgttatttttaactgaaactttttatatggagatatattgataatagagaactgatattatgatcattaatatacaaaggacatcaaatattatagttaataattaaatgattgcaagaaagttgaaattaatatgaaccaaacaaaattacataagtgattaaaatgcaaggttagttgtttgtaagatggttgtaattaggtttttaatgagatgttttcgtgggttaaactgaatacaaaaaataaaaatccaaaactagtaacaaaaataaaaccaatttcaataaaaaaaaaacacatgatagaaacaataacttgtctatgattgtcaacataatctgataatagaaaaaacaaaagctaaataaaaaagtactatttccaaaaacaacaaagagataactaaaacaaattcttctttggaccctttggaggagcctcatcttcactatccataaaatccccttctttcatgcgagcatacttgaagaacaacacagcaagcctatcacagtgtttctcaacatcaaacatgagaggaattggtttcatatcaatgaattattcagcaaacgatgccacgaaccacagtcactggaaaacaacccaaaaacaacatcagaaaaactaaaaaaaaaaaggaaattaataaaaataaataaaacaacacttgaaaatataaactataaacaacttacttcgaggtttgttgaggtaaaccatcaaccttaannnnntcaaaagggtctaaagaaaccggtttgtttttctttttgaactcatagaacaaagcaaaaaagtggggcaacaacaccgcaaatggctgacaagctttgtctttcatagcagtcgacaaagagttgtacatgtaca

SEQ ID NO: 101154 - DNA, 638 bp, Cannabis sativa
taatcccaaaactcagcacctttcatatagatgttgttgacccatttgacccatagaatgtcatgcttgtccatgatagccctaacaaacttccctagaatagaacgattccaagatgcaccattcttgaacccgagaccaccaaacggtttgggaagacaaaccttatccaaacgtgacttatgttttaaaaacttcaaaagtaattttttgttcggcaaaagatgctttaagtctcttgtttggcaaaagggagtgaaagagagagaagagatcaaccctccaaactttgaaaattcaattcttcaaacattcagagaattgtaaaaaatgaataaaagaaaaaaaaaattaatacaataattatctttctaaaaagtgactgatatttatattcacaaagataattttataattttactaatatttttttctccattcttccaatttcacacccaataccaaatgatataaagtagagtaactaccatcttcatccttcctacttcccatcctctctaatctctccattccttctattcttcttttttcctaccaaacatagcgccatcagtttgcaacagctttagaatccaaccattatgctaatcaagggattatctataatttacatcaat

SEQ ID NO: 101155 - DNA, 995 bp, Cannabis sativa
caggtccctatcctgattctagctagatacaggtcctggttctagtctgtctggatttgggtcccggtctaggttcggggtgggtcgtagtcccagtttgggtttgggtctcagtttgggtttttatttgggtttgggttcaagtcttggtccttgtcctggtcctagtcctaaacctagtccagttccagttctagttgcgattcgaagttcgagtttgggttagagttcgagtcttggttcgagtttgggtttggattcggatctcggtctaggtgtagatcgggctctgggtgtgggttagggtcctgggtctgggtctgggtcaaggtttgggtctgagtcccaggtttcgatctcgatctgagtctgggtttagttttgggtgtaaatcctgggttctgatcccagtctgagttcgaggttgggtccgggtgtaggtctaggtttgggtttgattctaggtctgggtctgagtttaagtcccgggttcgggttcaggttcgggttttgtcctattatgggttcgtgtgcgggttcttatcctagtttgggtccagggtcgtgttcgggtcccgagtcttgcttttagtccagttcctagtctgggttcaggtctaggtctcggtcccagtctttgtctgggttcaagtttgggtccttatcagggtccggatcctggtctcggtcgcaggtctaggtcccggtgagggtttaggattaggtcaggtctaggtcccggtctaggttcgggtcccaagtctcatgtcccaatcctagtcaagatcttagtccaggttctcgtcttagggggatatggtttgggttcggttctcgtctcaaatcggggtcctagtcacagttccaattccaattcggggtccgggtttttgtctcggtccaggttggggtcggggtctgagtcttggtacgggtgttttggaacctagtctgggtccaggtctgagtcggggtccaggtcccatgtttcaatt

SEQ ID NO: 101156 - DNA, 535 bp, Cannabis sativa
tataattctcttcgattcactagacttcagaaaataagtcaatatgtgatatataatcgaagagaataatataaatcttcatggtgttatgttgcctaattcatgatagattatgagtttcttttggttcactagacttcagaaaataagttaatatgtggtatataaccaaatggaagaataagagattcaaaataatgccgtcgaaatcatcactgagtgtggatttcttaaaaaaaatataataacgataataagagcggaataaaaaattcggttgaatatgtaagttaaaaggaaaatattctgagcaaaattaattgatctaccctaccaaaattactctttgacgaaaattgtcagcgtgaatctctttgtcattaaggatcgcatatatgtatatcgataatgatttatgtatatatgcgtagtgtaattctttggtgtccaatcgcatgcttactttaaaaaatgaatatgtattatatatgtttaactgtcaaatatatatatatatatattgcatgttcatggc

SEQ ID NO: 101157 - DNA, 579 bp, Cannabis sativa
aacccagtcaaaagatcgcagacaaataaaaacaaacaaaaactttttgtatcaactcacaaccatgtataaattaaaaaaaaaaaaaacaaatttagtaacattttttcaaatgtgactataaaccagatttttttaaaaataattacgatttattattattattattatgactactgagaataatgaaaatggtgaagcaggagacaaatttgaaactattttattaacataattaatgtacatacaaaaaaataattccaataaattgatataatatctttttcatatctctaaagaaataactaaatgatccctcaacaatattttgcaaacttgcccggtgatgtaatgatttcattttcatccaaataagtcttcttctgcaacttgctctgtttgatatggtagtagctaagataaagataatgtgcttctaacaaaaaaatcttccagcatagctacaccaaacacaaaaccagcaatcaaatattaataagagttacaaaaaaggtattagtattacaagtaagagttaacacaatacaaataaagttacaagaaaaactaaacagatca

SEQ ID NO: 101158 - DNA, 670 bp, Cannabis sativa
tctaattacaataataatataaatgaattttaacaaaaataataatataaataaaaattaacaaaaataataatataaataaaaattaatgaaataaaaatcatgaaatataaattcaaattattatttcactggactaatatatttttttatgaatcatcatttaaatatatattccacaacttgaaactttacaattgttcaacagtaccttaaaggcctgataatagacttgtaacatttgcaacatttccattcactctctatctatttgactaactttattgaagctaattcctgcaagcctccctttcatatttatctttgtatgatgaaaaattgaatcaacaaaattatttgaatgattccaatacttatcattcctagtataccagattctatatataagagcagtagttaccaatatatacacctgcttcttcactttctaatcctcttcttcgctgaatccatttgatcaacttgataattgcttgagcagacgacacacttttcttgaatcaaaaccaagcacttggaggggacacacggcaacacctccgaacatgcaacatatcttcctaatcttgctccagtaccacaacaacaactacacttctgtacaatgaatggaaaggattagcatccatatcttccaagttgcacagta

SEQ ID NO: 101159 - DNA, 661 bp, Cannabis sativa
tacggttttttagtttcgcggtgcacgtgcggtttggaaaattagaaaaactgcatgtgcgggttggtttgaaaaaatggtcaaaaaccgcaccgcgaacacccttactctaacctttgttctctcccctctctcgctcgatacctgaacatcccaacccaagccacttgaaccaccccacaaacccacaaactcgaacctatcagaccacttcaacattcccaccgacccacggcactctcccaccgacccacggcgcaccaccaccgaattaaacacaatgtcaaaggtgagttcgtgttcgatattttattttttattgattttgtttgtgattttagtgttaaagttagattttgttagatttcgagacagatttaagttttagaatctcaaatctgtaatttgggtaagatccgatggaactgtgagttcgcgaggtagtagacgtagattcgatgggtccgattgtgtctgatgtggagtccattaagggaggtctgattgtataaacgaggtgatgtaaatgtaaggtattttagggatatcataaaaattattatatcctacaaatattaattattatgagtttagggataaaattttaacccgcataaaaaaaaaaattaaatttccatttatttattcaaaataaggattt

SEQ ID NO: 101160 - DNA, 1060 bp, Cannabis sativa
gtgaattaccaggcacgtgcatgacctatttgcgcaacaccgcgccaaacagcaaaaattatgggggtgtgattgataagattataatttatattaaagagtattggttcatagaagctaaatgtttcaccaatattttatcaattgtatcttatttttctagaactggttcatagtctaaaagataccaaattcgaagcattttacactcatatattttacccaacaatattaattttttatagactttcttttgaaatatgtggaggattgttgtaagatatagatatatgtgtatatttataatattatgtgtatatatttcaaaagaaaggaacgtggctcattccatttgttgacttggctgtatatttgaaagatataacattcctattattttgccacttgatccacttttttctcaaaatcaagagcaactttaatttttggtttaacaatactatttgggttttcacattaatgtttaacagaatatcctattatttaacagaatattcgttattaattttataatattattatatatatgtgtaaaaataaaaattatatagttattttatataaaaaaaatttaatttaaatttaaaatagttaaaataggatagatatttttaatcatacttttaaatttttaatttaaattgaaaataattaaaatattgtagatatttttaatcatattttgaaatttattggtttaactttaaattaaaataaaaaaattatgtagatattttatacaaaaaaaaaattaaatttaaaatattaaaaatattttaaccatatttttaatttttttattatttattttatattttaaattaaaatattgtaataaggaattgattgtttttgttttagttatagtaaaccgattcacaaattatatttttcgtaaagtttgagaataaaaaatctttacatcaaatttatgaattctgtctatatatatagacaccctcaaatttgattatgtgagttttggttaagaatatagtaaattacattcaaatggcacactaatgtagcaatagctaaa

SEQ ID NO: 101161 - DNA, 562 bp, Cannabis sativa
agaccacgagattaagttgttgcccaggtagaaaacatagccaccagttgaccgtcgatcatcgacacaactggcccagtcagcatcggaataactttaaagagtcatgtctgttgctggtgtgagaagtaagccctcagaaatagtccccttaagataccgaagtagcctcttgcatgcttcccaatgagggacagtgggagccttaagaaactggcttagtttattgataacaaaagccacatcaggccttgtgagagagagatattgaagtgcccctatagtacttctgtagagagtaggatcttcaaacatctccccatcattgagtgaaagtttagttgagttgctaatcggattggaacaaaatttggcaccctccatatgtaattttactagcaaatccgtgacatactttgtttgtgagagaaacatccctgttgaatctctgaaaaatttctatgccaaggaaacaatgaacttcaccaaggtctttaagagagaacttgtgattaagatcagtgatgagtgtggagatgaggctttgatttggacctgtgat

SEQ ID NO: 101162 - DNA, 566 bp, Cannabis sativa
acgcaaataataagcataacaaaagaacatattcatttttattttatagaaaatctgacaatataacggctgtattttgaataaacccaacaatcataacctgcataaatatttgtacacaaaaatatatttggtactcggtgccccagaacagtccagaaaaatatgcagattaagttttcaatttttcaaaaaatttccatatcataaaaatttagaatatgtctaatgttatgcaacacatataaaaatcatgtccaataatcaagttgagtccctacctctctcaagtcattaaactttggtccaaaagacgatcttagctctcaagtcccgagctccaattgtttggtccaatcttagatattactctcacctataccatcaaatggctaaataattatcatcattgcattctacatttaaaatcgagtcaaacgtcatataatatgactatatttaaaatttggggttccgaagcctcacttaaacggtgcacattaacaatcaatggtggtaaaaattggtgtaacaaaaacgtaaccaaaaataggggtagtgtatat

SEQ ID NO: 101163 - DNA, 952 bp, Cannabis sativa
taattctcattaatcttttttactaagattaattaaatattattttagactaaaataatacatttctatcataatattattcaataataatattatatttaactaatcaatacaattttatcaaataaaactaaatagtgaaattttgttttaattacttaattcataattgatataattatacaaaataataatttatacacaattactattttgtcctcaagaattatttctcatagaaattaattctttctcaattcattcttcaaatcaaactttttcttgtacaatgttgcattgaggtgatttgggggccataaacctatattttgaaactccaataaacacttaattattactgaactcttcaataaaataattaattaattctattattactccactattaatggcactcgttgacaatataaaattatattgatagaattcttacttgtagtttgttctctaattattagttcataattatagctagtcaaaattaccgtttttacccttctaattatctcttgaattccttatgtaccattagtttaatgtgaacagttaatctataatctcattatagaattggattcaactgttagcactctcagaattgacactataagagaactaatattcgatcctttcggaaagcttggattccattattgtattagtatgttcccagtcacttatgttattaagttctcaaaatagaagttgtaagaattatcttttttgagaaactttaacgagtgaatcaaagaacttaatgaataactcttttatgataaacgacacattgataaaagatgttagttcatatctccaatcatacataattaaattatacaaaatacttttactaaatatctatccacatatgtgatccgaattaaaattacacgcactagagtatatcgcttagtaaatcgtacttggtaat

SEQ ID NO: 101164 - DNA, 625 bp, Cannabis sativa
actactgtatggccggctccagcaccagagttcctcgaagggtgtcgtcgttgcaaattaggctattttaatggtaaaccggtgaggcttgaatctttatgcaagtattgcaagtctcaccgacaaggtaaagaattttaattttttattttaatgttttaatgtttgtttttttaatgtttatttgttttgaatgaactttttagtgtttgtttttttttttgaatgacttttaatgttttaatgcctgtttactctttatttatgttcaacaatttttacttgtttcctgtcaaacgcttttcttcatttttttttatcttgaagtcgacaatatatcaacattctattgatatattgtcgacaaacatggtcgacttaatgtcgacatactatcgacaaaatgtcgacaaattgtcaaataaattatgttaatttactttttaatcaacatgatatcgataaactgtcaaaatcatgtcgataccctgaccattcttcgcataatttcgacatagcatcaatattctattgaaaaactgtcgataacatctggaaaacccagatttcgacagaaaatcagatctaccagatctctaccatttcagaccaaaaaataccagtt

SEQ ID NO: 101165 - DNA, 1367 bp, Cannabis sativa
ttgtaaactttctttagtatagtattttgtaagttcaaaaaaaaaaaaacctagtaaaaattatatcaaagagaacctttattagtttgtactacctttatttatttatatattttgttttttcaaaagcaaagttcgtacctttatccgttttcgtaacatgtaataccttaatattcttataacataaaaatcaaaatacgatttttaaagaacgtatttgtaaaaaagtagaagctataaatcatgggccattcatatttgaattactgtatttttaatctgaatttttgtgaaaaaagttgaaagaaaatattttttcatatatatatatatcaattaaatttatctttaaataaaatttaatttaaataaatctattatatatttttataagtattgtatctaaattattctcatactttcacataattaagacataatttcaaacataataaatttatgttttttagagataaatatgtaggtttgtaaaaaagttgaggcaaaattttaattaaagaaaaattgatactgtcatgaagtgatagtggtaaaattggtagaataattaaaaaaaatataaatataatagattttaaaaaaaaatgtaaaaattaaaaacattaatttaaaaaagatttactaatttcctcaatttttattatagcgctttttaatattaatcaaaataacaattttttattaatgtaatagtagtgtgattcaccattccattttttctaatagaccaaaatttcataaaaccaaaacttaatatgctcatcatgcaaagtggattaatcaaagagaagagaagaaaaggaaattgattaacattattctatgaaagtggcacattaaatgaggtctgaagcaattaattgaaaaagatattttgtcacccaaatatcaaaacttgacaataatgtatttgtttgtagtttttctatttatttattattattattattttaataataaaaagaaagaataaccacaaaatcagtgagtatgttgatgaattattgttactttatttttttttttaaaaaaaataataaagtaactagtatatattttatacctttgacacataaaaacgagagagagaaaaaaaagttaaatattttatttttccgtaatttattctataactaggtaatgtaattgctttttatgtggctattttaacttgtttttgaaattataattgttgatcgaagttttcgacaatcagttaaatgagataataataagagttttggaataattaatgcatgtagtttttacgtgattcaggcattaataagtcgtagtccacgagtctcttgtattaatgagagttcttatacagagaatgttct

SEQ ID NO: 101166 - DNA, 1060 bp, Cannabis sativa
catgctgcatatgctataaaaatatttttgaatttagagtcttcatccacctccaaatgtgtgatcgtgcctggtttcatctttcaaaccatgtacaagtaagttggaagatttggaaaatttaattcatgtgaacctctaagaaggttgtttgaaatctttttccctttccaagctttctaatattttatcagcatgtgattgttttgcataatattcattattgctttaggtttcagtgtctctctctgaccgtcaaaatagtacctcatgacattagcaactgtatgcacttgcttgacaatgctttctcaatcggctgataagggagcaagtgtgagtgggacaataagtttgtattgagaaatgctttaagttgctaacttttggtacacgcactgcccattttcatgacttgtcaatgaattttcacatataatgacttggcagattttgcgatttttatctcaaagtaagccttcatcgcagtatctttcaacgtaaacttcacctcatctttattcttgatttcttgaccaatcgccaaattcgacccatttttgaaactaaatgtatcttcacttatgagttgattttgttggtctgagtgctccaacagatagttaaatgggtcgatgtaatttttcaatcatcaattcttcctgtgaatagtatggagttggagatgatcctgttgtgcttttgttaagatgatccaaaaattcacaatcgagattaacaccactttcacctggtgcagaagcaatataacaaatattttcttcaaagtagaattcattatcaaagtagttatctactaagggttgttcaatttcttttgtacaactttcaatatctttttcacctatgtcttacttcatataagctccacacgtagtgtagatctgcgattgttctcttcacaatccaaaagataagttgcaagacattcatcccctcgtaaaataagtggcggcatgtttcctccaagtgttacgggtaagtaacttacttttaattcgatgtcgttttgatgggctccaatcttcttatacaattt

SEQ ID NO: 101167 - DNA, 2135 bp, Cannabis sativa
actttatttttagcttgcatttagtgaaaaatatacttggaatcacaaatgatttgtcgcaagtcttgcaaaaaggtgatcaagatattgtgaatgccatgtatttagttaaagtgtacaaggaacaattacaagtgatgagggacaatggatagaattcttttgtagaagaagtttctaatttttgtgttaagtttaatattgatgtgctaaatatggatggtatgaattgtactcaagggaaatcacaacatagagctccaaagcttacaaatttttactattttcgtattgatttttttcaatagtgtgatagatttacaactacaagagctaaataatcgttttaatgaggctaacactgagttgttactttgtttagcgtgtttgtctcccagtaattatttctatgcttttcacaaggaaaagctactccgtcttagtcaactctatccacatgatttttctataatggatttgagggtactagaattttaacttcaaacttatgttgatgatttgcgttcccatgctgaattttcaaaattgaaaggaattgttgatctttgaataagattagtggagacaagaatacatgaggtacatccattggtatatttgcttattaaattggcattaacactgccagttgcaacaacttcaattgaaagggcattttcagctatgaacattgtgaaaaatcaaatgcgcaacaaaatgaagatcaatgggtaaatgatagcttgactgtgtatctcgaaaaggatgtattcaatactattaccaacgaatctatcattcattgttttgtggtttcttgatgttggtttaggtgtgttttgtggtgaatgaacaagtttgagtttaaaaactcaaacttgagtcattaatggcatgtttggattttgtgtatgtttcttgctgttattgtttggaaaatattatttgaggttggtacatgtgttctggaaggtgttgcatggtttggacacgaattggataagttttgaacttatttgggttaccttgtgcaaaccggttaatcaaatttacaggacctgtaaaaccaattaaccgaatcaggtgcaagtttcccaaattgtttgattcgttgattcgtgttatttttagggccttagttggttattttcttgatacttagggtgttatatatagcagaacccttagttgggggtttgggtttcccaaattagggttttagtgtgttgtttacccatttatgtaatgtgactagggcatccatccagcatgaggtttttcgttcaggtcggccaactcacttgaattcagaaacgaggcaagaatagcacagaacatattatatatgcggttatgtgtatgtgtgatttatatgcatgcttattgtgatttgtacactaccaacactagtacggtagcggcactaagtgcattggtatagtgtacgatgtttaaagtgtacaatacggtgttactaacactagtatgggtaggtacagagtgtatatggtataacacttagtggtactcgaggtacgagacaaaccctaccaatactcgtacagtaacggtacgtagtgcatgaggtacagcggtcgtaccttagtaaagaacattcttacttatctattaagccttgtggataggtgtatgagagcataaatacaagtcgctaatatatcatttgttatatgcttttcttactaagtctgttgacttacagttgctactttcatgtgtaggtaaaggaaaggcgaagactgaacatgagtgagcttcgagcttagatggtgattgtacatgtcaggatgacgcgacctggagtgtttggtctcaagacaccttggacagtattttgtagtcactgtgcgacatgtttgcaaatatattttggctgtatttgtaaaagtttaaactcgagattccaactatgtaaatatatatataaatatgtttatacagtttaataatttcaatcaaagttttaatttggcacgatttttgagaaaatccctttaattagcaaagatagcaagtttatattagaaaatctttgtagcctaaaaattagagcgctacaaaaaattttaaatcgcgggatcccaactatgtaaatatatatatctattctatat

SEQ ID NO: 101168 - DNA, 804 bp, Cannabis sativa
tagagcctgtttggctgtgtttttcagtttttagtttttgaaattttatttttaaaagtgagaatagaaaatagttttttttttttcaatttaaatatttattggtgtttgacacaatttttttaaaactatttttagatttattcttactaaaaaaatcaatattttaatactataccatgacatgaacccatccgggttcgggttcgagtttggttcctggttcagtattcgagtatgtgagcaaattgtaaaatataatatattagacaaaaataaattatttttgaaaattaaaaataacattttgatgtaatctgttttctaattttttcagtctcaatttttaaaaaactatttttaaataattttgcaaataacccctattaattttaaaaattattttcaattttaaaaaacagaaaataatttttaagttatgaaaccaaacatctttttagtttttgatcttccacctataattttgatttgttatttgttgatatatttttttattccatattgaaagaatcaagtgatgagttgatatatatataccaatatatattaagtttgtggggctcgattaattttacgtagaagatttttcataaatatgggaatttttggtgccatttacttttttatggcataaaaaattaaatcaaaaaaagatatagaaaaaaaataattaattgtaaaaatatgggaaaccaaaaagtatataaataggcttaacttaaaaaaaccctcattttccaaattaaaacataacagaattccatctcattcgatctctctctc

SEQ ID NO: 101169 - DNA, 634 bp, Cannabis sativa
aacaaattcttgattcataaacaacaaattcaactgaaacaaatacactaaaaaataaataaattatacctaaaagaattacatattcatatcaattatatattcatacactttatgggtttcaaaatgaaattcgaagatgcaagagaacccagaacactaagaacaaagacttgcccaaaactcgtccccctctgttttcggcgagcacctcgcttctcgtacgttgccatcatgctcaacgtgttgctggatagtcccgtcaacaaatctagaaactacatcgtctcgttcacccaatgggcatcgttcgtgtactagagggtagaccggttcttcgtctcaatcgtagtggaataggagcacaacacctcgaggaatttcttcgtcgcagtcgatcggttcatgtttgaggcagaggattcgaggttcgtggagatagaggatttcttcgtccagtcgaccgccgcttgatttatttgtaccggagtcgaatcgaggggcagtggagacaccgaagtggaggcggctttggatgacggtgatggtggtctgtactggaggcggctttggatgatggtcatggtggtctgtggaggcagattgggtgaagacgaaatagaggaagaagagg

SEQ ID NO: 101170 - DNA, 550 bp, Cannabis sativa
tttcttcacaattaagcccttacctagtgaaaattcataaataagatatagtctaattttagaattgttagaccgaaattaaaaacaatgaagctggaacgaattacggatagaaaattcttgctgagtcgcggacaatgtcgcttcattaagacgtttcgcgacactgaccgaagtgtgcacgacagtctagcgaccacgacgtccccaggataaaacaacctttgtatacgtacgatatgttctccaacgaactatattggtctattacacctttaattttgctgtgagaaaaatcgtaaggaagaaaaaaaattgatgttgaaaaggatgtatattcttcatttttctgatacgacttatatagagaaatcgatctaggaataaacggtaagaaaacagtaatattatcgtggaggaggagttggatcatggcagtaaaaactgaatcattatgtaacgccctaatctataggaacgccacgtgtgtgaatttataaaactagtttaatactaatatagtaattaattattaaaaactgtgaggata

SEQ ID NO: 101171 - DNA, 720 bp, Cannabis sativa
ctacttaaaggagtgttctggtaaaccccatatctctttcagtataaaaaaaaatagtctaatttttttcattatcctgtacgttgtacctatttaggaccacatgtaattttcttttttaaaaaaataaatagtttacagtgctaaaaataaagttcaaacagttgcttaccacacgtataagaaaaaatagtcgcgcgtgcaacaaaatattttagccttattttcaatattgcaaactattccaaatttttttaaaatttttacaagtgatcctatatagtttcaacgtacgcaataaagaaaaaaaattacactaaatggctcacctgaatgtcgaaatagatatggagtctaccgaaacaacccatagggggatgtactgtagacttaccctatatattttcttatcattaaagataattagtaaattgaatatgggtaatactattttggatcttgtattttgtaaaaattactgatcggatcctctattttgttaaattataaaatggaccctttaaaaatggtacaaaataatatatatcctaaactcaatttttgttattttcttaatataattaacttgaagataatttttagcacaaataaaaatataaaatgtaaacagtctttttatagcatcaatagatcaagttattattaagctttattttgataaaaaattaattcgaactactattttgtaccattttaaaa

SEQ ID NO: 101172 - DNA, 942 bp, Cannabis sativa
gtcacatggtttctggggagaggctgttatgacatctgcttatcttataaacagatgtgcctcaagtgttattgaatttaaaacacctgaggaaaggtggtgtggtataccacctgatctctcaaacctaagggtgtttggttgtagtacatttgtgcaccaaagtgttggcaagcttgaacctagagctataaaaggggtttttctaggatatcctgaaggagttaaaggctacagaatctggttaagagaaaaagggggttttaaaacgataattagcagggatgttatgtttaaagaaaatgaattttcttgtttacttaatactaatcctgcaggtacagtagatactaaccatgcaggtacaatacagtttgatcctcttctatggaggctagatgatcaagaagaacctgatataaatcaggtggaaccagctggaaatgaacctgatcaggatcaggtggagcatgcataaaactctaacagggaggaaccacagaatgaagagcaacaaggagatgaaaatgaggttattcaacccactgaagctctagatgactaccaattgactagagacagagagaagaggacaccaaaccctaatcctaagtatagtttcaatatctggaatgaagacatagcctatgccttcatgtcagctatggaatcactaaatacagagcctcaaacatatgaggaagcaatgacagggccaaatgctaagaagtggtttaaagctatggatgaggagatggtttcactaaagaaaaacagaacctggataatggctctaaggcctaaaggaaaaggataatagcatgtaagtgggtatacaagcataaagagggcagattcaaggaagaacctataagatttaaggcttggttagtagccaaaggatttacacagaaagaaggagttgactacaatgagatattc

SEQ ID NO: 101173 - DNA, 1354 bp, Cannabis sativa
gtggagacgttacttgccatccaactggacatatattgtccggccaaacgtagctgataccattcttgtgggccgtccaagttctggtgcctttggcattcccatttccactcctgccgtgactgttgcggggcataccaaccaaccaccatccagggataggatgatggccagcacaaaacaaaccatgcagaagatttctgcggttgaccctcacgtggctcggcatgccacgatgccgagtgctgaacaggcccagcctgctgctgaggaagaggattatgagggggatgttgaagtccaagaaactgaggatcagggtgaggttcgtcctgatagtacatctgaggccgatgaggaaggaactggtcggcctttgcgcttcggaggctacaatgaggccagagaaccagtgtcaaaggctggtgacgtcctggaggaaggcaaggattacatcaccgaggagtacgccgaggcgatccctcagaggaggcaaggggcttttaaagctcggtgggtgtctcctctgtccattgtaacccaggcccagttgaggagtttggagaaggatggatacctgggaggttttgaatgcttcttcccttctccaaatcatcgggcaactaatccaagagaggggtactatgtctggtccggtgcccatactaagcaaggtgcgatggtgcctttgcatacgtacataaaaaggattacggactattaccacctttgcccgactcagttcacacccaagggcatcaagtatttatctgccctgttcatcctctatgccactcaaggatggggtgagccgtccctgtacgacaccaactggctcttcaatttgaagtcaacccccaagcagagcaggtcggggtacttcatcttgcatttttttctctgatttttacacttcaagatattttatgtttgcttctaactgtgttgttttatctgtgtggaaatgtctcagaagatgatcaaagctttgaagaagagagtaggagacaactcgggcttgtctcctctcgccaagaggtctaagggtggtgagactccgtccaaggagaaggcgccagttgacgaggtcattgaccttttcgaggagcgaccccttgtggaacctctagctcagaaggtcttgaaatccaagagttctagaggagggagctcagacggatctgaattagttagggccccttcaacaaccgtggcactgtgcatgaaggccagaagaggtaaagacatccttcaacactacctgacccgatcacttccggaagtgagcgattagctgtctagagcggacatcgagttatccttggaactcgtcttaggaggagttttgaaggaa

SEQ ID NO: 101174 - DNA, 1160 bp, Cannabis sativa
ttttctttttttaataaatacctccttttctagtatcaattaaaacccttaatcgtacaagaaagaaaagccccaaattattttgtttcagacgtagaaagaaaactctagaagaaaaaaccaaaactccttaattttttaaggcaatacaaattaagcacacatttgaagcaagagatagaagaacacaaaacatttacatcatcaatggagctaacctcaaagagaagctcagttgctgcactatcaaagaatcaatttatatcatcaatggatggagcttccaaatcacttaaataaatctaatggtagccttctatactttcaatcaatcttgtattctctcaatcctaataatttaattttcctctcaacttcttttttgagtacacacagatgtgggagagctttctctcacactaaaaatattttcagaacgttttttatagtgagaatcttatgagcaaggtagagtgtcctcttatttatacttaaccttttttcacttgatttttttttatctaattaaatataattgatattataaaggtttgtttttaaattgagttaactaaaaatcgttagtaactaatttgtgtttaaatattatatgtataaatatggtttaatttatttacatagtaattttatttgaataataattgattcacttgttgagaaaaatctaaaaaaaaaacgcaatttttcatttagttttacttagaaagcgcaccaaataaaaatcggtggttaccacatatatatactcttttctatctactcttaatttgctcaattacttttttattccattacagagagaatgggtgagagaatggatgatgagcttctgcaaataggtatgtgctatatatatatattttgttttgcaatattatttcttttatttaggagataattttatatatgatcaaagataaattataaagactcgatcataagtatgttctcttgttttttcaatttgatattagagatgacatactaaattaaccaatgcttccttagtgcttggtattatatcagtttatatactataatgaaatcaatagtattctccctagttttttaaccttttgacaaaaagaaaaagaaatagctattttcataacattttcttgaaattttttattggcttt

SEQ ID NO: 101175 - DNA, 657 bp, Cannabis sativa
tggaggcttgaagcggggccgttacagtaagtaaaatattcctattctactcactaataacaacctagaaaatgagaattctcttgcatcatttaagtactaactactaaatctaacctttctagtattaagtctaacttaacaaattgccattgttgaccaagcaacaaaaattaattgaaaaaacattacaatggattctttaatcattccagtctcaaaagcttagctcatagctaaattagcaaacataaaccaaaatcgtaaattaatatccacgaatactagaatagttatgcaaaatgaaaaaatacaaaatagagaagaaaagagaacaaatcctagattaatgatgttgtaggtggaatcttcttgtccttacattcctctttcaattccttgtgttttcttttttttcttcttcttcttcatatgcctttgataagccaaacactctttcttttcatgttagctctcttttatatagctagggtatacaatatcttttctcctctttggcccactaaattggatcacttttcagtccaaaataactccatctggcaccacttatggataccttctgcctaggcacgaattatggacatgaatcttagcaatctaggaaattttagcttttgtttcttttcccacttc

SEQ ID NO: 101176 - DNA, 992 bp, Cannabis sativa
tagtttgatgtattttatatattactaggtagattttacgttccgagccacttgttagttttatttgaggttttgttttttttttatataaattttggtaattaaagtgatatgattatttaaacaatttgttttatcaaataccatatgaaaaataaaataaagtatagtgaaattttatcttgatctttcatcgtttcagtagtttaaacggtaaattaattgtactttggacttattgtttgttttgaatatgcatacaattggactcaaatttagaatacccttatatgaaaatcaaagcaaaacactgtgaaatagaattttaaatttactgacctattgatataatttccaaacaatgaaaaacttatttttctaataacaatctaatgttgtaacataaaattaaacacataaaagttttaataaatacataaacacaaatattaaataaatatatatataattggaagaaaaaaaatctcctcagcctaggccaaccactagagaccactggagtcggagataaagttgaagttgcgatacaacggtaagaaaattaaggcaggaaaataaatacaaacctgtcaatgtcaaacaccactaagagaagggatgaatcagagtgatacaaggaaagaccttcataaactcttgtaaataatgacgaaaattaaaacaatatatttacatatttatatacatatataccattgatacaatcaagatagagaatgagagagcaatattatacagagctgggctttggtttttcacttgaaaatagaaaaaataaaaataaaaaacataaattaacacaaaaaataaaccaatacctatatactcatttttatacacatgagatacatatatttgaaagaagaattgaacttctaatctgtgagagaataaaaacataattggttttgggtctgagaaaaacaaaaagtccattttaatacaaatatatatacacataatacttgaaa

SEQ ID NO: 101177 - DNA, 1094 bp, Cannabis sativa
tatagaatctttaaccaatggttactaggatgattcactaatacctcttcattggtggaagtaatctcggttcgaattactggtgtagtatgatatctaagtgaaggtgttgtatacaatatagataatatatggcaaggacaaatatgaataaagtgttagaacttattttcacatgatcttgatttactaacatgtatgttgattataggactataatctaacatcctacatatgaatttcttaaagaaattaaataaacacatataaagttatagaaaaccttacattggtagcagcaaaatatgatggatccttccgttcagatctctaaccctttatcctttctgtcatagagtattaccaagatctgaacctggtttttccttcaggtgatggaattcttcacaatcttccacactatatttgagtattgacttgaaatgtgtgggcaaatacactttcactatagggcaggaaagtaagagcaaaaaaggctagggatttcaaaaattatatggtgctctcttattttgtctgacaaagtgaaactaggttattaggttatgaatataaaagcctatagttatctatttatatgatgtctatattaggttagaatttgtatatggaataaaaaaagataaaatggctttaaattaaaccctatggccgaattcccttgtgggccttatgagtttcaattttaccactttattaaaacttatctttcttttctcaaataccatattttgattctatctctataaatgtcaattttatctatttaataattataaaaaattattaaataaaatttctatttaacttatttattaattagacctttcaaagtctcttaattaataaataaaccatcaaatctattttcttctcagttaagcccttgctttgtgaaaattcataaataagacagtctaatttagaattctaactgattaattaaatcaattaactgagtctacaagccagtattatctgaactagtgcggggatcatgggcctacataattaaggtcccaataagtagttctagaatttaccaagtaaattctctatcttattaatttctc

SEQ ID NO: 101178 - DNA, 883 bp, Cannabis sativa
ttgatgtggaaaatgaggtactgataggttactttttgagtttttatgttggttttttattttattttagtatataatataatgtttagtttccattttaataacttttcaatttttattttgtttataatttttttcatacgtgtttgtcattgtaggatgatggtgagggtaatggtgcagctgttgatgatttgggtggtgttaaagatgatggtgctgaagtttataaggtgtttataagtttataagtttttaggatgatgatttgggtggtgtttttatattattatttgtgtttataggttttattatatatttgtatctttttgctgtcttttttcaggaaataagacaaatatcagatgctgttgttaatgaagttgtcgttcaggctggtgatcaacatgctgaggattgcatggataaggttttgttttttatttatttttgttttattatgcttttgtattttgttttgttgatttagtaactaatatgttgctttttcaggttggtaatgatcgtccaagttttgatattatgggttccttgttggcccagtctgaaaatgttgtagatttgttggaagataaaaaaattgttggggatgacaatgttatagaagcatctaaaagggatagtgagagcactgacgatggtattacatctgctgagatgttaattatatcagagaaagtggatgctgtttgtcatgattatgagttgaagaagagtatggtatgaattgtatatatttatgtatgattaattttttaattattttttgatttattttgactttttgttttgggttttcatattattgtaggaaaaatccaaagttattgatttgggtagtgctggtaccccaagggatttg

SEQ ID NO: 101179 - DNA, 526 bp, Cannabis sativa
ctaccaaactagtaacagaattagttagagcatgggccacaccatttgtaacccgcaaaatgacacaacaagaaccaccactaactgcagctattaaaaaaaaaatctcatcaataatacgtttgaacacaatattagaatcaagaaaattaacccagttacaaacaattgaagcatctatctcaactttcctcactttaaatcccaccaaccttgttaaaaataccctatcaaatataccaattggagtaatatagtcattccgtcttcaaattgattattaaattaataatgtagtgttaacctcaaaaatccatagtgttgattcttgagattaagccaataattagagacatcaactttaaaagtcagctgagaaatggctgaatcaacatatatggctaggggctccttaatcccgagaatcgatgcttgtaattctcgagatatatccacataactcagagatcaaccccgtaataactcgtgagtgggtctttgcatgagcgcatgtgtgtgtgtgtgt

SEQ ID NO: 101180 - DNA, 706 bp, Cannabis sativa
tggcatattcaaacctaaggcttatttggctcttcaagaaccaacaagtgtcaaaatggccatgaagcaagaaaaatggctcaatgctatgtctgaggagatgggggctctaaaaagaaatattacatggacctatgttcccttacctgatggtagaacacctatagggtgtaagtggatttacaagatcaaacttaaccctggtggcactataaacaagctcaaagctcgattggttgctaaaatatttcatcagcaaccagggttttatttcacagagactttcagtcctgtggttaagccagttaccataaggattgttctgtctttggctttagcaagaggttggtgcattcaacagttggacataaataatgcttttttgaatggtgatttgaaagatgaagtgtacatgactcaacccccgggctttgagctacctgatgctcctcatcttgtttgcaaactgaataaacccatttatggccttaaacaggctcctcgggcctggtttgacaagttacagcagtgtctattgtcttttggatttgtctcttcgaaatcagatcatagtctcttcattcaacatacatctagttctgtgcttctcatactagtgtatgttgatgatatcatagttactagaagtaactctgaccaagtctctgctctaatccgtgccttagatagtaagtttgctcttaag

SEQ ID NO: 101181 - DNA, 775 bp, Cannabis sativa
ttaactaggaagaaccaacggtttttatggtcagataagtgtgagggaagtttccaagagctgaaacaacgactgattacagctcctgttttagccttgccatcagtttaagaaaagtttgtggtgtattgcgatgcatcaaggcagggtttgggctgtgtattaatgcaagcagataaagtcatagcttacgctttacgacaattgaaagattatgacaagcgttacccaactcatgacctggaacttgcagcagtggtgtttgccttgaaaatttggcgacactacttgtatggtcaacgatgtgagatctatactgaccgcaaaagtctcaagtactttttcactcagaaggatctgaacatgagacaaaggagatggttagagctagtgaaagactatgactgtgaaatcctgtatcatcctagaaaggaaaatgttgtggcagatgccttgagtcggaaaggacctgattagattttcaatacggtaatgatttctccccagttagcctcagagatgtctagggcaaacattgaatttgtggttgagaggttgcataatctggctcttgccaaacttgttggaaagaattaaaggtgtagaactagaacatcatcaactgcttaagactcgagatgatgtcttaacaggtaaagctaaggactttacaatctctgacagtggaatgctactgtttaaagcacgattgtgtgtgcccaataatgctgaacttaagaaagaaattttggatgaagctcatactaccccttac

SEQ ID NO: 101182 - DNA, 516 bp, Cannabis sativa
ttcttcgtttacatgaacaattcatattgtgcaatcaaatagtttgaaagtataaacaaatatgatgtctttctagaaaaggaagaaaaataaatcttagcgaagtttgtaatagttgatacgtgggtctaaaatgctcctacctaaaaataggtatcatatattcaaatggtcttaattgctagaagaattaacaagtaaacaactcaataaaatagtgaagatgttactttgagaagtcttattgtgttcaaagagaaaatttggtttcaactctacagtcttttcaccaacttccttcctgcaatacaatattgtctgatgaaaatttcttatgaacatttcaaaacaatattctatacatgatgatataatcattaaattaagcaataaaaataaggtctcattatttgtttatctagcaaggaataaatgatgaacatactcgataactctaaaacctataattctaactacctacaactcttctaatatcaattctccacctataacata

SEQ ID NO: 101183 - DNA, 827 bp, Cannabis sativa
ggtagagtacagctcccactaatgccccgatcgaaccgatggagaatatgaaaccaacattctcctgcacaatataaagccaaacaatcataaacttataattcagatattaactaacttaactaactgtcagttataacagttgatgactttgcactgttgtggctataaggtgaaactacatcatcttgttcgaacctcgtaatcatattttcattagttttaattgccgttgttcatttaattcttgatcttattataacttgtcattatcattttctggctgttgatttgttcttgctgatcataacactccatactgtatatgtttaaaagtatagtaaaattcatacctgggagaatcttggaccatctttggcgtctgtgtaccaatagaacattccatcaaggatattcaaacttaatgcgaatgaggagtacatgtataaacatggtctccaaacacttggggatttcagtgttgtccacatagcaatgccagcattcacaaacttctgctttacctggttgttcaacatgggatatagaagtaagagagagcctaataaaagcccaaaatactgtggtaaatggttacaagttactattcagtatacttgttagtttccaactaggactagtattgattgactcgggattgagttaggtaattcagttttgatcctggacccctagaaaagtgagttttgaaactcttaagtgttcttgagttagaacaacttgtaaaactctgtaactgtcgggtgattaatgaagatgataatggcttctattcaaccgaaatgtagagcattacacttagctcg

SEQ ID NO: 101184 - DNA, 521 bp, Cannabis sativa
ttatgtgccaaattatgctaccttactaaaaaaataaagtattccaactccacaagtaaaataaaaataggaaaatgagccaaatattacattttcaaaaatcagaattacatagcttacaggtacaaagtcatgacataaaaaaaaaagtttccaccactccgtcacaatttggcttcagtgaaagttttggataacacaataaccactgatgtattgttgatccactgcaaaagagtttattcaatcttcagtgaaaagtatttgaaatctcattcgtagacaaattaccttatttatatttatggttcttgcttcaactttggtatttgctttaatgaaacaggtaggtaccctcaaattaaatgtttttatttttatttatataaaagataaattcaataacagttaacgataactgttacagaagaacacaacaccaaaaacccattttatcctatttgatattgacaaaactgcccaatcctatttccactacagcccggctaaaacggggcgaa

SEQ ID NO: 101185 - DNA, 1080 bp, Cannabis sativa
gaaagaaaaagccaaaaatcaaagaacctctctctttcccttctctctcttcgaaccagctaggaaccaaggacttgcaggtttttggtgtttccagcaagagttggaggcaattttaacaaaggtaaacccgagaagcttttgtcttttgatttctttaggttctttttggtttggttatgcaattttgaaagttaggggctgctagggtttaaaggttgtgtaatttgatttctaagctgattttgaaagagggtttggaaccctaatgcctagtggggagttggttatctccaataggcgcattaggtctatgccagttaggatcgaagattgggagttgagtgttgaccttatagagttggaattacagagtttgacattatacttgggatggattttctgtccaagtattcggccagtattgattgcaaacgaaaaatggtgacttttcagccagagggtgaagatccatttgtctatgttggatcggttcaggggtctcggatcctaattatttcagtattacgggctagaatctactacacagtggatatgtaggatttttagcagttgtgattgactccaccagacctgaaacatttaggcctgaagtagttagggttgttaaagatgttctcgacgtatttcctgaagaattgtcgggattatcgccacagctagaaatagactttgtgattgacttggcacctagagccgaacctgtttcaaaacctctgtataggatggctccagcagaactcaatgagctaaagttacaacttcaagggatgcttgatatagggtttacccgacctagtgtattgccctggggagctctagttctgtttgtgaaaaagaaagatggttccttcagaatgtgtattgattattgggaattgatgatttattcgatcaacttcaaggaaagacggtattttcaaagattgacttgcgatccggttatcaccagcttagaattcgggaagaagatatactaaagactatgtttcgaaccaaatatgggcattatgagtttctggtaatgtcattcgaattgacaaatgctccagcggcctt

SEQ ID NO: 101186 - DNA, 858 bp, Cannabis sativa
aatttgttcatattaaatcatagagagacatgtagatagagttatgtacgtggaaatactattttgatttttgatgtttcataacagttgcattacggctgcataaatattttgctaacagttattacgtctgattgaaaccttcgtctgatgcaactttcggccaaccacccagcaacctttgcctgatgcaaccttcggccaaccacccagcaaccaccctgcaactatcgtttgattgtgtaagtaatagtgtaagagatattttggtaattaaaagcacataaaaggtataaatattgtccacatcttatgaaggtatttttgtaaataaagtgtcaatttatattttctatgtaataattcctaaaatatataatatcaatatatatacacatattctcatacaaaaataattattaaaactcaaaataattaataaaatatgtttagagcaatgaatagtattctataaatgtagaataaattttaaataaattttaaaatgaaggagtttagaacatttggtgtagcgtatttttggtacgattatttaagtttttttaaagtttttctattttaaagttgttgtgagtgctctagcaatattagatgactttttaagcttttggttaatttacccaactaaaaaaaagcttttcgttaatttttggtaactagttcaaaaaaaaaaaagaatagggtggggggagtgacataagtatttttttaggggggaattattttttttttttttttttccaatttgagaaaacttaatgtatattttttagggttaataccattttagatcttgtgttttgcaaaaattacgatcctttgttttattaaatgata

SEQ ID NO: 101187 - DNA, 805 bp, Cannabis sativa
  modified_base (725)..(732): a, c, t, g, unknown or other
tttatataggccttagggtttgttaatgatcctccacatgtcggggtgtcccattaacaaatcctgtatttcatcctcaataatgaataaacaattacaaataaataaatatctataaaaatcttcttatttttaggcaaaaatcctacaaatattgggaaaatagttattttcggctagagatgcaacaaattaaattagagtgacatgggatgtcacctcttggcttggaattcatgacattggtgagaagtgttggaaatatgtattttggggtgccactactcccacatgatgccacatgggtgtggcattattctccaacatcccacacttaattatactactcaattcttgagtaaagtgtatcaacctgccttatgtgccaatttttaattcaataacttcataattaagctatgactatgacacacttagatctttcttgaaaatatctttctaatgcaagttgaaccatgtcattaagataaaaattaagagagttattcccgttttactgaagagaagattgtgctgttttgttccagttgtgagcactgacacagccaaatggcagctctcggtcgtgcatgttctcagacccctcagggtgtgttttgaattttttatatggtgagccttatttcggggggtctcgggaccctaaaacttcattttgacatccaaaaacctaacaagagaccactgttggaaattattttacnnnnnnnntagatctactcacaagtacgttgattaacatcctaaacatgaactttctaaaatgatgaaataaacacatata

SEQ ID NO: 101188 - DNA, 1169 bp, Cannabis sativa
tttcattttatttacgaatttggccttattttaattaatatgattttataccgtttatattttaaattttagagtaccacctatactgtttaaattgttttggtatattttcatagtgtcgtctctctctctctctcttcccaatccccaatacaacctctccccttcaagtccccaacgtcggacacctcttccacctcctctgtccgacatctaagaccggagcactaatcaaaaaaggcggttcagtcattcaccatatctgcgacacaaccggcgctagaatttgtatcgatgacacccattcctcctcctccaatgaacgagttatactcatcacctctaacttcactatgcccaggtcgaaattcgatcacttggataataacaacaagcagagtaatagctctagccctagcgatggagaaagctcgtcgtcggtagctcagttggcgcttttaaaagtgtggagaagatggttatagcgacggagaatgagaatgagaatgataatgagaatgagaaggagaaggggaaggatatgtttaatgtttttatatatatatatatatatattttgttgataaataaataaataatatttaaatttaaaaaaaaattaatgtaacaaataacttaataagttattaaaaaaatatatacttttatttttataattagacattacaagattaaataaaaataaacttatttttataaaacttttttaataggtttataaaataatttgtcaataagttgaatagtatctgaaacatcatatgagttatattaaaaaaaaaacctaacttcaacgtatcttaaacaaaaaaataacttaaaaatataaaaaagaaacaaaaaaaattcttttaatattagtcgtcctttatggagatagaaaaatatatgtttctcacatatgaaaattaagaaacaaaccgcgcttctcgtgcggttgtactttatttactgataattaatttataaaactatatgaaattttaaattcttacattttttatttaatttttttaatagtatgaataagtattctagtaaacttttttttttatgtttaataacagaaaaattaaatagttgaagattttttttatttttttttatttttgaacaatatgatatcctttttatagaagaataaatat

SEQ ID NO: 101189 - DNA, 823 bp, Cannabis sativa
gtaaaataattccaacacatattcccacaattgtttcaatatccagggtcaatccctgacttatcccggggttccaggtgaactaagcctagttttagttgtttgtctttgattgctactggttgatgaccaactttccacgtggcagcttgatatggcaaccatagtgggctgatatctactcacgtcgcaattcttttacaaaattgctttaccgaattaactggcccttgtattcttgtgactcgctccgtctcgagataatcgaggtgtccattcctcctacagaggtgggttataatccttggtcactagagttactaggcagatcgagctgatcatgggcatcgtcctgcccctttacatatcgttgaaagtgtcctcgctctatgacaccttctatcttatctttcagtgacgacactcttctgtggtatgaccaatatccccatgatattcacaccgtttagtttggtcccttttacgcctcacatgtttcataggcattggctcgctaaaaacgatttcttgtacatgtgagaggtagatagtttcccgagattcattgagctcggtatatgcggcataaagggggatatatttgttgcatttcttctatttcttatccttacaaaattgtcttttcttcttgatcctgaggcttttgactcgaagtcttcaacggaatcatatcccgatttcctcccaggttccttaacttgatttcttctgaacttattctccaacttttccatttgcaaatggagtaaaaccctttgttttggatcaagtcgttgacgaagatcaggttttctcaagttca

SEQ ID NO: 101190 - DNA, 1559 bp, Cannabis sativa
  modified_base (1296)..(1309): a, c, t, g, unknown or other
ttaatatttcgtacttaattaatttgtttcttttgagtacgtagtcatacatatacatacatacacacgtacatttgtaataaattaacatattattattaatattatcccatgggccggtagtggtgaaactaaaagtacacctagtaatagacttaaaatttttattttgtgagaccttacttattattaaaaaatatttatacatacattataattacttttattatattaatttaattttgtgaaagtatttttacaattttaatctataattattaaattaaaaaaattacatttaaatttttaaaatactatatttttgttagtgagcccccacaagaatgcaagtaggtccatcgctgggtacacttcaaatatttttaattaaaatttattaatttatgaaatatgggagtgtttgataatttgtcacgttattaatttatgaacaaaggttaaagaagtactataatgaaaattgcaagttttaatataattaaacctgtgtgggcgtatgattaagaccaaaaatgaagaatattttatggaacaaccatgcaaatcaaaattatctcatcagaccaaaagcatgtgcatacctaaaagttagttccaaaaaagatttatgagatggaaaatgactaatccgtatacgtgatcgagtacatgtggtatacattatataaataaatttataatatctagctaagatatatatgttacatatatagacaaagaaatctgtgggagcacacatgatattttgtatataatataatatgtataaatgtgtgtataataataaattggcaagtcattttcttccacctattcattgtcccctttgtcatatttagccacgttaagatgaaaatacttgtcgatcttcctaattcatgatttgtgatcatgatatcatatctatattaagtcgcactaaatagtccacaaaaaatgagatgcctttgatatatttttttttggacgtgagatgcctatgatattggtatatatacgcgtgtaaattataaaaatacacttgctttatttaaccaaaaaaaaaaattaatttcacgataatatataatttaactgtaaaacaatctcataataattaaaaaaaaacaatttattatttttataaatttttttcaaatttaaaaacttctgtaagtaagaatagaataaatggaattaaattaaaatttaaaataaataaaaaaattgataaaaaaattattaattttttctcatcttaacatgcattgatttgaaaatagttttttttttttnnnnnnnnnnnnnnaataaataaataaaatagaataatcattctaccaaaacaatagaataatcattttatttcaatattttaaaatataatagaagaaaataataaaataaaaattatttcaattccatccctctaaattttttttcttcttatcttatggcatgtttactaataagtaatgaacatcaattgtagaggatttattgtttatttaatttattaaatttaggaaagggacaacttaattaaataagggaaaaaa

SEQ ID NO: 101191 - DNA, 558 bp, Cannabis sativa
ttacctttctttaaggctgctccgaacatatctcacctgaatggttttgaaattttttcttcccttgctgctgccacttcgaactctgagttggagagaattttgtgtcgtatgtggagtatatggactgaaagaaataaggagattcatggcactaaaccaaaacctgcctctcttattggctcttttgctgattcatatgttcaacaattcaccaattcgtcacttcagcaatccccttctgtgtcaaactctctgcctcagcattgtcctactagtagggatgacaatttgaggactacccgtgaatctggtactgtcaaatggactcccccgcatgctggttttttcaaattaaatgtagatgcagcttatgatgctactggggctgttattggtctcggggcagtgattcgagactattttggcgatgttgttggggctttctctcaatcattgcgtggcagctactcggtaaaggaaatggaagctatggggattatttacaatttgcattgggcaaggaataatggtttgcacattcatttcattgagaca

SEQ ID NO: 101192 - DNA, 552 bp, Cannabis sativa
ttacactatcatcattattaaatattataattaaaatttaaatatcaatctaataaaatattaacaatataaaaaaaatcttattaaagttataatattgtcgactggagaaataaccaactgactcggacttaaataattaatggttaatcacaaataagaaatcaagaataataaataaataaaaagaatgatttatataggtttgatccttttgtatatgggtaatgacatactccccttttagttgtatagattatgagattataccgagcataccagtgaggaagacaaagtgaattctaactacgactttcaaagtatttacagagaatatctttcaacaaaatgctcttagatgtgtgggtacgatttcaggtctaggtattcctcccttctccttgtgaattcattcactatttatagggggaaggttgttacatttggccttgtaaaacgagtcactacaagaaaaataagaaatttcaacagaccgatcttggcaggcccgcgtgtgtatgtcgagatttgtctctatctcagcgggctatt

SEQ ID NO: 101193 - DNA, 641 bp, Cannabis sativa
aagggcttccaaagcagtcacttccatgggttcagctcttgagttcacggatataatgaaagtgtcataatctggtgagggaagaccacgaaagattgcagaaatgtgttcctttgatgaagtcttgtgcccaacagagttgagtttatcaatcagagaacgaaccttgagaaggtactcattgagattatgagaacctttcttgaaattttggagttcagtagtgtactggtcaatctttgcttctgtctgagatgcaaagtaggtggtgagaacataccacaatcttgcagaggtttcacagttcacaactcgtgtgagaattggttcagtcatcgaggatagcagccaagaatacaacagttgatcttgttgatcccaatcctctaatggcagaaatgacttgaggtttccatagcagatagttatcgtgatcgagtttagttgcaagtttatgagaaaagacaacgggaacaaacgaagtaccaccagaagcagcagatctgttctggctagttgcagtggagagaattggtgaagaatccatggcaggtcacaggagaacagcaacgatttttcaagaacgattgttgaacaacgaacaagagtcatcacggctctgataccatgttaaacgaatg

SEQ ID NO: 101194 - DNA, 540 bp, Cannabis sativa
aatgggtacactggaaacaacatgttgttggtgtgaatgggcatctgctgcagaaacatcagtaatgggagctggtgcctcttgaatatggctgctggagatattttgttcagtaggcagtggggcagcgtttggcacagctgctgtgtgtggtgcggcagacggctcagcagtagttgcagaagcaggcatagcaggtataaaattttgattagtaattggaaatgaaaacactgctgtaggaggtatattagagtgagatgttgatacctgagtgtgagtggctgaagagtgagcagggaagcaagcttcatcaaacaccacatgtctagctataaagagtcgcccatctctattttcacataagtatcccttatgattgttggagtagcccaagaagatgcattgttgagatttatactccattttgcgatgattgtagggtcgtaagtatggaaaacaggcacaaccaaacggtttcaatatagtgtaatcaggaacattgccaaacaaacattcaataggagatttatgaccaag

SEQ ID NO: 101195 - DNA, 564 bp, Cannabis sativa
ccccaccaaactctgtttgcaaactaaacaagagtatctatggccttaaataagcatccagacaatggtacgaaaaactaagtaccacccttaagtctgctggatttgatcaatctctctctgataattctcttttcatcaagaacaccccaacattcttacttgatgtcctcatttatgttgatgacatcatagttgctagcaataaccaactagctattacccacttcaaaaaatatttggacagaaaattcaagcttaaagatatagggactttaaggttcttcctcggattagaagtaggaagaacaaagaatggtaaatccatttcccaaagaccattcactctacaacttcttgctgacacaggttaccttggagctaagcctgcttccactccaatggaacttaatcttaaactcagcaaagacaaaggaaaggttctccctgaccctaccacctataggagtttaattgggaagctcatatatctcacgattacacggcctgatatctcatatgatgtcaatcgtctcagtaaattcttaacatgcccaagagtac

SEQ ID NO: 101196 - DNA, 579 bp, Cannabis sativa
tttttttgttttcaatacgaaaatacaaccaaactaattataaaataataaattatattatggtaatatatatatatatatatttatataaatatacctgtcgatgtcgagatcataaatttgattgatgccatttacacatattgcgacacaaacaataaccaatacaaaagagggtatcttcaaaatcaaactccaactacatagattcaggttccccaccaactcttttgcaaacaaagcactataaatatatatatatatataaatatatatatatacaaacaattaattaatatatatataaaagagattaattaataacagccaagtttaatatatataaatataagattaataaagaagagttcttacgcatagttaaacaacactcccttggctgcatatggccttgcaaatctccaaattgtgtttccacttttcatcacattaaattcaacagtgccatcagacccatcatcttcaatttcaccatttgcctattattaattaattaattaattaattaattattatatatataagtatgatatgaattatgaagaagaagaagaaaaa

SEQ ID NO: 101197 - DNA, 640 bp, Cannabis sativa
  modified_base (179)..(185): a, c, t, g, unknown or other
tgttctttagtcttgatatttgttgtatctgatgtaagggtatatttgtcaaaccctgtgattagtgttatacaacttaagggtaaataagtgaatctgtaacaacacattgtttttaaaattttggctgtaataattaatacaatacattgttttatccaaacatagtgttatttatnnnnnnntacaatacgacccttatacggcgtgccaaacgaaccctgatatcatatttaaaaatttctaacttgtgacttcttatactgagaaatatatgaaaattttaataaatatcttcacacatataatttaagatgtaaaaactagaaattatcaatattaattaaataaataattatgatttgtacacactcaaattacatacaaattttacacataattcgaactgtacaatcaaaaagtattggtattggacattaatagtgcctaactctttctagaagtgacactttatgcaattgattagcgataatattatattaaattatacaagacctcatatttatttgcacggtttgcactcatatcaatccgagaacgagaaagatcataattaagcaaaataattaaataaaaaaaacttaccaagcatctaatttacaaaattatttcaattaaa

SEQ ID NO: 101198 - DNA, 585 bp, Cannabis sativa
ttgttgatgctttgcttatctcttggtattcaagataccttcacaagttattacctccaacaattttagcagatctctttctaactttgtatcttggaatttattcggcacgctacacttctttacatgatagcattgtcctcctcggactaatttctatagcagactcgttactaaagtaatcacatacataattctttccatctaacttaggagtgtgtcacttataaaaaacatccatcaagatagtactttttccttagagatctattctttcatccttcttaataatcgatttttgaaataccctgtcctagtctagtatagcatcaactatcctaagccattacctacttcctataggttcggctttctttcataactaggtgtggggactgcttcttcaaccatttgtaaacaggttcaattctatgcatcggtacttagttggctattggtacatttcattatgtgctttaagttgcaatactagtgttggtgatctattgcgctgagcctgtgaaaactcttcaacaaatcgtcttagtcatgctcgtatttcttctaatgcctctattagatcgt

SEQ ID NO: 101199 - DNA, 1243 bp, Cannabis sativa
aggtcaattaaatttagtttagttgttagagtctatactataaaagtaagtacttagtggataatatattagagaatatatgtaatgaccacttaattttagtatgagaattagctaataattagggtttaattaaaaattagacatttaattataatttatgtaattatggagatatatttgaattataggtgtgctatttatgttatatgtgaaatttcatatttttcatattttatgcctagtaacagtagaacgcgacgtttggccgataatgtcactttttcttatggtttagtattttagaaatagtgaggcaatttacatagacattgggaatgttaggaatatttgtggatttaaatttgaccaaaatgcctttaggtggcaaagttacttcttggtgaagcaaggacaaaatagtcttttgtcttttagtaatttagaggattaatattaagttattgaatgtaatttcttatattgaattatattagataagccaaaaattatttcttttacaaaattagaaaatttgaaaagatttctctctctaagtccctctctctcttgaccttttaagaaacctagcagaaactagggttcttaactcaaattgctgggtgtttaagggagatttctctaggaattttaaggattcaactcagggtaagctcctacactcttttctctttgttttcttaagttttaagttaggtttgtagcttaatttcttggttagggttgttgtatgatctgattaggtttattggagttttttaatgtttgtgattgatgattttagtaattctaaggagaattgggttcttgttgtggtgatggaataaagtttgagctttagagctcaaacttttctctctcattgtggtttacgattttgaggttattgttcagttttgttgcttggattatgttccttatcctctttttaggtactttggaagatttggtatgatttgggattgaattgaggtgtttgtgaagtttttgggggttcctgtacttaaccggtcaaccgtttcaatatggtcatgtggaattggtctactggttccgcaccaggcagaccccatagaaccggttttttggttggaaccggttggggcaatttacggtgtcctagatttttacgtttttacgatatttagggtattatcatgttatccatcgatagggaaacttttagttttcattttaggtccctgaaaagtgatttagcata

SEQ ID NO: 101200 - DNA, 724 bp, Cannabis sativa
tttggcagcgatattaatcgaagttgctcgtttccaatactgaaaaattatcttgactagtcaaaaggaacgagaaaatgatatttggttgatcttcaattcccaagtgataacgatcatcttgagaaggtcgatcgtaaaagccacgagataagccttaattagcaagaaagctagagctatcagtataagacacatggccttgagttccaagaaaagggttgttaccattaaagaacggagtgggctgtggttgggccggagccgtgatggtgccggaaaaaaaaatgacgccagtgaagggactgtctgaaccgatgtcggagtggaggaggaaaatggcagaagcatggttgtttgaatctacgaagctatggaggtcaacgccggagtagaggaggaaccaaatggtgtggtggagtggcgttcaaccggtcccgaactggggagattgacgacgggatcagagccgattacaccagcagaggacggatcgaacatgatggaggaagcaccgattggatccgagattgagttttcaagagtgagagaagtgacgggcggagcaacgtcagagttggtggcagttgtcgacgatggaacttggccatggttgatggtgggagatggtagcggaagagaaggagcttctctaatggaggtagtggcaatggtggaatttctagttcttggagccatacagaagaaataaggttagggtttt

SEQ ID NO: 101201 - DNA, 668 bp, Cannabis sativa
  modified_base (630)..(637): a, c, t, g, unknown or other
gtgttatcaggagtagtgatgttattccagattttaatcatgtaatcactatagattgcaattaataaagatgatgaatttttccaaaaaaaaaaaataataataatttaaagtatataatatattaattttgctcacatttattttatattttgttatgtaattttttagtttatatttttttatgtatttttttttggttaaactattttatttttttgtgagtttttatttttcttttgaatgcctcttctcttcaaaaaattaatatttcaaatttaaatattttaaaataaattaatatttattttaatcttgtgggttatggcttgttttttcaattaatagatttataaacttttctatctttttaaaaagtactataaatttaaattttaataataaatattttttaaaatacaataattacattttattgtgttacaataaatatcgttataacatattgagtttttagaaattcttttcgtaaacttattttgttaaatgtacatatatgaattataaatattttttatactatctatcgatcattttaccattcttttattttactttttcaaggctaatttttgtcatatttttctgttaggaatattttaccaggannnnnnnntactaacaagtatattgattaacatcctaaa

SEQ ID NO: 101202 - DNA, 914 bp, Cannabis sativa
cttcaaaaattgtgttttccttggctcagctcgtcttttattgaatttttgcatccgagacctcttttattccaaagaacttgaaaataaagaaaacaagcgtaatttcgtcccaacacagcgaaaaacgcacataaaatagatccaaaacataggctaaaaatagcctaacaaattgtcggatagaacgcccaatacaatgaacaactgattaaattgatctaattataattatatatattttaaaaatatatttataattttactctgaattatatatgtgtcatagataaacatataacttgaattatatgttttttttaaagaagaattatatatatgtttatatgctaagacttatatgaattgtgatagcattagatttggattgaatttgtattgtattctcatattttttgattttgtgtacattatgttgggctaaagtttattataaaaacaagttttttttctttagaaatgtgagaagcaagttttaaattgcacttatttttattttttattttttaatgaaatttagcctaaacattggctaaaaaagattaggtgaaaccaatacaatcctataaataaccaatccaatacattaatagttggatttgatgggttgaatctttttgattacatattagatcgatttacaaaatttaacctttaataaaaaattggacggatcatttgagtccaaatctattgaatgtgaacccatgaacctcctaattgctgattgttgcgatatttagcacacgcaagtgcacgtatcgtttcaagtagtagatcgactcactaggagtgaggtcgatcccacaaagagtgtagttaagtaggttaaaactaaagttttacttctatttgattaaataaaagataggaagaaaaacaatgaagtataa

SEQ ID NO: 101203 - DNA, 698 bp, Cannabis sativa
tattttctagataaataaataaaatcatatatattaaaataaattatattagtaaaataattatcaataataatataactttattttataaacaagtttaaaagagaaactaaatgaaatactacatatatatttttttaaattaaaaatatgaaaatatacttttattttttctatgtgcaaatatatgcacatttttcttttgagctttagaaattaacaatgagaagaatcttctgattcttcaacaaaatttagtcaaatcctttgacaatttattgcatataattgatcatgtcaaactaactcaatccatgaacttcaagttcatataatttgtattccaatgaaactttcataagataatataaaatcactacaacatataagtaatcattacaagttttatttttatatacacgaataaaataattatattattctctaaaacatatacactcttcaagagtcactattatgtttatcaaactttatatttctttaggaatcactatcatcaattcaataatgtgtataatttaaaagttacatgacaacttcatcatgttgttgtaatggtcaaatagatataacaaccataatatagcatatattttttctcgtatctttctaacaagtcatctaatttattaatagactattcattagtctaattatcatgacttgatatattatat

SEQ ID NO: 101204 - DNA, 518 bp, Cannabis sativa
tatttgctaatttccaaattaaagctaagcggtctttacaaaatccctgattccctagtctaggaggccttacttcttcactcatgcgagatgattttggcatgtcagtttgttcatccccttggttagcaaatccatgggagtttgtggaacaactcgtcaatattcttgattccttattactcgaatttggttgatttatcctgtccattgggacatcccttgtattcctaggttgttcctcctgggtatttgggggattcccttggtttgtttcctgcctcctgattctggggcctcgaggtcttccttgtggtctccttatcgcaatattagatctgttctgaggaattgtcccctgtgtagccctggctgctgcagcttctctctccaactcagcattttgtcgattagattcagtcgatcgttgtcgaagttgtctattctctaactttaccaatggcacatatgtggttgcatcataagcattctcgctcctaagcatgtatctggcagag

SEQ ID NO: 101205 - DNA, 692 bp, Cannabis sativa
tgttgagggcttttaagtttcctaataagttcataactctcattatgaactgtgttaggactccaaagttctctctaatgttcaatggaacaatgcatagattttttgaatctaaaagaggattaagccagggggatccactctcccctttgctatttgtgcttggaatggagtatctttcaaggattatgactaagattgggcagaagcaggaattcaagttccatgaaagatgtgaaagtctaaaactcaaccacttgagctttgcaaatgatgtgctcctcttttgtcatggtgactttaagagtgtatacttcatgatgcaaggcttaaaattattttctctcacattgggacttcaaccgaacccatcaaagtcagctttttattgtagtggtatgcaagaggctgaaattcagaggataatcaatgcaactggacttggtaggcaagttcttcctttcaagtacttgggaattcctatatgtgctaagaagatttcagggaaagaatgtattctacttgcagaaaaaatggcagctagaattaaaacttggattactagaaacatctcatttgtaggaagagttgtactcatcaactcggtcttactctccatacatacttattggattcaaatcatgaagctcccaaggaaagtaattattgaacttgaagcaatatgtcgagcc

SEQ ID NO: 101206 - DNA, 636 bp, Cannabis sativa
atggtgagagcttggtcagaggccgaatcccaatcggaggtcaatcgaaaaaaaggttataagaaaactcctccattttaaatcgctatactgaacgactcttccaaatcaccgactcctccatttcactctcccaatcccaatcggaggtcattcgattttaatccctcggttggagtcgacgattgaaggcataaagaacgttttgttctttcgctactttccaatcgaaaattgggagttcagtcggacgccgccactactagccccaagggtcgtagatctgactccagatttcttcattggtatattcgacatgagaatcggttagtatctccacgcccaaaatatggatttcagacccaacccagttcaccgtgttaacctgtgatattatgcacctattcattgaatttccaatttccaatttcaactgaaccagacaagtagtaaatctccctctcatttttaagacttctatgattctatttgtcaatgtttttaatattgccaaatattactttttttatttattctcttatctattttttattttaggcagctgttataaaacaaagatcttggatggttttgatgtgcagagaacctttggcttgagtgacacactgaagaagt

SEQ ID NO: 101207 - DNA, 644 bp, Cannabis sativa
aggaattgaattaatccatactagagtgtattttgctgaaatttagctacacaataaaaaatttactaatgaagataaaatttctcagaatttagcaatgtctactgatagtatatgtaaaagtgttcctatttaaaagagatgttcagaacttccccaaaggcctaaatcctatttttctacatcctaaggcaaacacacaagcattaaagaggaaaataaaatttaaacactgtctagaattttaataatataaaaaaaaatactaatgtgatgaagacgaagaacttgaggaacaatttgaggatgaagacgaagaatttaaagatgggattcagatgccatgcgacgatagtaacgagatccctgttgtgagaggttaattgagaagatcaaccttggttcaaagggagcgagttttattgatgagcacttcgatatctacttgaagatccaatggtttcgatggtgttcacaaatcaatagtgagaactggggggtggtgctcctgggtattctcatgcacaaatttgaaaaagaagatgaagacactcgtcaaagtaatggttcattcaccaaaagaaatttttgctctctatctctcaaaaaattcaaacaggatgaaaaataggcaaaagtggtaa

SEQ ID NO: 101208 - DNA, 884 bp, Cannabis sativa
ttagctatttaactaaggataactatgaaaaatagagtatgtcaagtacttggatgtaaagtattcaaggaaagaaaaacacaaattaccaatgcaagttgtctaaagtgtaataaaactaaggagcacatgcgctcaagataaatagcacataggctaaaagtctcaaggaagagtatctttaggcgggtccttagaagtagcagcactaggaatgttagtagtgggaggaagcgtggcttctcgaaggagtcttgccttgagcttcataagctccttatctctcgtctggaaaaacatgtgtgaaaggtcaagattttggttatttttccacaactgataaaaattggtcatcaaagacacgcttgtatttttgacggtctttcgctgctctctcctcatgcttctaaataatgtccttcaatgccttaaccattgaatcatcttcttcgcaagaacaaagttctcatcaatgtaataattcacctgaccctttctctcctctagttgtgtttgcgcatcactaagttctgtcagcctcttacggagaatgtcctcaagttcacccttgtcacgcttatattttgtgtccgaaagagcagagaacttcttctgctcctcaagggctgcttctgcagtagccaacttctcttgtaaatttgaagaattaaggtgggagaccatgaattgagttacaccctaaaaaataagaggaagaaagggtgttagcacaataaaaggatgtgagatcatataaaaaaaaatacatgagcgtgcacatgagaagataggccattatcaatatattttaaaaaatagtttgtcacttacgtgaaggatatcttggactcccctagtgacggtattgttggaaattattttac

SEQ ID NO: 101209 - DNA, 2032 bp, Cannabis sativa
  modified_base (554)..(561): a, c, t, g, unknown or other
  modified_base (1977)..(1983): a, c, t, g, unknown or other
agatccttgtaaaataaattccaacagagctcacccgtggaggtgcccaatatgtgggagaaggaacttatgaaatggaaaactgtcgcttgagacgccatctagaagaggcgcaacgtcgaaacgctgagtttgagcgtgatgcagcctcgactaagacggcataagggaaaaatgctcaaaattgacctgaacttggagtgaaaataccacgaggtagacctcgtggttcacgaaccaggagacatgaaaaggcccaggaagaacaacccagggaaaatgaaacacccctgaaaatcagaacgactagcgagatgggagacaattggaaactgatgaacgagcaatacctcatgagaatgaggaggatcttggaactcaaccaggggaccggaggtcccctgctagaaatcaccaacgttcttcccaaacccatagagcgaggactcatacagaccctaatgggggaaatatgataaatcgctctcggaaggaaagagcagagcgtgaaaaagcaagtgtgacttcaaggcagtcaagaacccatagtcgannnnnnnnaagaggagaaagtactcaacgagctaatgatcgagaaagtatgagaaccagtaaatctgcgagccactcaaagacaaagtctataagtaggacacgatcagtgagtaagacaagatctgtcagtaattactcccaaccggatctgcgagagcacttaaatcggaagaaacttgaccttcgccaacaacttggtccaaagtaagaggatccaatctaattgcgaataaacgagctggaggacaagttcaggagatatcaagtgggagaattagggaaattatctagatacaacactgacgaggagcttgagccgtatcatccagacataatgaataccccttttcctccgggattcaacaacctgtatgtctcgttgtatgacgaaaccactgattcggtcttgcatttgaataactttaacacaataatgcgagcgagtaatgtgactaataatttacgctatattttgttccccacctcgcttgttggagcagggagtagctagtttgacaagtttactcatcatttgataacttcctgggagcagatgtccatggatttcaagaaacagttctagttggctagggatagatgacccgaagcggcctcactaaccaatataaagtagcagcccggtgagacacttaaggcgtacttaagtcattttatcacggctgcggctagggttaggaatttggatgatagcacgcaacttacagcccttcaggcgggggtctctactgatccattgaccgcagggggtgagttgtgggatgacttacaaggacgtccagtgagaagcatcactgagttcaacgaaagggctcgagtgttctttcggaaggaaaaagcccaaaaggaaatgaatttgttgaaaacaagctcgggaggcaaacccagcaatgtttcaacatgaactgtttccatgagcattgataacctgggggattctagttctaagagaaaggacggagttaaggaaccggcgaaggataaaaaaaatagaagaagcatgataagtgcgtgccagtgtatactatttataccaggcttaatgaaactcgagagaatatttacctcgcacatgagcagaaggtagcctttggcaagcccgagctcatgaggaattcgaggagtaagagggatcaagtattgtaaattccataaggatattgggcatacgaccgatgaatgtcgctaattgaaagatgagatagaaagtctcatcgcttgtgaccattttaagcagtatgtgaaaagatagggccatggatacaaccaacccagtctgcccaataacccaaacaaccaaggtttacaacctattcccgttgaggaagaggacattttggttatttcaggagggccacatatcgcatgggaaagcaataattgttggaattatttaccaggatnnnnnnntactaacaagtatgttattaacatgctaaacatgaacttctaaaacgat

SEQ ID NO: 101210 - DNA, 654 bp, Cannabis sativa
  modified_base (377)..(399): a, c, t, g, unknown or other
  modified_base (517)..(517): a, c, t, g, unknown or other
  modified_base (588)..(590): a, c, t, g, unknown or other
tcttagaaaagaccatcttcttccccttcatttgatcaaatcaatttaagggcaaaaaaggatacttgttcttgatggtaagcttattcaaatcccggcaatcaatacacattcgcagggtcccatctttcttcttcacaaacaataccggagcaccccaaggtgagtagcttggtctaatgaatcccagattcaatttttttaaaatatctcagccaaaataacataataaaatcaaattaaaatatatcttaattaacctcactaaagacaaaaagcttatggggtaattttgcccctcccgcactaaaagggttaaaaaagcacttaggggtaatttgggaaattctaaaatcccgactaatcctgacattccnnnnnnnnnnnnnnnnnnnnnnnctatactaaaatactaggatgtgattctatgagcgagacaccgcgttccaatgttgccgggcactgaatatgcaaaatttatgaaattctaaatatgacatataaaatgcattctganttcaaataaatcaccataaattaataatttaaaattaattaatatgctccataattaaaccctaattatcnnntaatttccaaattaaagctaagcgatcttaacaattatcgccccttaaaaggatttcatcctcg

SEQ ID NO: 101211 - DNA, 944 bp, Cannabis sativa
taattcttaaacatgcgagacatcctagcttcctcttcgagtgagaagaacaaataaatgaattgatacgcagttgggtacagcaatttgaccgcataaagcaaaattgcatgacatataaaaccccaaagtcagtacagtttaacaaattagatgatcatcaagcatcaaactttaactatttattccatcaaaattcaatttttgcatacaaatatgatcaaacagacaaaatatacacttatgatcttcattagacccttgaacaaacaactcaatttcataccctgaagcagcaaaacctaaaatttatattcgatgtataacctcctcaagtagagacgacttatatgagcagacagcagagatgcaaatttatatctataaacccaaaaaagaaaccatgaaacaaattcaaattttgtctttcttaaaaaaataaaatacaacaacaatcgaatcacttcattagacgtaccaacgatgagttacatagataagacaaatgcatgagaaaaaatgatcaaaacccattaacagatttgatccaagttcacaaaaaagcaaaagatcaaagcaaaaaaaggaaagttctgatcatgggtcggcacaactcacccacgacactcgatcctccagagccaagcgtcatagataataaagtagggtgttctagagaggtgggtttaaggagatcagatcgaatcagatgagatgagatgggatttctgggttacagggaaagagagtcagatagatagagagagggattgagaatctttggggaaataatggtgaagaaggcgatggtgggaataaagaggagaaaacacagagacgaaaaaaggagattagataggttaaaaaataataaataatggcaacacttatgtgtatgggccactatttttaatttctttttattttttattttattttacgaa

SEQ ID NO: 101212 - DNA, 822 bp, Cannabis sativa
ttaatttttcataattactcttatactttctcattaattcttttcttaaaatggtcttctcaatcactttcacatgacagtgataccacctacacgtcttttcatttcttacttttgtttaattattttatttacttttgagaccgtataaatgaaacaaaaaaaaaacataaaaaagaaaaaaaaaagcgtgtcacactaaatttatatataagaaaagtttttagttactaggtgtaaatttctcataaaaataaaagaagacaatataaaaaaggtatagaatctaatttcctcactaaatttagtttcaattgattggtaatccaagtcaattataattctgtagttcgctcaagaattttaaaatccttactcgcgtaaatcaggttgtctttgattcaaatgttcatggagatctagctgtgttcgttcatggttgctcaaagaccttgtatccgagtaactctcagattgacagctcctcgtattactcctactctcttgatcattattacggcgaggtctaaatcctcctcccgtatgcctttctgatcgactgtgttctcaggatcttgaatgtcctgagctagaacttgccttgccttgcacaggccttctccttcgtgtaaggttagatacacgccctcgctggggtatgtatatgccttctccctatcagctcgagaaggatgatgggggtgtctcggaagtaatccatttgtcctaggttgtaacccaggatttctctcgttattacgagggatctcctgttccctagttttgggctgccttatgttctcgttcctacgagaagattct

SEQ ID NO: 101213 - DNA, 1510 bp, Cannabis sativa
  modified_base (598)..(605): a, c, t, g, unknown or other
  modified_base (726)..(731): a, c, t, g, unknown or other
cttcaaggattagctatcctgctattaccgaagcttagatcgctaagtttttgattgaaaatcgaagaaaatggatatagggggagaagattttatcaaaagagagagaatgaaagttcattcatttattctttagtgttatatatgtaaagcttaacatatatatataattaaaaggaacctgtttcgtttatatataataacaataatataatataatataataatatataataattatattaataaaaaatttattattaataattatcttattacttattagttattaagaaatctctacttctagggtatttggccaatttcaagtacccaaaaatactttggtatttttaaaatcaacttatcccaataatcccatcaatatttctaactataaccgttgtgacattgttggcctccaatcgagtctccagggtcgccaaagatgaaaatgtttttatttcacaaataattcacattatatccatgtatttcaaataaatctctgtaattaacaaattacgcttatagatccacttatcgagttttcaaggtctccaaaactgaaaatgtttttattccacatatagctcannnnnnnntcacacatgctatataaatcttcgtaattaacaaattacgcttatttactcacttatagaaaaatttaaattttatgctaaaataaattagtaagatcataatctcacttattacctgatnnnnnnataacataaatataaaccctaattatttaccattaggcttattttcgattcaagtgctctcgcagatatggttgggagtaattgttcgcagatctgtcctactcatagactatctttaagtggctcgcagatttacttgttcccatactctcccgatcattagctcgttgagtactctctcctcttcgagttgattggctatgggttctggatcacctcgaagtcacacttccttcttcatgctctgttctttcctcccgagagcggtttgtcgtatttcccccatcatggtacgtatgagtcctcgctctatgggtttgggaagaacattggtgattcctagcaggtgatgatctcaattctcttgactgagctccaagatcctcctcattttcacgagggatttctcgttcatatgtttccggttgtctcctttctggctgctcatcctgattctcaaggggtgtctcattttccccgggttgttcttctcgagccttttcctgtctcctaattcgtgagccacgaggtttgcctcgtggtcttctcttaccaagtttaggttgattttaagcattcgtcccctgcgctgccttggccaaaggtgcctctcgttctaactcaatatttcgacgctgcgcctcttccagacagcgtctccggcggcgactttccgttccataagttttttctcccacagattgggcacctccatggttgagctcttcatccctcgtcccaggattctgaccattcccacgctgagttcttctcgagcg

SEQ ID NO: 101214 - DNA, 508 bp, Cannabis sativa
aactccataaattggatttgtgcagatgaccattgatagtgcaaaagaaatttataaggtttttgagtgaacatagcaaaggtgtgtgttattaccgataaattatcaaggaatagtggttcaatgttaaagcaacaaaaattttgacaaacgttgtggtaattacactcaaataaaatttaagttgaaagatattttacactatgcgcaaattcaatggtttctattagagtggagttatttaatcaagtgggagaatattatattactctgtaatataatatctaattgattaaataaaatattgtgttacaaaattattttctacaaatgttatatatattattttatataataaaatgtttagattaaataattaagttacaaataattaagtgtgatagattattaattttgtcaaagtgtaacattattgagttacaaaatgtttgtagaatgatcacaaaatcgaagttgtaactcctttaatttgatgatcatttgaata

SEQ ID NO: 101215 - DNA, 618 bp, Cannabis sativa
ctctaacaacaacatcaactattaaaccaacaaatcacaaagcatcaaagaaatgcacttaataaacacttgttttttaattaatgagacaataagcacccttaagctattggattataatataactagtattattaaaaaagaaaaatggtttggtttggttcgaagaccaaaattcggtgtggtttgtcccttgtaatccgtgatcataatggcttccttctgcagggccgaatgaagctgtactcaggaattgttgctgctggtattgcagaagtaatgggcttttgcgaagctttgagttagatcaagaagtaaccaatctgcccaatttggattgagaccaactgcctttcggttatccaagctttgaggagtgctgttaagatggtctctttgtttggtgatgttaagtcatgttaatttttctttcgttaaacggtcagctaataatattgctcatgagtttgttagagcatctttattatatcttgatcgtatattcagtatgggatttgtcccaactgatttgctaccttgcttagtagctgtgtttgaaggttaataaagttgaattttccttaaaaaaaaataaatttttgttaaggatgattaaat

SEQ ID NO: 101216 - DNA, 1101 bp, Cannabis sativa
ttgtgtggggagtagtcggggacttttattgatgtgggatgatgatttggatgttactattaaaagctactctactagacctattgatgctcttgtacaatatccagggagtgcactatagcaatttataagattctatggcaacccagatgctcatctccgcaaagagtcttggctacttcttcagcgtatatattagttctttaatctaccatggatttgtggggggggacttcaatgagattttatctatgtacgaaaaaaagggagggacggatcgtgatggtacaatgatgagtgaatttcaaaaatttcttgatgattgtatgttagatgatttggggtacgaagggccaaccttcacttgggtatatcatgcttggtctgagttgtatccttcaatccaagtgtcccatggtgattttctttgttctgatcatcgtcttatagtcgctaaactagagaatgtagtggtacagagtcagaggttgtctcccacgttagccattgtacagagcatggatgaccttgtgtagtagagccaatgatctatcgactaaggaaaagggaaattaaaaaaaggaaagccctaagatgacacgtgtccgaggcctagctcgtacggtctgacacccttaaatgccatatgggaaatatgcgacctaacaacccaatggtatgatttcatcccaacggtgatccatctaagactgcccatgcaaagaagctggccaataaatactccagaaaaagtacaagggaggaggaccttttttgtggagagagaagactgattcttcatcatccaaagcaaacacattttgtaaccctacaatcaactccagaatattcctaccaagcttcctcttcttcaagaggaacacgatggaaaggagttctagtcaattgtatctctatttgtataaacagttaccggccgatgagcctaataaaatggatgtgtggacgaaggataatcaacgtgtgaaccacgttaaaatctattattttttattttattatttactccattattactttcttaagctctaaaaataaagtaaaatatttgcaaagactacatagtcaagttaatcaaaa

SEQ ID NO: 101217 - DNA, 806 bp, Cannabis sativa
cagaatctaaaataatatttactcctttttatatgaaaaacaaaaacaaaagttatatataattttttttttaaaagaaaataacagttatcgaattataggaattttatgtacatatatataaaactaagaaattacccgcgcttcgcgtgcagttatattttatttaataataatgtgataagttcataaaaattaaagaataaataaataaataaatttgaaaagatttattattaatatctcattaaatttaaatttttaatcaaatatttagatttattattaaatatctcattaaatttgaagttaaatttaatcaaatatttttaaggagaattttatttatatacgcaaatatcataataatttcaagaataacaatagtcaaattaatttttatataccgaaacttttatatagataccgaaaaaataaaatgtcaacttatatatataggctcggtatctctgtttctctcttgcaaatgcattatcacttttttttaatgtctcaaatcacaggtgtcatattaataggtaataaataaatttaactataaatattaattttaattttactaaaccattagatcttggtccgatagcgaataataaaataaaaaaaacagaaatttaaatttctatacttaatttaagtacttaattaaaaaaaaatatcaaataatacctctttttacgctatataaaaatatatatttatatgtaaaatatttaagtcgaatttaacttcttttatcatttttttgccaaaaaatttttttttattatttttttttagctgat

SEQ ID NO: 101218 - DNA, 1266 bp, Cannabis sativa
ctatataatagaattcttggtttaggagaaattattgggtgacttttttttataacgatttattaaaataatgattttttaattcttagtttaactatttttgtggctaagtaacatcaagtttaatgattctcgattaactttcatctaccatccaccattgatattattaattaaaaaaaacgattacttttcaaatccttaacttatcttcctctccaatctaatttttttttaaatctcaaaccctaatcccaatcgcattttctccacaagaaaagctgcaatcatatacaactcaaagctttattaatgaatcgacaagttgtatcacaatcattttctccacaaaagaaaaaatctacgaagaagaaaagctccaatcgtatactgcttaaagctttattaaggaatcggcaattcgtacagcgtttgccgctgaagaatcgtcgaactttgcttttaactaaaagaccgcctaatcaagcgccgattctgccagagatgcgtcgaatcggagagttagcaggaggtacgacgactatccaatgggggtctactattgcatcagtttcctgccgaacaacatacaacccaaacccaaaatgacttctgctccaattcaaacaaatcttcttatgacgccttacaaaatgggaaaggttcaatctttctcataggtgaccatctttcttctttgattatgagtcttgttcaatgtttttgttttctgtctcccgattaattttattactggttgtttcttttttttttttttaaaaaaaacttaatttgtgtaaattgaaatgataataataatagtagtaataataaacaattatattacaattcagtttctaaagtcagattagatgtcacgatggcatctgatctttgactctggtagggagaaatggagatatacgttggtacattttttgctgttgattgtcaatatgacttttcttcaattttctttatttgtttcaattgctttttgcttactgtacataattttaacctgtacaacctttgatagagcattggcttctttttctatttggaaatccaaagcttatttgtctagaactaaaaaaattgttagtaaagtcttaattttagctaaatgtgtgtacttgatgctgatttcttccagggttgtcttggcatccttgactcgacaaaggtcataaaacaatgtccctcaaccacatgccattttgtactgaaattccgtattttaatattcccagtttgattatttaa

SEQ ID NO: 101219 - DNA, 1074 bp, Cannabis sativa
gatgtatcgggcgtaggtacgggcatcagtgacatatgataagtaccaagcgtaggtgcgggctcgtctgattagacgatgcgatgtacctagtagcgtaccaagcataggtacgggcgtcagtgaaatatgatgagtaccaagcatcgctacgggctcacctgattgggtgatgtaataatcttggcgacgtatcgagcataggtacaagcgtcaatgatatgaaaatgcctggttatggcatagatcgaaacaaaattttgggtttctccctcgggacgtattgggcgtaggtacaggtgttagtgatatatgataagtactgggcatatgtatcggctcgtttgatttgacaatgcaatatattagtgccaacatctggcacgggctcacctaattaggtagtgcaatgatattatatatgatattaaattatgacacaggcttgcctgattaggtgatgcaaatatataagcatatctatttctatggatatggctcattatattatctattgtagaatattatggttatgatattatatataataatgcattatgacacgggcttgcctgagtaggcaatacaaatatatgagtatatccatttctatgcatatggctagttatattatctattgttgaatgttatagtttaatcattttatgataataaaatgtataattagttatttaatgtatgatgtgtgtcgtaagccacaacaaatttactattttcttaattccaatatttctaattattttagtataatcgtaagtaagggtcgatcccacgaggactatgtttatttaattatttacaaattggtaacaggaattagaaaagtggcgattttgatgattagaataaaaattacaataattaaaattaaagaaaagaacaaatttaaagtgagactacggtatgagtgacaagttaaaggttatttgccaccctcgacaatcattctgaattcctattaaagaatgtaattttcaatttccaaccaaactattaatcccgtagataacgctgaagcagtcaattatcccaatctccctattgtatgtaatc

SEQ ID NO: 101220 - DNA, 1848 bp, Cannabis sativa
tcaatacttttaattacatgggctgtcttaacagttgctaaaatgttataaaatacatttaattacattttttcagtgttatcgtaaatgttttttcttgtagtgtcaagatatgtaatttatttatgtattactgagttgggaaggctctatagctgatgatagagtccttcgtgacgctttaaggaaagcaaatggattgaatgttttgcatggtgagtacaacaaaataattcattaagagacaagcttttatcaaacttttgcactaaatatagcaagtaaaaaataattcttattatcttatatatagggtactattacattgtggatgttggatatactaactgcaatggttttcttgctccttttcgaggacaatgctatcactttagtgagagtggagaaatggaccacatccaaatagttcaaaaaaatattttagtatgaagcattcaaccgaaagaaatgtgattgaccggtgctttgaggtacttaaaaatagatgggcaatacaatgaagcccatcgttttatcctataaggactcaaaatcaaattatcatggcattttttttattgcacaacttcattcggagagaaatacccaatgattaatatgatgtatatccaccaagtgagagtgataatgatagtgatgatgaagatgacaatgggtgacccaataacctcaattaaaacttctgatgagttgaatgattggaggacaaatttagcacaacaaatgtataattagtggaaaaatcaaagctaatatgtatttatttgtgttgtcatttttcttgtctttgtttaatatttaattagttgttcaacatatacgttgagctcttattatccttttatatataatgaaataattatatttggtttaatttgatttcaaaggaacaagcatttcaaaggaaaaagcttgattattgtttctatgtttgattgaatatctcacttaacaatatttggttattaaatgaatttgttaatcaacatttttaggatagaatcatcaaagagaggttgaagacaaaataaaaagtttcggtcagttgatgaagataataagcttatagaggctgtcttagagattcataatgaaagaaagtttaaaactgaaggtaatttcaagcctagtcatctaaaaactattgaaaaatatatgaaaactcatttgcttggttatgacataaaagctaagcctcatattgagtcctgattgagaaccttgaaagtataatttagaattgtccatgaaatattgactaatgggtttggatgggatccaaataagaagcttgtgcatgcagagaaatccgtatgggatgcatagttgtaggtataatttataaaagaaattattaaatatttacatattgtatgttcttatagcatattcatattctattatttgcagagtcataaggttgcgacttttaaatataaagcattttcatattatgaagacttgtgtttggtgtacagaaaagattgtgcaaatggtaacgatgcagagggtctagctgatgcagctgatgatattgcaagaaatgaagaaatcaataacatggatgaacaagatgttaacaatactcaaactatgggagatatggaggctaataatattaactttatgtctttctcacaagcttcacaaatgcctcaatctcgctcagatggatcatcaaaagaaagagaaagagcattgaagtttctgatgatcttggagaagcaattaaagaggttgcattattagttattggtagagaaatgaaagagtcatttgctcgactaagtgatgtaattaatgataaagaactgaacgaacgacaaa

SEQ ID NO: 101221 - DNA, 1514 bp, Cannabis sativa
acccgtagtcagtgtttggatctcggaccctgacaaaaacccacacccgtaccccagacttgggtccgagtccaacactgggtttgagtctaggaactagaatcagaataaaacccagaactaggcccctaccgggatgcagacccgaataaaaactcgaatcgggactcgggacacgagcccaaacccaaacatggacttggacaaagacccggacccaggacctgactcgggattggagactcagaccttgactcaagacccagacctagattggggtcccaaactaaaaattagaaccgaaatcgcgacccaggactgggtatgtgacccaagccccgaccccggtctcggccccagacctggacccggacacggattgggacccaagatccgaatcggaacgagaccagcacctaagattgggatacggatcttgacccacgacccagtgcttggaccaacccctagtgggcgtgtaaatcttggaatcgtaccaagacccgaacttggaaccacttccaaactaggacccaaacccaaacttggattcgagaatcgaaataagaataagaactggaataaggattgtggaaccggaattagatctggacccaaactagatctagacgcagaactgaacaatgagcccgacccaaagtgggatcaatacccagacccagacccgaatccaaacccagacttgcgccaggacctgcgacccagatcccataacccaagaccggagacccaggactgggtccaaaactgagacctgtaccagaacccagacgcagacccaaacctagaccaaaactaagacccggacacaaacacggactgaaacttggacccagacccagactcggactcgtacaagaactgggactcgaacccgggacgtggacctagaccgatatcaggtatgggacctagacccgaactaggaccaagacctgaaccaggactaggactagaacccaaattaggaatgggatcgagactcgggacctgggacaaagttcgagacctggtaccgagaccgagaccgggaccgggacatgggatcgggacagcgacccgggacccgatactcgaacctaggaccttagaattgaaccatgacccaaacctagaccaagccaagacccaagacaaggaccagtactgaacacggaccgggacctaggatcctgccctaaatctgggacctggacccatgactcaggacccaagacccaaacctagatgcaaacatccacctgacacccgaaccatgacccaagacatgagctagaactagacaaggatctggatttggatctgggacccaggacccaagactagaggcttagacccaacccataatcggtgtctaaatcaaggaatcggacttggaccaagacccagaccctgaccagaacccgaatccatacaagaagtcgaactagactaaacatgaggttggagtttggatttgtgaccaagaatcggacctgaacccaaacacagac

SEQ ID NO: 101222 - DNA, 1010 bp, Cannabis sativa
agccacttaggcatcgaagtgcctcgactttcaacattcttcaaagagatcgtaaatagtgaagaacaaaatatcaatcttattctcacaacaagagttctcagatgacaacataaaggctataaattcttactgaaaaagagcccccaataccaaagattacatattgtttcaggaacttatagcaccaacaaatcgcataggccaatccgcgaagactgcgattagcggcatgactgcacaacgaaaaattgaattgcactaagaaaaaagaagcgatgaggatgctcaacaaagaaagaacaaactgctctcactcaccctgtcgtcgttctcgttgccagaagaaagtctaatcggtaaactccaaacgacatctttatgtcttgaatcaaaaacgtctctataaagtacaccataaatggaaaatcaaatgggtgtgaaacggttcaattattgaagtgaagagaagaagacgaaatatcagaaccattcatttaagtcatttgaggaaagcatattcgggaggttattgttcgtaagatggttagcggcgtttttgagagttcgcatgttaattgagaaacatatgaaatactgtatagggtttggggcatgatgtaatctttaaaggcagaaggccttttttgttctggttatctcaaaggcccaaatagcccacatgataaataccacattatggtatggtttgtattggtacatgagatattggttagtgtacccacatgacctgattgatggagctatacgagtcagcgcaaggaagagaggaaaaataagaagctacacaaatggtcacaacaatcaaagtttcctctctacaggttatgatctttttcattttatctaaaggatattctccatttataatgaaaatacgtatatgtggtcttgcgaaatttgagaccaaattttgttgcaattgcgaaattggcaaaccccacgtgtgcacattctcgcataattgctcaacaaaattattattgcgc

SEQ ID NO: 101223 - DNA, 534 bp, Cannabis sativa
atgcagtgtccatttaatagcatgcaaactcatactgaactgtgtatacaacgaaattttgatgtgtttatgtgtggggtattgattgcttatgaagtttgtagaaacctaaaactttataattgtataatttggacagtagtatgtccaacttggcattatttgaatagttagagatgatatctgtggtttgctttttgaataattgaatcatctcttttgatctgaatgatatatgtttcattctcttctctcccttagctttgagaagcgttaccaagaggatgttaaattaaaagctaaaaaagaaaaatatgacactcaaggggaaccttcaaaggttgaaaatgttacactgaaatcaaccaaacaagaaaaaaatgacactcttaaagagcctgtgaaggttgaagatgtaatactgaatccagctgaacaagaaaatacattgatgaaaacttcagaagcagaagttaatgatgcaaaccagctaagtaaagcgtcaaccttattacatactgatcaagacttgga

SEQ ID NO: 101224 - DNA, 671 bp, Cannabis sativa
gactaaactcccttagcgtttttctcattgatggtaatctatcttaacactagtaaaaatctagtcttaagttcaaaatgtaataataagtcaatagagtggatgtggtactcaattgtcccatctatggatgagttcatgcggtaaaaaattgaaggttaaaactgaaagatttttgaatggagcttaagcttaaaaaaactcacttcagcataagaagtatctaaagagtcgcgagacactaaaactccacctatatggactagaggtggtgccgcctcttatgagaattatgagtattctctagagagtccatgaattagaatcttgcacgtggccattaacggtgcaagagcgagacatgcagtctcaagtgagaatattagcaagggtgtgtgtgttatcaccggtttgtactaaaggaatagtggttcaattctacggcaaccaaaatttcatcaaactttgtggtaactatactaaggtaaaattcaagtcgaaagatattttacgtaatgcacctaagcaaaacttctttgaaagtgtgtatttatttgatcaaagtggggaaatattatattttgatacaatattttgattaattgaataaatattacaagcgtatcacacattttaatctagtggggaattgttgttgggaatattttacc

SEQ ID NO: 101225 - DNA, 609 bp, Cannabis sativa
tttgaagagtttttagatttaatgatttgaaaacatagaaaacataaaattgttgttttcatttttaagcttaaaactcaaaatcatattcaaatttattttttgataacaccataccaatcaactatttttatgtggactcccaccttttaagttttcaaaaacataaaattcttttttaatgaattaaatttcaatagacactaaccttaagttgtgtcagcaacaatatttatataataaaaataattaattaacaaatatataaaaaaaattaaaattgtttttaaaaggaataaataattaatatttgaatatgtctagtcttatttggaatttaattatgtttcagagattaagtacttgacaagatagtcagcgaatggttcatacccttagaccatctcaaatgtaatttgtaaattttgtaaacaatttggctcaaaaaaataattaatgttatatttagtctaaattttttaattataggctctaatagattagtgtggtaaaaaaaattaattgttataaaaagttgtaaaaagtccatgagaaaatgaatttttattgaaagtttatcaaagtaatattaaatatataaataaaaga

SEQ ID NO: 101226 - DNA, 1438 bp, Cannabis sativa
  modified_base (1171)..(1184): a, c, t, g, unknown or other
aacaccacgatgtactttcagacatcatacactttaccaatgcactctgtaccgaaaccatacaagtgttcgtagtgtatgaatcacaacatataagcttgcatataacctaaacatatacatacattcgcatacatacattcgcatatccatatcaaacattacatacagttcttaccttctttccagattaaagtgtgctggccgacctgaacggaaagtcacgtgctggatggaagccctaatcacatattggaactgggtaaatcacatgctcgaaaaccctaatccaagaaatccaaacctacaactttaggttctattttactctctatgaatcacactaactaaggaaatagggaaacacccaactacggcaccaaaatggacgagaattgagaaaactgatttttcggggagtcctgcaaaaaccgataaaccggtttttataccagtctccccaaaaattaaccaatttgcgcaaaacttttccaattaccaccaaactttccagagtacctaaataatgtatatacaacatattccaaccagaaaatcacagaaaaatctaattaaactcaacttgccattaaagaccaaagctttgagttcaaaactcaaatttgcataaaaccaacttgatacatcaaaatcagctgaaaaagctaaaaccaactcaaattaaccctataattagaaccctaaacatttctaaccctaacaaccatcaattctcaaaatcacatattcaaaccaagtaaacacttcaagaacttaagaggtagagatgctagggcttaccttggtttaatttctcttgaatcccttgctgaaataaccaaagttcagcaacaaaccctctagctttgggctggttcaaagaaggaggaaaggaagagagcttttttctcaattttcttctaatttctttaatttcctttaatttctctaagtgaaataaaggttaataccttaaccttggctgaagtaatttaatgctaggtgtcaacacctaacgtagccaccaaacacccatgtggcaaattactaaaatacccttaatcttacaacttaggtattttccaaaactaggggttaaatggtcaaattccataaccccgattaatctcagtattttattttctccaaaatatttcccactaagaaatannnnnnnnnnnnnncccatgtgatcaaactagccatcaatagcgtttttcgttgtcgccgagcaaaaattacaaaaatagcatatttcacatataattcataaaatatccctattgtttaataaaatctttagaattgacaaagtataactctaatgcccatttctaagaatggtacccatagataattaaattcataaataattataaaaatatcagaaattcgtgctaattgcctttactaatccaaattacttaagcggtcatta

SEQ ID NO: 101227 - DNA, 742 bp, Cannabis sativa
caatgtatatagcaaaaatcccaaatatttaacaaactttccaaaactatccaacaattcacaaattcttcaataaaaattgggttgagagtcttagattcaatacctcaatgagaatcctcctttaatcatcctccattgttgaaagcttgaagttcttgagaaagaagaagatgaataagggtttttgaaatttttaggtgaggttttagggatttggggttgattttgagtgggaatgagtgtttgatgagagaaataatggtttaagatgattgggaaggaaaattatggtgaaatatgaagtgaaaaggttatgaattggatttgaagaagaaaattggtgtggaagagggtagttcagcgtggtggttaggtttaggaaatatgaaaggtgttttgaaatgatatgaaaattgcccctttttaaagaaatctgaccagtttcgccgcggcgagatatagcctcgccgcggccaaaacccgtgaaaataagatactctctgtaaggcttaaatggccgcggcggtatgtcccctcgccgcggccagatttcgtgaaaataataggggttctgtaagccttaaatggccgcggcggtactacatctgcccgcggccactgggcaattccccttttttttttaaacaaaactggacaaaaacgaaaaagaaaattaacagtaaaacctaaaaagagttcaactaaatcataaagaacacttgggttgcctcccaattag

SEQ ID NO: 101228 - DNA, 771 bp, Cannabis sativa
aaagggcagatccgagctggtcaagagcggacctgagcagatccgggctcctgccccacctccagcactacatatagagactaagagaggcaaagatatgctcacccactacatgactcggtcagtccctgaggtgaatgagcagctggctggagctcataatgagctttccttggagctggtgatgggaggagtcctgaaggagttcacgagggtgagtcgtccttgttagttttctattatccttctttacttagctcagattctaatgtttcttctctgtgtagaccggtctgaagatggcttatgcttattcccgggctaagtcggttgcctctaagaatgcttccatgtccaacaccatgagggcggaagtggacttggccaggaaggatgctgatgaagtcagggttcaacttggagccatccgaatggaactgggtgaagtcaataaaaaacttcttactgccgagaagaaagtggccgagctgaccaaagatttaaaggctttcgatcaacttgaagctgctatgacctccttatccaaagaagtgaacaacctccaagaagaaagggaggttcttcaaactgtcttccgtaggttggaagcggagaagaagtctaaggaggaggagcttgtcgctgaggttgagaagtacaaggctgaggtcgagcagcagagacctgaggttgagaggcacaaggcagaggccaaacagtagagagttgaggtggtgaggctcggagggaaggtaaattccttagagacag

SEQ ID NO: 101229 - DNA, 549 bp, Cannabis sativa
tcggcaaggattgtacatatcacggaagtgcaacctggagggtttcgaccttatcacattttgagttttattttggtattgccctgtagtttgtaaaagaaaaaaattattatgtaattatatatatatagtatatgtattttcgacaatggttttaaacttgggatcctgatttatgaatttttataaatataataaaataagtttaagttttaaatatgtcaattttcaaatacgggcattatacgtagtatccacactgtttgtcgtcgggttattcaggacagataggagtcatccactggataagtcgatcacgtcgtcgtatcatttggttatatatggtgaatgattgttaggttatttttagtattaattttagattgaatttagtatattttttattagttttaaatcgtgtttggagcatttttacacttgttattttttatttttgccgatttaaaatagaagaagattaaaaaatatcaaaggaataagatggaaaaaaagataaaaaaatctcacaaaaagatgatatataaaata

SEQ ID NO: 101230 - DNA, 1190 bp, Cannabis sativa
ataaaatattttttagtgactcataaaattgattggtactgtatattatattttgtttgagttaaaaatttaatttatttcattataaaaaaaactaaaaagttatatctactattttttttttatagaaacctacctaaatggttcaacaaaattaacttgtttaaaatattatatgttttttttttaaaatatgaacaataaaatactttttagtaactcttgaaagtgaatggcataacatatttaattttgttgattttaaaatttagttaattaaaaaagaagaaactaatactttttattatttttttattttggtcatgcggaaaatatatacgcttatcaaaatagttatcttaaaaagtatattctaattatataatatttttaagttaaataattaagtttgaaaacatttatttaattttcttgataaaaaaaataaaagaaagtgaaacagtaaatgtcatttaattaagaggaaaagacaaaaaattaaaaaataaaaaattaaataagaaagtcaagttattgttaggaagaaaaaaaaaagcagactacagttgaaaaaacgaagaagaaaagaaaagagttgaaaggttgactctatggctggctagtaaaacaaatagatagcaatttttcggtatacgcatatgacaaattattaaaaaatatccacattcacagcattaaaatgttagagcatacttttgtaaatattttataaagtatgtattacggggtaattttctcttaaaataaagtatcatctcatttgtaagatagaacccattttcattaaaatagaaagctatttttacttatcaaatagaaaccactaaacttattttaaaataatgatttaaacaaaaattacattgatattactacgtatattgtttttaaataaattttgtgtatgtagatatttctttcaagaagttggtgaagttggtgtgttgtgtaaaaatatctttagtgtatgtattattagaaaaaaaatcaatttagcgtaaaattgaataaaatatttgttataaatgtattaatgaaaatttttctaatatatatttgttataaatatttgaagttacgtgcattgcacatatatttaatttatttttataacatattatattttttatttgttttagatttgctcattctaattttcatgtaaatat

SEQ ID NO: 101231 - DNA, 705 bp, Cannabis sativa
attaataaaaatgatatttttcaacttaccccttttagatttgggtgtagttggtcgttttgctgtggtgcggtgatggtggtcacggtggttgacaaaggttatggtggcagttgcggtttatcctacggtgataccaatatgtcaatttgtggcagttattttaatagtttttcgaatttttacagtttttgttatataattttagtaagatagttataaatattaattattattatttaattttttttttaaagtaattttactatattattgctattatatcatctttgatggaataatgattgaaaattagtatgatttgcaaatttatttattaaatattttatgattatttattttttcatggttcatatataacattttaaaatatagttttaatttaatggttgttgagatgatcaaatatgattatttatctaagaatttatcgcaatcttatatagggtcacattatacatattcatgactagtatgattaattttttgaattggtgatcatattttgcagtttttggaataatttatatatgttagtagtatttttatgtacttattaagttgaatttattattttgggtaacatttcttatttattatcaatttattattatttaaaaatattattatttattattttttgttattagattattttaggagcattttacaattttgtataca

SEQ ID NO: 101232 - DNA, 554 bp, Cannabis sativa
aattttacagtaacatataaaaacgacatacaaataataataaaaaaataataacaaaattacaaaccaaaaaataaataaaaacatcagtaatctatatttttataaataaaaactcattaaactggttgaataattaaaatcctccacttccattaaaaactaactaccatagattttgtccttaattgtcgctatatgaatttagattacaatctaaattattccgttaattgctatgtgaatttcagtaaaaatatatataaaaaaaacttctttgaagagtaataattaaaaaaatcccttattattattattattatgatcaagctgaaaaactataaaaaaactttctttcaattcaatcatattatttctgtttttcttcttctcttttttctatggcttgccttctttgacatcaatctaggcaaaagcccttattgtagtctcaactcaaactcaaaataaaaggcaaaatactttctttactcttttttttcttccaaaactacccaaaataattatctaaacccccaaaaaaaaaaaaaaaa

SEQ ID NO: 101233 - DNA, 567 bp, Cannabis sativa
gaatcattctatcaatgttctcattaccatttatgcataatgcatgactcctctctattaattggaaaaagaaaatggatatgagataagtgtagtgatcgatccggtttcctattctacaagcttaattgtacattataattagaggtgacatataatctaatctcttctaattcaattatgaaaaattagatatctaattacaatttaattggattgaattataattgtacttattgaatcgattattgaatgtcaatctacaaatttaattaaaaagcgatcaaacaattacatttatatacataaaaaatttaattatattgatttatataataaaaatattaaaaaataataaaacaaatatattaattatatttttagtggttttttttcttgttgagttcgtaacatttggttattttatgtatattttcatgatttttctctattttattacttgacattttagttatttcaaacttttaagtgcattacacttgtaaggatgatatttttatggagtattaaataaaaataaagagtgatatttaatttttacgtatt

SEQ ID NO: 101234 - DNA, 824 bp, Cannabis sativa
ttaatttgcaactaagttttgaagataatgaactttattacttttaagtaaaagtaacgtaagagtatcttaaataataaaataatataatgttacttaaaataatattttttgtaatattgctaattctatgatgcttaagatacaatttcgtttctttataatttttttaaaaaaataattatcaaaatattactcgttaaaataaacttatttggatactatttggctacttttaaatatgaaacgataagacatttatagtaatctaccataaaattaacaatatactaaattttgtttaagtttaaaatttagttactttctttctttttttttttaaaataaatttagttacttgtatgttaataaaaaaaaaaaattaaagtgttgcttttaagtatagttattttttgataccaacaacaaaatatatgcttcccacacattttaaaatgactaccttaaaaagtaatataaactaattagtatctaaatgttatatttttttaataacatcagttaattcctcattcaattcataaaaaaatagcactcagtttgatattaatactcgcagtaagagaaaaaactgcatacaactaacttcaattttatcatttaaatgtctaatatttgttaataattttaaaattacgtatataactaaaaattatcctatatttttttgtctttttttctctttttgggcctatagtcctgttgaaccgaatagtcactatgtctagcctattgggccttttaatgagctttataatatttaactgggctttgattgttttattttgatgcttttttttttt

SEQ ID NO: 101235 - DNA, 1345 bp, Cannabis sativa
tgatgtgtttgctggtgtaacaggtgtatgtgagtggctggacgttgacgtgggtgaaaggggttgaatgggaaggtgtatggcaggaggaacggtttcatatgactgagatttggtggaatgttcatgctgagagttggtagatgcacattcggatgtgggagagtgaggagatgtcgtggagcctgcaacacaaggagcaatattagatgagaaatcagatgcatcatcactatcattgtccgaaaagctaggagatgagatgaaaggaagccaatgactatattggatgattggtgaggaaggggactggtttgtggactatccaaaaccagtagagaagggaaattcaagctcattgaatgagacactatgtgctatgtatattctaccacttggatggagacacttgtaacctttgtggttaggactatatcctaggaacacacattttgaagatctaaaatctaatttgtgattgttgtacgcacgtaagtgaggaaagcacgcacatccaaatattttgagaaatttcagatttggtgtgaccttaaacaatgtctcaatgggggacttatgtgctagagttggagtggttaaatggtttatgagataggtggctgtgctaaatgcatcccaccaatatctcaaaggcatggaagcttgggatagtaaagtgagacccatttcaatgatgtgttggtgtttcctctcggacttgccattttgagcatgtgtgtgagggcatggatgtctaaagtgaactccaatggattctaagaatggtgccaacttgcgatattcacctccccaatccgattggagagtcttaattttggtgtcgaattttctttctacaaacttttgaaaattgaggaatgtatttttgacatccgatttcaatttgagaggaaagatccaagtgaagttgctataatcatctatgaaatgcacatagtatcgatatccttccttggatagaatgggagagggtccccaaacatcggtgtgtattatctcgagtggtgaatgagatttagtgtgagaggtgccatagtgtttgtatttggattttcctatgtgacatgcattgcagaatggtgtggagtttttgaaagaaaccttttcattaaccaacatgtgttttaatacattgacattaggatgacctagacgcatgtgccacacattggcatcggaattgaaattagactcagcaaacaaggattcacagctactggactgactcaatttattttctatttgaggaattttggcaatatttttgctcttggaggaaacagtaaagcttgaaccagtattggcagggacttttgacattgat

SEQ ID NO: 101236 - DNA, 1103 bp, Cannabis sativa
  modified_base (303)..(307): a, c, t, g, unknown or other
gatgggctatcaatttcaagtttgttgcagttcatttttcttcaacttcatcaagtgattctccaagtagtgtatgattaactttttaattatatgtcagtcttctatgggacagtggttcgagttctacgtgaagcatagcttcataaccatatgcatggcaaaaggagtctgtccggtcgctattttctcatttgtgcggtatgaccataataattcaagaattcctccagctagtttcttttggcatcttcaactcgtttctttaaagtatctttaatgtcttgttgactgcttcaactnnnnntttgcttggggatgtgccactgcaaagaaactttttatgatcccatggtaagcatagaaatcagtgaaggactgactgtcaagttgtttgccattgtctgagactatcttgtatggtaatctaaatcgacaaatattgttcttcacaatgaagtcttggactttttttgacgtaatggtggtcagtggctcgacctccgtccatttggtaaaatagtcagctgcaaccactacgcattgtactctacctttgtccttgggaaattgtccgatcaggtcaattacccaaatgtcaaaaggccaaggactttgcatctgagttagtttgttgggtggtgcatagggtatcttggaaaatctttggcatttatcgcaatacttaacgtaggccttggggtcctcgatcattgtttgccagaaataaccttgccttagaattttcttaaataagctttgcctagcaacgtggttgctgcagaatccatcatgtacttctgacaaaagtcgtccagcttctttgtttttaatacacctgagtagtggcatggagaatcctcttctatacataactccctctacaatgatgtatcgtgcagcttttctcctcattttttgagcttcattcttcttatttgggagttctccggtgttgagataggttgcttttagcttcatccaatttggggatgtatcaatcattttcaatctcctccgtgccgatggtactggattttttaagaaattggatggggaccagattttctttatcttttattgtaacgccctaaataaatagg

SEQ ID NO: 101237 - DNA, 776 bp, Cannabis sativa
  modified_base (747)..(750): a, c, t, g, unknown or other
gttttattataatttgtaaaaatacataagtgaataacatatacctctagctagcaattaatgatcaccaaaattttacttcattttccaataataatccacaacctacaatattaaatataatataaaaaattcaaataaaaattaagttaaaatattaacaagtaactaatacatacataactagtatagctatatatatactaatatagctaagttaaaaatagtaacttataactatttaaaataataatgttaatatgtataaatatataaactacttaaaataatatttttgaatctcttagaaatcaaaatcaaagtaatcacaaagtcacttaatagatctataattaaatataaacaaacacaaataaaactatttacataattaattagtagactataattactaagactttcttaatatcaatatattagaaacaataaaaaactaataatcactcatttaaataaaaaaaattctaaaatatattttagtttgtaatttagctacacattatttagtacaattttaaagagtttaaatgtactaaacaaattttaagtcaaaattaactacaatattctattttgttttaaaaaaaataatattgtaacacattctaatttcaggtccaaaataaatttaaacttctagcataggtgtacattatttttaggtaattataatattcgaatttaaataaaagaaattactcaaaaatatatatctttatatattannnntgtctatctaacggcaattcttggtt

SEQ ID NO: 101238 - DNA, 838 bp, Cannabis sativa
tgtaacctttggtaatggtatgattgacactattcttggaaagggtaccctcaatgttgttggattaccaaaattagaaaatgttctgcttgttgaaggactgaaagctaatctaattagcataagtcaaatttgtgatcaagggggcatatctttcgatttttgagcagtttttctttaattttttcttttatggaaacatgtgtttattgcattttattgtgtttcatttcattatttttatttgtgtatttttggaaacttgtgtttttaaaataatcattttgttggtttcttttttggtagtattttcgaataaggcattgattgtgggttagtgtattgtttcttattttttcagattttgtggggttaagttggttttttcttttcccatctttggtaacctttgaccaaaaattgaaaaatctttgtgtttccttttttatccacatgtggtgctcaagataagaaggtaaaggtttcttttttcttctttttttaagattttgtgggtattgatttctatttgctatttatacctaactatcctcatctctcttcccttgacaatatcctcaacaactttcttcactttctcactctctcattcttcttgttttcgtgagtgtgaatgatcttctaataggggagaagttgctttacttttgttattggcttctttaatagacaaaaagagggagaagtgtttatatacattgttgtcaactactcaggaggaggagttgtgtttaactaaggggagttggttgctttgtttgtgatttgtgcacttttccatttaagaagttactttatttgtggtttgtgaactttt

SEQ ID NO: 101239 - DNA, 712 bp, Cannabis sativa
aaaataaaaaaaaataaaaaacaagagtaattaaatgtggcacgtttttcactacaaagtgaagcttttagttctctgatttttatccaattctattttggtagttcaatcgtgaaatttctttgtttctgtatttctagaatatgagtgtgtgactagttagaattgatcctatgaatagtacagagagcgggtctgtcatcttggtaaagatggttttacttcgtcgaattactgtatcaaccaccatctacttcagagatcccgactgaaagatttttcaaataacaaagttcagtatcttttgtcgaattagtgaattaacgaagatccttttgtacagaataataaatagcgaatcaatcttcagaaattttatcgcaccagaataaatgaagttttccaaaaaaaaaaatactagtggagaaagacctcctaaggataagagacagagggctaaagagagagccaaaaaaggatctttcgtgtataatccagcataatcaaatgttacgtagaccaaataatacaatgcaagcaaaagttcctagattcatggagatatagaactggatataagttattacgcttgcatatccaccatttgaaagtaaaaaatttatcagccctagtcaaaataacttaaataagcatttttttgtgcttttgaatattaaaagcacaatgtccaaagaactaccattttttaaaa

SEQ ID NO: 101240 - DNA, 788 bp, Cannabis sativa
ttattaatttccttcaaactagccttgaaatgcttgagctttgtaaccacttgaaacataggagatcccagaattccttgcttccaacattccttaaaacagccatcatattttgaatgggattttcacattcgaaaatacttaaaaggctttcttcccgaggcactaataggatgaagtgaaagaacacccggagagtgatcaaaaagtccttcattcatgtaaactacctcagcatagtcatacttgtttaaccaagattggttggccaacatcctatcaatcttggaaaaaattctatcatccccatgttgcttgttagaccaagtgaagtagttcccactagtcttaatgtcttccaattgacaatgagttacacaattcaagaaagccgaatctggatagtacttcaccttattcccaatcctctcttctttagctgatatgtcattaaaatcttccatgagacaccaattctcacttgtatttacttcctctaaactcttccaaagtaaacccctctcatttctattatttgaagcataaatcactgttatgaagcttgaaaacaatccatctattgttgacacttttagatgcataatttgacttgtgaatctaataatatcaacagcaaaccttggaggattccaagcaatcacaatcttcccccacggatgccaaacaatattagatgaaaaacaccaaccttcaaaaacatttgagtacaaggctccaagctttgaagcctttactcttgtctcgaggagcccaacaaaatcaacttt

SEQ ID NO: 101241 - DNA, 963 bp, Cannabis sativa
attctcaaggatatcatgaatgaattttatgccacatcaggcctagctatcaacaccaacaagtcccaaatttacttgggaagggttgaaagtaaggccaaacatgaaatactgagagagataaacctttctgaaggcaaattttcgttaaaatacttgggaatcccgttgagaccaacaaaatggaaagcggaagactgtgatgtgatcctaaagaaaatcaagcaaagactccatagttgggcgagcagacatctgtcctttgcaggaagatcgcaacttattcattctgttttacttggactccgtaactactggatgagcatctttattctccctcaaagtataactaaggagattgaaaatttttgctgaggttttctttagggtaggaatggaaataggagtaagcttcatgtggctagttgggaaaaggtttatcttccgaagaacttaggtggtttggggttcaaggatggtgccaaatggaatcaagcagttctgcgaaatatatttgggccatttcaaacaaaagggattctctttgggtgaaatggatcaacaatatatatctaatgaactcttctatatggacctatgttttaaagcttgactcgagttggtattggcggaagctttgccatgtgagagacaaatttgacagcatggacatacaaattgcaggggcatcgggtaagttcaaaccacaacttttgtacaacagtaaattgtcccaggttccgttcatttacagcaagagtgtttggagttcgattaatgttccgaagaatcggtttatcttgtggcaagctgtaaatgatcagttgttaacaaggaataaaatgcttcaatttcgggtcttgctggacaacatagagtgcccggtttgtgctgaagttgcttcatgtagaaaatagtgaatcgaattatctgtgtatttcatagaatagtacatatttatat

SEQ ID NO: 101242 - DNA, 1052 bp, Cannabis sativa
  modified_base (979)..(1017): a, c, t, g, unknown or other
atgtttctgttcttcatgatccttccactacaagagatttctgaaatggaattcgaccaacatggggaatcctaattcatagttaattttataaaaaatatatgttactatatattttatctcaatatatcttaatattttttattcaatcataatgttaattttttttcttattggtttgttatatgaagaataattgctgccatggcacctggacgtcgcattacttgctctactacacatagtccacaacttgaccagaccaatgatgttatgccacctagacgtcgcaccactcgttctactatacaaagtcaactatctggacccaacaaacaatctattgtggaaaggcagccaaccagtcgcacaacatgttctaatgttcaaagtccaccaccaagaccaactacatgtcctactggacccattcaaccacttgaacgcactacacactctaatatacagagtccatcaccagcagctaccacacattctgatgtacacgttcaagttcaaccacctgcaagcaccacacactctactgaacaaagtcaacaacttagacagagtcaagatagtgttgcttctcaaacacaatcaggtatgtttattatattttacatcaagttattttcaattttaattgtttttaatttaaaaaattccaatgtagcaccaaccacacagtctactgcacatgttcagccacctagatgtacctcacactctactagacaaagttaagaagatagtgttgcttctcaaacacaatcaggtatgtctaatacattttacatttagttgtttcataatattaatttttatacataaaaatatataatgtaggacaatctgtatccaaaaaatcacgtgggctaactcgtggcgtgagaactgcttgcattgctaaggcatcggctaatggaaagttaccagtcccttttgataaggagtgtctgttggaaattattttacnnnnnnnnnnnnnnnnnnnnnnnnnnnnnnnnnnnnnnncctaaatatgaactttctaaaaacgatgaaataaa

SEQ ID NO: 101243 - DNA, 579 bp, Cannabis sativa
aacaagagagacttcttagcctttcaccacacaaagctctcctccacaccacttgaaaatgaaagaagacaaatgagaaataaaaattagtggtcttacttatatagtacaattataaaggaggaaaaataagtatttcaatgaagcaatatattttctaaacccacaatcagccttatacacgggttgcaatagttttacaattgatgaatgtatatatgtacacactcatgtgatcttgcaccaactaaaaaataactacaaatataaattgtctacatcaacagaagtcactccaagtgaaatgcaaaaagaaaaggcattacattacctaatattggtactatgagcataatatatatatgtggaatggtcaactcaaaactagtgtaatagacacactcccacatatacacacatatacatatgtagtacttatttagacgttgtaatatataaacgcttaaataaaaataaaaagtagtacttatttagaccaccacatattcctacggtgatattttccaatcactaaaatatattatttattcacagttcacatcaagtttaagacatgaa

SEQ ID NO: 101244 - DNA, 586 bp, Cannabis sativa
  modified_base (69)..(69): a, c, t, g, unknown or other
tggatttgcagttagtcatactttgtcgagaacgttcctaactcagttaggattatggttgggtgtatnggcgcctgattataatccgggttattattatattttacgttatacttttcttactgagtctgttgactcacagttgctatttctatgtgtaggtaagggcaaggctaaagctgagcagccgtgagagcgagcagatgaagattgtacatgttggggcggataggcctggagcgtacgatctttgggacatcatggcttatattgtatagtcgctatgcgacaaacttttgtttatgaatagcaaatttttgtaaaggtattttgtaacggatcccgaattttataagtatgttactttatattttttaaataattaagcaaattttagttaatcacgattttcaataacctcattgattagcaataggctgcacaacacgtttaaaatcacgctaacatgccaaaattagttagggtgttacattacccgtacattttaaatttttgatcagaatattaaattagatagataattttagttttcttttcattgttaaattagaaaattagaggaaaa

SEQ ID NO: 101245 - DNA, 569 bp, Cannabis sativa
tgcaaaattaatcgaacatatatggactatgataaaaagtcaaaatgcctccagtcattgattctttgagcttaaatcccacgttagctttagatctgcaaaagaaaaagaaactgattagtgtgggtaatcgggcttccaagttctctctactctctttagatgaatttattgtgtttttacaaaaataagaagtgaattcggggactgaggccctatatttatataagtaaaaccttttattaaaatttccaccacaattaattattagaatattttgataattaatttaaaaaattaaattggaaattaaatatttgataaattgtaatctaaccatatataaaatatcaactaattaattataactaaattaaatgaatataaaatatttattgtaatatatagatgattttatatctaatatataaaatattctaataatcacatttttcctaaaaacaatcacaattgtttccaaatcaaaatacaatttaagctaaactagactaaaaccccatttcaaaccaacaaatcaagaaacatttgtgacccccccaaaaaaaaaa

SEQ ID NO: 101246 - DNA, 507 bp, Cannabis sativa
tgaagactgaagaatagtgaagaatagaagttttttaacaaattacaataattagggttaaagaaaaaaatgtataattaattttaaatagctaatagaattggaaattttaaaaagaaaacctataaatgtaaaaaagatagtaaatataattatcccacacttaaataaagtttatctttcaactatatatatatatattacatatatacttaaatttaaaacccaatatatttttaaaaaaaatatctattacgtttgaaatttttatcgatcaagttataatttttaattttagattatttgtgatgatattttttttcgatatttatttttctaagggcttgaatttaaattataaaatattatctcttatttaaaaaaaaaacgtctaactcatttgactttctatatatataaatacatatacattggttttcaaccaaattaagctaggtactacgtacaatccatatatattctaaacctagctagcaccgaagtctt

SEQ ID NO: 101247 - DNA, 621 bp, Cannabis sativa
taaaacaattgttttgtatgtcgtgtgtctctgtctctttcaacttttcaagcttttcactttagtctcaaagctttaagagggattttgatatgtatactgaaattttaattttttattttttttttaattgtgggactgaatttttgtaaaaaatattacgttttttttttaaaatattgtgtaagttttatattgtgtattgtgttaagtttttactgttgttctacggttgttttttagttgttccactattattttgattattctgttttgtttttttatgtttgttttataaaaatgcagtatttttgtaaaaaattcagtgtgacagtaaaatcgtaaatttttacccaaaattcaatatttttgtaaaaaccctttaaaaaaggtattcttattggcatcagttgcgtggatggccctgagatccgcccttaatggggttaggattctcatctaaatagagaataagtattattttttgacatggaatattaaatggcgcaggaatggaatgacactctcttctcgttaaatttattaattaattttttatattttataatatgtatttgtattttttttagtatattagtgtcatttttataattttttaag

SEQ ID NO: 101248 - DNA, 818 bp, Cannabis sativa
aagatattcaaactccacaatcaactcttataaaccaaaacctactacatagagagcccactgagaattgttgtagcatcgaagggaggggagttgcaccccatgcggagcaaagtcctggatacaagcctaagcaagagtttgtcattattcacttggttaaatccatacaagtcaaagtcaatgtgcctaatttgtagtcatatacacccgaaatatttgttaagggggcgtttgaaaagggaagagaaaattaaaagtaataaattaaacagtaatgtatatttgtctaagtgtataactatatatatatataatttgaggtaattgaaaagatttcaattacactttttaattctcatactgttatgagaattgagaataagtagtatactgtgtaatttttaaaaaatattccattttaaatattaagaattaaaatttattattttcctatataattacaaactattttgtcattgttaggaattattacctcatattcaaaaaaatattgtattttaaaatttagtataattactatactgtatatagttactatatcttagtagtaattacacttacagagtcactttgacgcatttgaaaagtcatcatgtaattgaaaataattacacattttttgaaatatttgtttgattatgtgtaataagactataattacataatttgaagtaattaatgggttctaattagtcttttacatcctcatggtctccataaaaattaagtgtaattagtttgaaattacttaaaaactttttattttaaatattaattactaaaaaatattattt

SEQ ID NO: 101249 - DNA, 942 bp, Cannabis sativa
aattttgtttaagtttaaaaatttaaattaattattaatattatatagaaaagaagttaaaatgtaacaatttgatatcaaacatctttttttacgacaaaaaaaacatatactttatatcaaaataattaccttaaattatagctcatataattttataacttttgaatgaaaactgatatggtctagaaagctttttaaaattatagattaagaaaaagaagagagagaaagcttccctcgaaatttgtattttttcaaaactcgaatacgtgccgcctcatgttctttatgactcaaagagtcaagaatcataacgaatgccaaaattgaacattttccattatggaataacacataatacattctaaaactgtaatgtggattaaaataccaaaaagattacaatctaacatgagaataaaatagtttctaaaagcttataaagcttgaaacttattaatggcagctggtatgaaaaagagatatcaaagacgagaagatgagacgtatatatagagataagatcaaagatctaaaagcatgtcatgcaaaaagccaacacttagctagataaggctgctcgacagagactactacaaataagacgagagctagaaagtccctatcttaccagatgttcgaatagggacttgggggcaaatgttatcccaaattttgtccacttaacgtgacaagtccacgtaaaccaagataaagtacatgtggaatacaaccttaccaatagcagaacaaagtctccttacaaggtatgctaaaactgttgatcaacaagcgaaaggatttaagcgagctggcaaggagctgtaccaccatgtctggctgcccaaggggagtctataggccggctaggatgagcttgtatggccagctagggtttgagcacaagctggttgaccaaaaggtgattttcagaccacg

SEQ ID NO: 101250 - DNA, 874 bp, Cannabis sativa
ttcttgtacaaatgtagggaaaggaaatcgaaagccaatcctataaagaaactaaggaaactcatacatacatagatacccagttgccactaccctaatcatgccgctcaaagatagttggaagtcacatttgtataggatatagcccttagtcataatggacatcgggttgtccctcaaaaagtgaagggaccgcccgacatactcattcttgtcaccctcataatcatgtaccattgtcgcacacttaagagctcgaggctcttcatcaatcttacacacactctcatcaaaacctccccctcatcatcactatcagccaaagtgacatgaggcaatggttgagcattagggatatcttcatcactatctaacattgagtgagcacctccttctttagaagaaatgaccccaatcattaatggtgaagtcacactttcccaagatcccatctcaccactcaacaagagtatggtcacaaacactagacaaatattaatgatctataaaaactcaacctacaaaaaatgctatgatatataccaagatccaacagtcataccacacaccatacaaaaatactacagccacactacacattatgcttgtattaaaattttagtggacgcactatgcatcaagctcatataaaatcgtacggtcataccatacccatcatggttataaaaaaaaattcttgttgcttgtatacaaaatttttacggtcatactatgcctaccatggacaagttcgaatacaaaaatacaactatttgttacaaatttaaatcaaaacatacaaacactacacaactatcttttgaacaatacattgttctaaaaatatcaaaaatatcaagaacgccaagagcac

SEQ ID NO: 101251 - DNA, 909 bp, Cannabis sativa
  modified_base (521)..(523): a, c, t, g, unknown or other
aatctatataccaacaacccacaacaactcataaaaaagttaatataactttaaaataataaaaaaaaaataacaaaactactatagtctatagatatactataatctttaattaatttgcttctaactctaaggaaaatatatataaaaaaattattaaattttaatgtagcaaaagataatataaataataaatagaataaaaataattatttttttttacaagttttaaaataaaaacatttatttacatagtgcaataatttgagactatttactataattttccttaaataaataattgaattattcactaatgggtctctattcaactaagtgcaactgctacaaatgactgctagagttggaaatatgaaagcctcggatagtactcagtcaagagtgcttataaatatttacaagaaatgaaaggggtctggcctaatgatggtggttcaaatttttggaaggagctatggaatctgaaggttccaccaaaagtcagtaattttctatggagnnnagcttcgggttcgcttcctacttgttttcagctgaagcacaagcatgttcctgttaattctatatgtcctttgtgtaacgcttcagatgaaacgatctaccatgctttggtggggtgtgattttgctcgtgcgtgctggcatagaactatggtggacgtgggcagcactttgaacgacactttctgcaattggctgctagttttgtttagccgtagtaggccgaaagagatggaggaagctgcagttgttagctggtcaatttggcgtgcctgtaatgactttttttggcaacaaaggagccgtactgctgcaaatgtggttgcttcagcaagaactctgcttgatcaatacaaatctgctcaaaaagaaagggtctttctttgtc

SEQ ID NO: 101252 - DNA, 589 bp, Cannabis sativa
aatatttttatatttttattgtaccaacaagtttacaaaaatattgtgttaaagttttaaaattacaaaaataatgtgttttattaaaataaaaaaatacctcaaaatcaaccctataataataacttaacaaaaaacgtggaagcaacaaaaagataactgcaaattaatagaaaaaataacaaaatattaacctaattacaataaaaaaaacaatatcaactcctcaatattatcttaaataaatagttgtattaataatagaaataataaaatcttatgatttcaaaataggatatataatataatgggtaatatataattaatatgtcaatatctactactacacatcatatcaattaaaaaaacaaaaaatcttattattatattttaaaaaaatgtgtcaaaaaataataatttatgagatcacttgttagcaagcctctcataacacttgttggcaagaggtatgccattaattctactagttgcctatttttatgagattggtgatgactatcatgataatcacattttctttgattgttctttttctaagcaactcatgcatattattcattcttggctt

SEQ ID NO: 101253 - DNA, 1459 bp, Cannabis sativa
aattacttccaattacatagttacagtgtaattacatggtcagataaacatgccaaattgtgtaattaccttcaattacactgtggctttccaaacacacacgaagaaaaatatttgtacgcagaaacgttttttgtaactctacagcatttaaatataaatatatagatacttagaatgaattatctcaaaatattctatgaaattactttcttcgtataaatgatcattaatgttatgatagaacctcgtagtgatacatcctatctttataaaaataaaaatttaaggataaacttattaaatgagaaaataaacagaaactatacttctttttacaagttcaggaatattgttgtcattttgtttcaatattttaaaaagtgaagcacatcttccatatctaagattacctaagtacaatcatcaaatttcatattggtatgagaaacaagggactatatataagaccacaaggctttcatatatttcagacagttcccaatcccagttcttgatgctgggcgatagggatgaatgatcccagtacatatcatctgctgtacatcatcatcaaatacaatatccactgcattcttatacaattatacaaggaagtatacatgtggttttacctaatttgaaaattgcagtgagcagatacaaaaatgaaatgccaaaaaggaaaaagagcacttcaaaaaaaaaaaagagtgctacctaattgttaaatgctgtgaaaatctgtaagacaccaagccttctcccatattgaagtgctaaccagcccgcaacagagaagtatactacaaggaagcaagtgcggctaaaagggattctaagaagagctcttacaacatttctgacagcagcgaatcccggaaatgaatatttcatttgttgcaggagcataacaaagctgattgagatcaaggaagttgaaaaaccagtaataactcctgctatcatttcccacctccaatactttgatttgtttttgcttataacccaagactgtaaaatcttcattgatctgaaaatataggagccaattatcaatatttagcaccaagacagcatgaaaaatccaacaaacacaaaaaacactgcactcgcggaccatttacataaacaggttagagctagagaatgtgattgcatttaagaacctctcaaaattaacaatgagcatccatctgttttctggcaaaagtgaaaatttatcccgaacacagacgaaaagagcagacactaccatttttataaaactcagtatgttccaattgtacagtacagtattatcccccaatgaaaattacaaaagaaatagcagcacactttaaaaataacagacgcctgataaaaggtaaatgtttttgtcaacagtacataaacaatcataaattgaggctagtccagtgactggatactagaatgagtagtgtgactgatccgagtt

SEQ ID NO: 101254 - DNA, 639 bp, Cannabis sativa
ataattccaagctgaacaataatatcataatagagtatcttaatttatgattgcatactaagagtcaacatcatatttttattgttatactaaatatgtatataccatttagtatataaataaatttaagtaatgcattcaaaattattagttcttaactacttcttggtatatatgtcaccaaagctttatatactttttgtatctagtgtataaatttaattgtataactacttgttggtatataattattatattagtatataaattcaaccaaatactatctacttgttggtgtttaattttactaaaataactacttgttagtatgtattttacccaatttagtatatgaacaaaataagtaataattatatatattttcaataaaaaataattaatatttgattaattttatatttttttacagcgtatttctgctaatgatgaattggataagtcacatgctcctaccaaattaaaggtaatagcttatcttgagtatacattttatacttgatggtattcacttgatatgtttcctaatattcatttttgtaatttagtttattgggtttgttttgaccaattaaacttgatctttgctcaactatattcagttatgggacctatatataa

SEQ ID NO: 101255 - DNA, 843 bp, Cannabis sativa
tatttgtgagagtgagtgtgtatatatatatttatatctatatatccttttctacattttttatatagtgtatatatattgtatattatgtgttgtaacatttttttaatctctttgttggtctttatattatattggaatagagctgtaatatcctagttttctttcattgtaataaaatctctaacaatcaaaagcttatcccccttttcaatggaagaggatataaatcaagattgtgagaatacaattaataagagactttatgtaaaaatcattcatagatgagcatggtggtttttaattttgtcttttactatttaaaataatagtaatctatgttaacatattcttcttttttttttttgttgagattggaaagttttaaatttaatacataaagaattatatatatgatatatatatgtgtgagttataaatatgtatatgtgtcctatatatgtgatcatgagtttatatcatattgttatatatagtgatatagaatatgatatttaaatttataacatgtttatatgtgtatatatataggagatatataatatataacgtatgaatatgagttatgtgtattgtatatttgatgagatataatataatatgcatatatattgtgagattaaatatatagaaataattattttctatgtatttatatgagacatgcatataatatatatattatgaatatataatgcatgtgtagtaaagtgtatataagttatacatgtgtaaggtatgtaacatatatagttgtataaaattaaagcatatatgatatatgtatatgagatatataacatatatatttatataattaat

SEQ ID NO: 101256 - DNA, 637 bp, Cannabis sativa
tttggtttttcatgcaatttctgaattaagttattgtaggaattgtttgggtttagttctattttctggtagcttcttctctatcctaggttcggccacaatcaagaaccaaaagaccaaaatttctcccctctttagcagcaatccagaggggtttggctaaagaattcttagattttggaagattaaagctcaaggtaagcttcctcttctccttctctttgaattctaagtttttgaaattaagttttacatgcgatttctaaattaagttactgtaaaaattgtttgggtctagttctgttttttggtgttgatttggagttatttgagctgttttaagcaagaatgtttgtttatgattgagtttagataaagtttgagagctcaaactttgcgctttaatggtgaatcttgtttcacgggattatatgtgtttttattgcttgaattaagtttgttatggcttaattaggttgtctggagagtttggcacgatttggggttatttgagttcatggtggagttttagggttttctatagtgaattggttaactggttttggcatacttgaagaatcggttaaatgtttccccaagtagaaccctgagaaccaattttctgttttgggaatcc

SEQ ID NO: 101257 - DNA, 591 bp, Cannabis sativa
gccaaacaagcatggaggttatttgacaatccgaactcacttttgggccgacttttgaagcatagatacttcccaaattcttttttggaagctcataagggtcactcaccttctttgacgtggcaaggaatacactgggggcgcgagttacttcttaagggacttcgctacaagattggtaatggttttcatgtcagaagtgggctagatccttggattccaggtcatgatgagtttaagccgatttcctatactagagatccatctacgcctgtgtccacatatattcttgatactatggaatggaacttgccacaactacatcaagactttgctcaaattgacattgaccgaattctcacaatccctttgagtttttaccagtcatcagaccggcttatatggcaccataacactaatggcttctatagtgttaaatctggcttccaccttgccacctcactctcggaaaaggaccaagaatcgtcttcggatgattacaaaacccggtggaaattcttttggaagctgcatttaccaccaaaagtgaaaatatttgcttggaaagtcattcaaaatgccctcccagtc

SEQ ID NO: 101258 - DNA, 770 bp, Cannabis sativa
ttttttttggtttgatttgctctgataccatgatgagaatcatggggttccatctcaaaaccaatttgcaatgagaggagtactagcccattcctcttatatattctattatcttttcacacattggtaatgtgaaactctctaacagatattaaaaagaagtattcctcaacttatcctgaacaatttgtgggtaaaatgagtgcatgaagtttatatgaaatgaaaagattggtgggatcataaagtctcccaagattgtagctagtattggcaaaaaattattcaagtaaatgatcaaatggctgggtgtttttctaaagagcagctagaatcttggagcaagtactctatattattagtccggtactagtgggaagtacttgttctctcataatggagatcaaatatagtgtcctaaaacacaggtacattaattacttggctaggggctttggaatcgtttgaagactaaggatagattgatccgacaaaggtgttccaatagagaaccgatatgcttaatttgtggtgtagagagtgagtcacatgattattaattcttccaatgcatgtgtatatgccttcatgagattctggcttggatggacattgagtcctttcaattcaagttcaaatgtatatgcttaactagataagaagatgtaaaagtagtaatcttattaaaaaaagtgtatattctaaccttcaatgctgtgtgtatatattttattggttaactagcaattttcccccccgaactttgacat

SEQ ID NO: 101259 - DNA, 681 bp, Cannabis sativa
atagagtttttaattagttggtttaaactttgaatttttgttattaatatatgtttatttttcatacacaaaatctctgagataattatttattgcttttaattaggaataattatttaaattatctttttctttttttggttaaatagttgctttcacttggacaaaaataaataaataatcaatgcaagctctttgatcgcatgggggtgttctttactaaatgacttaataatactcactttttttttttggtaaattaataatactcactttttatgtaaaaaaatacaaatatatattgtattatatgaatatacactactagaatatatgaaaaattaaaatcaaatgcagtcgatccattgacagtgccgtttgtgttttttgtcatgtagtattaaaaattgaatgtgcattttaaattataaaacaatatctttgaagaagtaatatgttatttttatttgcatcccactaattattcaaattatctggatattttaaaatttatttacaaatgaaatatataaatatattataataattttatttttcttttattaaatgtacatatttaaattttaattctataaattttttgaataatattaaaagaaatattaagttttttgtaattttttttttttacaaatttatatacaagattataaaattctt

SEQ ID NO: 101260 - DNA, 512 bp, Cannabis sativa
accattaagatcaccaaagaggaccaccggggtattgcaattcgagattatagtgccaattctagtccagaacaattccttacccgtaagagtaggagggccataaatgcccaaaaaattccatatcacacccggggggtcagattcaattgttccaaagatcacattcttgtcagcttcgagcactttgcatatcacccctgttttccaacttataccaaagccccccgataaacccgcaggagggatatagatgaaatgaataaaatggagccttctcattaacttttcaaacttttctttaactaaccttgtttcagataaaagtatcatttcgggattggattgacggagtacctctgtcaattgtcgaaccgccgcagcattcccgagcccgcgacagttccaagcgaggatcttcatggggaatttggagacttttttggacaagtctccatagccccgaaatgaaaatcctgatgcttaacggtctgagtatccacttctccatc

SEQ ID NO: 101261 - DNA, 639 bp, Cannabis sativa
  modified_base (595)..(595): a, c, t, g, unknown or other
gctccgcgggacaagaaagaacaacaccgaaaggtttttttcttcacctctctatattgtaggccatacgtatatatttttttccaataataagaaattgaaaaataattaatgaaaattagaagttttttttcttaaatgcatttttttcattaaaaaaaaccattgtttaattttatatttttatatatgaatgtaagtgttaatctcgcttttagctaacaacagtgagtcaattaataagcaattaaaaatgcaataaaaacagagcaaaaaatcaatatgcgttaaagaacaccaagttttgtagaggttcggcccctttaattcagtaatagcctaatccccctagattgtattaacttgagaacaaagaacacagtgtttcctctgtcaaagctctcacaatgaaatctctgagtgttttctcttagatctctctcaaagcaattcttacgatcctctttacagtgaagctagatcactatttataggggctaaatgcatgagggaaggtttcccttttgcttacgatatctataattggtatgtacattgtaacgccctaatgttaaggcacgctacagtgcttttncaattatagtgcaatctttgctaatcaaaaaattttctcgaaaa

SEQ ID NO: 101262 - DNA, 1047 bp, Cannabis sativa
  modified_base (415)..(422): a, c, t, g, unknown or other
aatgtctatatatgggataggggtctctctctctctctcatatcattaaatggtttggttgattgtaccaatcatgtaaaatggaattatatgtaaataattttcgtatatgcaaagaagtcataaaagtgaatttgttttaacaaatcggaaagagtttcatttctttagggcagtgctgatataatattatatttatatttgagttttctttgattaaaatttttattgttggtaaatattaggttgatgttacttgcaatataagtataattagtttttttttttaagataaattgcggtataaatacttaatattttaagttgggtaaattgcgacataaatacttaatgtttcagattttatacacttaaatacttaatgtttatttttggagacaaaaatatctaatgnnnnnnnnctcttacaccgttactaccacttccgttaactcataaatatgaacatgtggaaggttcagatgcattacatttatttttattttattttaaaacttaatatacttaatatcagaaactaaatgctacttgtttaaaaaaaaacctgttctcataacaatttttacatgatattgacacttcaattcgataatcatgttctatatgctacactggttcactcagttatggtaatttagtattgcatctctcttattttatttcttttaaaaaaaacaagtaatatttagtttttgatattaagaatattaaattttaaaataaaataaataaatgtaatgcgtttgggccctccacgtgtccatatttatgaattaataacggaagtggtagtaacggtgtaagaaaattgtaacattaggtatttttaccaccaaaaataaacattaggtatttgagtgtataaaataaaaaacattaggtatttatgacgtaatttacccttttaagttctatacacttaaatacattatctttatttttagaggtaaaaatacttaatgttacaattctcttacacctattactactattttcattataattaactcataaatatggacacgt

SEQ ID NO: 101263 - DNA, 730 bp, Cannabis sativa
agtaaaaattgaaaagcaaaaaaacaaaacaaaataaaaacagacagaataaaaaataaccagttacataccaaatcgaacaattcttcgccatacttctataaaatcacaaaccaagacttgtcatcgatttgagctatgctgaaatcaaagggaggatcaatgtcgccagctgttttttattgttcctgaagttacaagaaaagaaatccaaaatgaaaaaaaaaaccagttaaaaactatatctcagcaactattaaaaaaaataacaagggcagaacaataaatcacatacttcttcttcaacaaccgagcaccttcgatccacttaacgtattccccgtaatctttgataccagtgttcatcccaatctctttaacaaaaggaaactagtccttatggtcaaagtctaattcactagatgactccttctccttcttattttgaacttttggttcagaagaaccaaactcgttgacaaaagaagatctacaatgcaatccaggttttgcttgtctcttgacagcaatcctgaattgcgaaggtagtacatctagtacctcaacctcatcatccacaacaggggatgcagaatcaggaattgataccaaatctcattgattattctttgcactaattggaccttggagagataactgaattttcgaattattatagtgcaacccgagagataatggaccttgcccttaactttcgaattattgagtc

SEQ ID NO: 101264 - DNA, 667 bp, Cannabis sativa
tatctaggcgcgagcaaagcatgacacaacaaatacagttgttgctggctgtgttactgggggtacaatatcggcaaaaggtaacatgtttctcttttctgatgaggttatagcaatttacagtaaaaacttacacattgtgtatttttttttccttcaatactttggttttcatctgccagagttagtaattgcttgatatgctttactgatactatttacagtagcaagtaattaggagttgtgtactttgaagttctttggcattgttccttatcttattttgggagaaaattggtgccgagctttcgatagaggagcttggtaaaagagatgtggaattttttttatttgcaaatcaacaatgtggtgaagttagctgtttagaggggctttggaaaattgctatcgatcctagaccagtatatttgtttttgtagagttctgtgttgtgattttgttattttgttgaatttcttgtagtattgttgccctattgatccttatcgtgtttttattattggttactctgttcagattgaggtttattgaagtttaggaggctccacctcttcttcatcgagttatggcccgttttggaagtgtaagagctccaacacacatacatatatgtttttgtataaatatatttttgagttcaaggctg

SEQ ID NO: 101265 - DNA, 1164 bp, Cannabis sativa
tttacaacccgccaacacgatatgtgattttgtgggtttgacaagacacgaacttattcgagttttgttcgtgtttgtgttttttaattttttttcgtgtcacatgttgtattcgtgtcatcaactttttagtaaatttaagacttcagcacaacacaaatacgacacaccaacactaattgccactccaactgtaaagcatgacgagcacaagaaaattcaatcccaatctaaatagcacatgtaattgtttacaatacatgattggctacagtatgtgttacttgattaacatccctacaaataaaattcaaatcaattacacaatcatttgtaatattaattcattttaatataaattaaaaaaacatttattaatttatttttgaatagttataagttgatgtatacatattaatttatattttattatgaattattgtacttattagatttttttttatgaaccagaaagtcgtattgttcaaaaattgattttataaagaaaacaaatctaagaaagacataaaatataatctttagaaaataatttttttataatattttagaaaataaatttttaaaagggttaatactcaacaagctaattaaaataaatattttttgaaagtaacatactaaaaaaatatctttaagaaaatataaaaaaaaaaaaattactgattaagtgtaataaaaagtaaaataaaataactattaaatttaattttttaaaaaaataaaaaaaagaagaagaagtataagacaatagtataaaaataaaaaatatgtaaaaatattactaggtaggtttcactattactatcatattttatcaactttattaccattagatcaacaattaagtgctagaaaaatatctcatagtcccatagaaatttactctatatatatgagcatatgaatgttaaagttatgacctggtaacacgccgacgaatagttaaagaaaagacattccaatcattcgaggtcagtaccgattaactcaatacaagtggcaaccctatatgttttagtatttattatttaataaccatgtgccctacaaaaatgcccttatggatatgatacttctctagaaagaaacattttataaatttgaagactattctttattaatattacttctgaagaaagaaaa

SEQ ID NO: 101266 - DNA, 501 bp, Cannabis sativa
ataatatagtttgtataatataattcattgcatttattatatatatatatagtgaaacttgtatactttttcaatattttcttataaatattttattgtgccaaaaataaaatttaaaccattttcttactcaagtgaaagaagcataacatctatattcgacattttaaactattcacaaattttgaaaaatttttgtaaagttcattgtaataaactttgtcctaaaaactaatggagactgaaatactttaaattatgtcaattccaaaatataatgtactataaatatatattttttaagatgaagatctatattaattaataattatagtacacattcaatccgtttaattaaattttgagtaatattttatatactgtaaatagagttaaataattaattgcacacatgtaaaaaagcaagcctgcaatgtttcaaccatattattggcatgataaattattttaaattttatttcaaatacaatgttcactata

SEQ ID NO: 101267 - DNA, 1065 bp, Cannabis sativa
aaaaaataaaaatatttttccaaattaaaaatttttaaataaattttaatttttttaactaaattacaaaataaaattaaaaactgagaccaaaaaactaaaagaagaaaaccccatcaccctgaatcccaaatccctaatcgcgattctatctggcgaggtacccagaaatcgaaaggaggtctgtgtaaatcgagagagagctgagcttgaaagattcattcgtggaaggtgaaaatggggagggttcttacagtagttccactcgtcgaaggtcgaaaggagtggttagttctggttatcaaagggatcctcaaaattgttactgtggcattccgtggatcgttagaacatcatggaccgaagcaaacccagggcgttgttttaggaaatgcaggctagcatatgtaagccattgttttttccctttcagttttgtttttgaatattattgtttatgttaagttattcaaggtgaaaagtttgaaatttatccacaggaggatggtagagggtgtaagttttttgaatgggtggatgttgattcttgtatgaagtgcagagagttaataccaggacttctgaggaagataagtaagcttgaagatcagttgatgttgtatgagtcaaatgaagatttgaaagaattcaaggacattccaaaaggatgtagcaatgttcaggagtgtgattgtggtcatatatggttgttgaagaacttgaaaaccattctcattactatttgtgttattggttttgtattttttatgcttaactagaagtgttaatcactaagtttgtaatggcattgtctttgttttgtatcaaacagtttgtaatgacattgccttctttgaatcaaattgtttgcaatggcattgtctttttttggtatgaaacagtttgtaatgacattgccttgtatgaatcaaacagtttgtaatgatattgccttttatgaatcaaagttatttccttctcagatttgtccttattttatcaggaaaatgtctgcatcataggaggagtaataggccattgcatatcagcattaataggccttct

SEQ ID NO: 101268 - DNA, 829 bp, Cannabis sativa
  modified_base (460)..(469): a, c, t, g, unknown or other
aagttggccagcctccatcttacacgtgcgtggcaagctagaattggacctggcaagactttgctgcacaaccttacatgtggactgcaagctagactacaaattgggccttaacaacccatgaaagtagatagaaaatacctatttttaaggggtattttagtcttttgtattttacaaatttaatatgtaaatatctcttattttatctcttaattagggtttaatctctcctatagaagagccttaacttaaccctaaaaccctaagtcatagctaagtctcatttataactcacttcatctctctctctctctctctctcacacccactgtagcttctctcaacacttgagattttccatctttgattcctactttgtagctttaagagagctatattagatctcacctatattgatttgaatagtgttatctcttggtatcaatacaactaaaannnnnnnnnntcattacccgctaactaagggggttgaacctttataaaaatccttgtgctcttctactttatagttctaattgtgtaacacgtggcaagcatcagtttaatacgactctactgttagttggccaatttctgaggtcaacaacttgcatttcacaagttcaactttgtccgtccatctactaggtttaggcaaaccctttatttgtgttggtaattgcataacttgctaaataaaaagataaaatggacacagttagaatgataattaatatctttatttatttatttattggtctagatgtgttgttaacggagtaacataaatttattgaattaaaaaagctattacatgatctaacta

SEQ ID NO: 101269 - DNA, 524 bp, Cannabis sativa
tcttacattcacaatcttttcaagagctgtctttgtttcttgtgttgtttcttgaattagtttctcaatctcctcagctgtgtcaactccatttttgaagaacttaggtataagatctttatattgggagtaaacaatcttctttgaattctcgttctgcttcacaatggcatcataagcaatgtttccatgggcgtcaaccgaaactgtcagaatgttggagccaccaggcttccctactttatccctacccatgccaagagggtactgagctatgtgaatctccggaaaagcacccccttcaccaaaatcctcgactttacgagagacaaagcctggacgatttaagtaaggaagaactgaattgggtttgattacagctaatttagatttttcaggttcagatgagatgaatagctgcttcaaccatggatcattagagtgatcataatgggtagtagtggttgctttcgtcggaggaggtaaatccatcagactcgccatcctaataaccaatcagggta

SEQ ID NO: 101270 - DNA, 641 bp, Cannabis sativa
aaacctgaaaccaaagaaaacaagcgtaattctattccaaatataataatctattccaaatataaaataataaagaaggaaaacaactataaaaagtgacccaaaacgtagactaagaatagcctaacattgtccaagatcacaaaaacacaagatggtccaataaaatcgaccattccaattggggtcctagttacacaatatacactataaatgacactgcgtgagtaataatgtttaatgatgtcacagtccgtataaaagaatctaacactaattgcatttgtaaccaaatgatttctgaaacactcaaggccaaaaaacggtatcatcaagctctgtacttaatctgtctacatcacgttgttctcttaaagaccagccaactaagtttgttccaagaaaatatgtaatagcctactacttgtctgagattgaacgacgattatcaacagagttggcctaatcgacatctgtaatttgttggacttctgtaaattttgagttggtgtaaagctgagaccaggggcggacccacatttgcccccccgaaaaaaaaatcgagaaaaaaatgtatatacattttaattagttacaacatatatttgtattaaaagatgatatttatagacataatagta

SEQ ID NO: 101271 - DNA, 721 bp, Cannabis sativa
gcatcccactccacaagggccaaatagcgatctttgtcacctcctcctgtccaccagaatttgcgaatcgcttgatcaagctctctacagagacccttagggaggaggaaagaggacattgagtacatagggacactttgggccactgatctgataagggtagctcttcccgcttgggacaaaagtttacatcgccacccttcaatcttagcaaggatcttatcctttaaaaacttgaaatctctcattttacttttagtccactgaatgaatcgggttacccaggaacttatcctccgagcccagcttacgaaacccaagcctctctacaatctcaagctgcgtgtcccgggccgtattatccgagaagacataggctgatttctgcacattcagccgttgccccgaccacgccccgtactcattgatacaatcaagaatggtgttcacttcctcgacattcgccttacaaaacacaaaggtgtcgtcagcatacataaggtgggatatcgaggggctgccgcggctcaccttaaaaccactgattagaccctcagcttcctttgccaagagcatccgagagagaacctcactgcagaggatgaacaagtatggcgataggggatctccctggcggaggccacgagacggcttaaattgcttcaaaggacccccattcaacaagatagaccacgagaccgaactcacacagtacataatc

SEQ ID NO: 101272 - DNA, 679 bp, Cannabis sativa
atattattttaagaaaaaaaacttatctttgaagcatgatgtcaccattgaaactaatatattatgttcaattattaaaattaagtcttccaaaataaaaataaattagccactataaccttgcaaaaaattaaacaaacttaataaattaaatcccatttaaaattaactatttttaaaagagataacaaaactcaattagctaacaaataaataataagaaaataatgatataaaataatagaaagaaatcttcaaaattattaaaatataattaaaagcaagatttaaaacttatctgtgattctttgaggttgcctccatgcgcaacaacatacaaatccaataatatggtacaaaatagccaaacaaaatggctcaaactagccaaaaaaaaaattgacacaaactaaccaaataaaaataaaaatatatatagaaaataagtaatcaaaacatttgactatatcaaataaaactactaaattaatacatattaatataaataaactgtcgaaaaaggtaaaagtactacaatttgatgataattataataatactaacatataaataaaatataaaaggaaatacaaacaacttgcactaaaaacatgagaaagaattagaccctattaataacaataaatataaagctgtaacattaggagacacataattg

SEQ ID NO: 101273 - DNA, 860 bp, Cannabis sativa
  modified_base (633)..(634): a, c, t, g, unknown or other
  modified_base (809)..(818): a, c, t, g, unknown or other
gagagagagagagagatatgagatgagttattagacttttaaggcttaggtttttgaacttagcacttaatgacttaggttttagggtttagttaaggctctttatataggacagcttaaaccctttgactagataaaataagtagatatttacatattaaattagtaaaatacaaatgactaaaatgtcccttaaaaatagatattttccctctatttttgtggactattaaggcccaattcgcagtttagcttgatgaccacgtatgaagttgtgcaccaaagtcctgccaacttaatgtctagccggccatgcatctgcaggatgcatgctggccagccttgtgctgtctaaaagctggccggcatatgctggccatagggccggtcaagggtgatcggtcagcctccttgaggtggttggttcgtcatttgtcgctgagtatcgggactccttgttggttgaagtgttgagtagatgaattggccttcttgttggtgagctgtaaagccacgtggcgctaatattgtccacgtaaacatgtcacgttaaataagcaaaaattaggatatataacatatatatatatataacaacaacaaataaaaataaaaataaaaatatatagcatnntaataaaattatatgtcatatcaacaaaagtacattagaaaatagaacttaaatattattttaaaaaaaaattatataccgtaaaacaaaaaatacatatatcattcaccagaatatatagtaacaataataataattaaaaaatatatcactaatatatatatactatactaannnnnnnnnntaccacaattaaaatatatatatcatgacaacaaaattatat

SEQ ID NO: 101274 - DNA, 525 bp, Cannabis sativa
cttccagttgatttcttcatcattaaggctcttggcttggtggtacatattctaaaaaatcaataaactggaggttccctccccggaggagatcctttatttttatagtgtcaaggccaaccctatatggacagataggtcaaagctggggttcttctaactggataaatgcttggactcttacttccttgtttttaaaatggatcgcactcatgacccccaagaataatggttcttttcctcacggtttcctactagcagggtgccatctcttcaattaagcttccaactcccaggtattctaatgatttatcttaagttttgcttgcttttaaactttgccaatttctatacttggactaacactttttgatttatagtagagcttccctcacaaagggttaggacggaggagatcatcaagaaagaagttcgatatagggccttctcggaagataaattgaaggttggggacctggtgacaactaaactcctccgaaggtcaggcttgattacaaaatttta

SEQ ID NO: 101275 - DNA, 710 bp, Cannabis sativa
tttgaaagttactaactgttatcggttattgatcttgaatacgtgttattgaaaaagtttgaaagttaataattgttattggttattgatattgaatatgtataattgaaacttaaaaatattaattattattggttatggatcttaaacatgtgttctttataaacttagcaaccgatgttattgattattattaattattgattttgactatgtatcatcaacaaaggtagtacatcatttactggttattgatctcgaatatgtgttactgataaaaatatacatatatgaaattgttagtttatttttaagttgtgtccaaaacgatatttagataaaatgggggtttagatatgatgtataaatcatgaattctcatattctagtattttgcactgttcttagattttgtgattaattatgcaaaaatatattttagaaagggtgaaagtttaaattttataaaataatagagttttattgtagatattataattaaatggcttaattgttaaaaaaaaattataatagaaacttaaatacaaaataaaatgattaatattaattgttaaagagagtcttattaaatattcaaattaaaaattaattatttaaaaaatagttaattatatagttaatttaattttaaaaaatgaatttttacgtgttgataacttgctattacaaatcaacaaaaatgtaaccat

SEQ ID NO: 101276 - DNA, 825 bp, Cannabis sativa
caatgcaaaaaatataatctaaaagatgacatcaagtataaaatcagtttccaacatataaatttatatgaatacctaataccaaatttctaacttcatactctattttgacatttaatctcttatttgcttaataaaaaatgatagttgatttgagcatttaatatggggtaaatatttttgggagaatcacaaactaaaacaaatttcatataaaaaaaataataatgcaaaaaaattataatctagaaataatacgaactttaaaaaaaatagtttcatcaacattaaaagaaacaaaaaaaaaaaacaatttaatcatcaacaagatgatgaaatgaaaaaaaaaaatataatctaaaaatgatactaactataaaaataagcttcatcaacattaaaagaaactaattatttaattaaaagagacaaaaaaaaatcagtttcatcaacaacataatgaaaaatacacaatgtttaataaccaaactttaaaacgatactaactttaaaattcaatttcgaacatataaattttatatcaatgcctaataacgaaacttctaacttcattctttaatttggttaatttcattctcgaacttacaatatgtagcaaaaataataaagagaatcagaaactggaactagagaaaaaaataaataaataaaattaaagaaacaaaaacacaatattgaacctaataggcggaggagtagtataagagggacccgtagcaaagagacccgcagtatgcgtggttgacccaggtatattgaaccttataggcggatgtaggagcattgaaatttcccaaggaattg

SEQ ID NO: 101277 - DNA, 759 bp, Cannabis sativa
ctagtccttgttctgatattgatttcgtgtccgggtttgggttcgggtcatggtctgggtcagggtctgagtcctggtccgagtctaggattgggtctgggtccatgtttggatcccaatctggttctaggggtttttggggtccagttcgaagtcttgggtacgggtccaggttttggtcttggtctcggtccggatccaggtcccaagtttcgatccatttctgggtatgtgtctgggattgggttcgagtccaggttcgtatccatatccatgtctaggtccgagtctaggttgggaatcgggtcctaggttcaggtcccactcgatctcggacccagaacgagaatcggaccaggactgggactagaacccaagcgtggactgtaacaggactcaaagctaaactaaaactcaaaccaaaatccatacgaggacttggacccagaccgagacctgtgacctaggacctaaaccaagacccggacctggacccagaccgggatccaaacccatacccagacccaaaaaataaggcccaacccaggacccataaaccagactcggacttgggacccaaaacccgaacccaaactgggaatgggacccgaactcaaactcgaacccaaatcgagacctggactcggaccggacctgaacccgaaccggaacacgaactttgacccagactgggacctaggacccgaacatagataggggacccagacctaggtcatgggaccccgaactaggatcaga

SEQ ID NO: 101278 - DNA, 687 bp, Cannabis sativa
cagatccatgtggcgccatacagcttttgcatatttgcatccaaatagagcatgcccaattgattcccacgttgatttgcatactaaacatgttgagtccgtgatgatcttgcgccttaccaaagatgttacaactggtagagcattgtggataacccgccaagcaaagatcttgactttttgggggagttgcaaggaccaaaagtacttccaccaagaagcttgtgagacagaactgagcaattattagcactagcatcagctatagaggttgcaagatggtaccctgattgtaccgtgtaggcgcctgatgtggtatagtgccaaacaagagcatcagaatgctggagaaaactaagtgtcatagtcaagattcgatccacatctaaaggagagaaccattgttctagaagagggacattccaaacacgttcatctgtgattaaatggctgaccattgcattagcatgacttgaaaaaagagtgggagtgaaagtatcacggctgggtatccaaggatcaagtgcaactcgaatcagtcttccttcaccgattttccaatgcaagcctttaaggagtaactcacgtccccatacgattccttgccaagttaaagaggggctatgaccatgaggagcatgtagaaaatcattgtgagggaagtaacgacttttgagtaattttcca

SEQ ID NO: 101279 - DNA, 677 bp, Cannabis sativa
taattgaaaaagcactgtagcgtaccttagcattagggcgttacaagatatatttgaattctatatgtgttatttatgttatttatgagatttcatgtttttcatattcaatgcccggtaacagtggaacgccgtacatttttgtatggtttagtattttagtaatagtggggcaacttagatagacattgggaatgtcgagaatattggtggtcttaaattggaccaaaatgccctttgatggtaaggatgcttttttgcttaggcaagggtaatttagtcttttaccatatgttttcttttgaaggtatgaccactgtcccacacgcactacatacgttactgtacgagtgttggtagggtttgccacgtaccttgagtacccctaagtgttataccacatacactctgtacctgttcgtaatagagttggtaacatcgtactgtactctttaaacatcgtacactgcaccaatgcactcagtgccactacgatactagtgtttgtagtgtacgaatcatagcatgcatttatcacatatacacatattcatataaaatatgctctattctagtgttacctcgtttctgaatttaagtgtgctggccgacctgaacgaaaaatcacgtgcttgatggatgccctatgtcacaatgacgtaaatgggtaaataaca

SEQ ID NO: 101280 - DNA, 511 bp, Cannabis sativa
tgtttatgtttttttgttgtaaacctgtcatgtttgctgtggtaccttgatcatttgtggtatccaacttgttgtaagtagggtttaacacgcttgtacaagctttcaagctcgctcacatggtatccaaatttcctctttatgtatgcttttgctgctggaaagaatttttatcgagtttgcttgtatttttcttgaaggttgcttaataggtggtatacacagtagtcgtgagttatttgtagaaatacatgagcagctgccttaattatgctctcatgtctgagatcaatcactgttcttctctgaccccatatgcttcccttaattttataaaaaactattgtcatgagttgttattttttgaatccacaacagaaaaagctaagtgaaaaatgtgtccatttgcatcttgtgtacaagtagccttatttatgatttaattaatgagatttaactactataaatagaattttgatttgagaaatctgaactataatttttgaaatta

SEQ ID NO: 101281 - DNA, 576 bp, Cannabis sativa
atcacggactactgactgtcacaatctgttcttctattataaccttaatgattagatttcacccttaaccaaaattcaacttaattatttctaataaaagagtacaacttaaaattatctatccattaacacttaaataagagaaaaaaaaaatcaaacctaagaacgtaccaatagttctatatgcttagtttattaaacctgaaacatacactctcgttagaagtgctaatataacgattaaacttgtttttttttttttgccataacatactctatttcagtcacaattcctttttgagaacactcctcttaaactcttgatttatgaaaataagtacaacctatcaaaatcaaacttaatttatttaatatggctacaccttgaatcatttgcttaaattttcaagaaaatatcccattgatcgaatcctatcaacaaaattctaagacatattcttctaaacacaaagaaaatttctagtcacactaaattcgtacacataagatgtaatgcaacataaaacatataaaactaccatgaacatattgactaaaacttacagtacagtgagt

SEQ ID NO: 101282 - DNA, 671 bp, Cannabis sativa
gatattacaattatcccctacttaatttcgtcctcgaaatttacttttacattttcagttcatacaactgttcccctcttatatgaattctgtcatcgaatttatccaattcaatgcaatcaatagactagctgtttctaagtttcatagcttaataattaatgtagccctacacataacgatctaatatatcatcaacaaatcgatgtcattcatacagaccatatatcttctataaattacatgaactgcatataagctaaaaaggtctccttacacatgctaactagccattatatagtcttagaagcacacaagttaatgtactcatgaatatgagctacatgcgtattactataaaagaaacatttactaattcatccaactaatgaaataggaataaaatttactatcaaaatcactctctctaagaataacataaggacaaaaatcgcttaatttgattctcatatatatatatatatatattttactcgcttaatctttttcttctattataaacttaatgattagattaccctgaacccaaaatctaacttagttatttctaatattaacacttaaaaaaactatctcattgatataaacctatcgatgaaatactaagacctattcttctaaacacaaagaaaatttttaatcacactaaa

SEQ ID NO: 101283 - DNA, 836 bp, Cannabis sativa
aaagaggaagtagatcgccttttgtcatgtggtttcataatggagtcattctacccaaactggttagcaaatccagtactagtgcccaagcttaaaggctcatggcgcacatgcgttgatttcactgatttaaataaagcatgtccaaaggatagttttcctctacctagcattgaccaacttgttgatgccactgcaggtcatgaacttctcagtttcatgggcgcatactcaggataaaacaaaattttgatgtatgaacctgaccaagaacatacctcttttattacagatcaaggattatattgttaaaaggtaatgccttttggtttcataaatgcaggagaaacatatcagaggtcggtaaacatgatgttcgcagatctaattggagagactatggaagtatatgttgacgatatgctcgtaaaatctcaacatgcaagagaccatgttgccaacctacaagcaatgttcgagatactgcgacgatataaaatgcgactcgaccctctcaaatgtgtctttggagctgggtcaggaaatttttttgctttatgatgaaccagcgaggaatcaaggctaaccctatgaaaattaaagctttggtggaaatgcgatctccgaccaaaccataagaggtccaaagcctcacaggtaaactcgctgctttgaatcgctttatattgcgtttttctaataagtgcaaagagttttttcatattttaataggaaataggaagtttcaatggactgagaagtgttaagaagcctttcaagcactcaaattgcatttggggcagcccccaattctttccaagccaatgcctggagaa

SEQ ID NO: 101284 - DNA, 822 bp, Cannabis sativa
  modified_base (786)..(795): a, c, t, g, unknown or other
attttattttttaaataatataatatgtataaagttttaattttatacaaccagttttatagtaagattatataccttacatcataataaccacaacatctaaaaaaaaaaaaaaattccctattccgtattaccctattccgtatatatatttatcactttatacgtaagacaaaagtcataatagaaatcttgtacccaacaaacagagaatatttagaaactttaaggaatttgtgcttagttattacttttgtagaaacgagagaaaaatgaaaggagaaagaattgcagcatagatggaggtagaagaatcctcaataaaagcatttaatcaatcgtataagatcatctaaacgattgaaaagtaatttatattttaagatttaatatattgtgattgaaaagattaatttatatttaagggtttaatttattttattctttttttcaaaatgttaaccgagagctaattacctcagtttattttgacagaataaaaatataaaataccattaaattaaaaattggtgttgtatataatcacttttaatatataaaaaaaattaggcaatattaatttattggataattgccaactgtattgataaatatgacattagaaattcccatttaattttttttaaagaaaaacataaataaacgggttagacctcacggtaaattttcatgtaattactacttacatctcaatacattttgtactttaaaatataaaatataatacaattagggctcgtttggaatgtcgtattaggtcgtatnnnnnnnnnntatattgaattggattatatatcatat

SEQ ID NO: 101285 - DNA, 539 bp, Cannabis sativa
tggggaattcaactattttcctccagaaagggtaatatgcgaggagtgcagtgggcgtagcacgagcaattcctcgggcattggagcctagagcctcgagcatatcaagattgggatggttcttccccttagggattactttaaggagtactgtaactaccttggggtttccccattccagccgaaccccatctcgtataggatccttgcgagcttgaaggtcctataccatattttaggatgggagtgccctactcctttggagatggcctatttttactcagtcaaagtagtccctacgaggaagaatgttgtaggaggcttttactatcttgggagttatattggtgatcgcaagatcatagttaggttgccaaacaagacagagtttaaagaagacttcttttggacgacgagcctctctccaataaatacaaccgcctttcacatcatacgtaagttctttttcttagaaacttaactttgaaatgtcgcttaccaaacttttttctatttgcaaaggttcctccgagaccaat

SEQ ID NO: 101286 - DNA, 1042 bp, Cannabis sativa
ttaggaaaatattttcttaattacgaagatatatctgaatactaggtgcattaattatgatatatgtgaatttttataaacttcatgttttatgctcagtaacagtagaatgcgatgtttggcctacatagtcacttagaaaaattttagtattatagtaatagcgggacaacttagatagatatttggaatgtcgggagtgctcgtggttatggttttggaccgtaatactcttaggtttcaagttacctttagtgtaaaaagggtattgaagtcatttcatggtagcttttaatggtgttattggttgattgtttaataggaatacttagttttgtctttagtgattaagttatatgctgaaaatagatttttacgaatttagaaaatataagaaaatcaagaaattagaattcctttctctctctcttctcttgagtcgcttgcatagaacaccaaagaaactagccaactttttcctcaattctgacctaatctttgatgttttgagctgctgaaactcaagtatgagttgaggtaagtttccctctcctttgttcctttggttttagttttaaagttaggtttccatgtatgattttgagctagatgttgttgtgcgaacattctaggtttatttgaggttttatatgttggattatgtaattgttaagcttatttggttgctagtttttgtgtgaaacaaagtttgagcttaagagctcaaactttgctcttccatggcaaatcttgattctaagtataatttttgtgtttaagctatgtaataggttccttatgtggtatgttggtattctggaaagtttggtagcatttggatttgattggaccaagttatgggggttgggagattggaaatttttcgtgtttttctgcccaaacaactttggtttagggttgtatcaaatttcagttggacaatatcgagaaagattaatttttcgtattttggccataactttttactcgggtgtctgttttagacgttccatatacagtttcaaagcttatgacgagctct

SEQ ID NO: 101287 - DNA, 509 bp, Cannabis sativa
attcaaggtggtttgacttcgtcgccggttgccattggcggttgcgtaaatgaaaagtggctgaagtggtagtcctcttttcatgcgtgatggcgacttggtgagaaattagtaactgctttgattattattattattattattattattttattattattattactaaactaaaatatcttgataaatttattttatataattctactatacaattattttttttattttcgtaaagtttcttaaattaaatatttttttaaaaataaattaatatttatatttttgttatgactactttttaaatttttttatttcaagagtataagaagtattattgtattaattatttactcattttgatttatgttaatttagaactcttattgatttcatgaattatattttgaatggttttatttttcttatagtatctcttcttaacaatttgtattttttcaaaagtatctttttcaccacttttgtttttcctacttaaaagagagtga

SEQ ID NO: 101288 - DNA, 554 bp, Cannabis sativa
ctcaaaattcttttacatgctccctagtgttcggttgtgggagccttgaggaattgactcaatttgttcacagcaaaggcaatgtccggtcttgtcattgtgagatattggagagccccaattacactctatattgtttggcatctgcaagaagctgtccagaagtgagagacaacttggtattagcacacataggtgtagattgtggttttgcgtctgtcatatttttcttgttgagtaaatcccttatgtatttttgttgagtaagatgatatgtagtgccatttctgaaagcctcaaaccccaggaaataattgaccgatcctagcttctttagaccgaactgtttgtgtagattgtctatgatactttgaacttgcttgagttcatgaccagcaattaatatatcatctacatataccagtagcatgatgagtttcccattgttgttgctgtagaacaagctattatcggctttggagtgctaaaaaccttgctgaagcaagaattgtttgagttgttcaaaccaggttcttggagcctgttttaatcca

SEQ ID NO: 101289 - DNA, 626 bp, Cannabis sativa
  modified_base (220)..(220): a, c, t, g, unknown or other
ctaaaatagtgaaaaggtcattccattgatatgacattccaatctttaatatgcaatgaatagaatgaagattatttcctttccattccattttattacctccaaccaaacgtcaccgccacctaagtgacatttggttgggaggaataaaaaaaaagaatatgaataagaatggaatggaaaaaaatttaacatgcataaaaaaaaaaaaaattgatanaaaaatcattaaatttttttctcattatattggaatggtttttctatccattacaaaatgaaatagtcattccaccaaagtgatgaaaaaaggcattccattagaatgatattccaatactttaaaatgcaattaaataaaaaaatggaataaaagctgtttcatttccattctatttaattacctccaaccaaacgctacctaaatgaagactaacttagaagttcatataattttttacctaatgataataataattatctttcggctgttataaaataatatagaatagaaaaaaaaaataggagaagagagaagacaaagggaagaagaaaatgagtgtgaatgaaatttttctctgactagaataatgcgaaactagattaatgaaataaaaggaaatata

SEQ ID NO: 101290 - DNA, 700 bp, Cannabis sativa
cacttctcagatctcgcatctaaaacatagacagttaattggtgatcagacaattaaaagtaattaagcacgaatgaaatagaatacatagaaattgggagaaaaatatatcatattaataacatatattgcttcccccaaaactattgaagtccaaaattattgaagtccactccttttatagccaaaaaatgataaaataagataaaaatcgctgaagaaaaaaaaacctattctccttaggattagaaaacctattctgcttaggattagaagaggatgtgagttttctgtagcgccaactgatagtatttttgccataactctctcgatattgctcggaattgaaagatttgttctaaaaagataaaagagagatctagaactttcatgttttgactttttccaaaatctaatcaaaacatatttgaattcaggcttgaagttttagctttattttcttgtacaattttctctactttaaatatcatctttttgtgagatatttttatccttttttccatctctttcctctgatatttttctaatcttcttttattttaaatctccaaaaataaaagatatcaagcgtaaaaatgcttcaaacgggattaaaactcaattaaaaatatactaaacttaatataaaattaatactaaaaataacctaataattgggcctaaataaaattacttatgt

SEQ ID NO: 101291 - DNA, 901 bp, Cannabis sativa
cgctcttccgatcttacaaatataataatataaatattaattaaattataaaaaaaaattaaaaaaaaaggatgtcgtgactacactagataaacctacaaaatgctgcatgatatgcagcttccttggaacatatatatacaccctaccactaatttgcagtctccttgaagttgttcttacaacttgatattagagatctatacgatttttgaggctctacacctctgtatgccgcacaatatacgtcacttttgttcaagttttattagatttagtaattttgattttgtgtatatagcataatttacaataaaaaaaagatcacctttagtgacgacaatttagttataatataatttttttgtgttacttgtgaccactataaaaaaaacggctacttttagtgataattttttagtcacaataagtactgttgtgactaaaaatacatttagtcacaaaaatttttgtgactaatacttctagtcacgaaccttttaatcacagcgtcaaaataataatttataattagtcacttttttatttttatcacaacaatttaataacttataataagaatcaatttactaatttaattaagcgtttacttagtcaacaagaatgacaatggaggaataaaaagagagattgaagaaaaggggggattagaatgattaggaccttttcaattttaggaaaatggaacacaatttttgatttaattaaacaatttagtgccttatattagaatccaaaagtaaaaaacactacaaagagagacacaagttgtcccttataaatagtcacatgaaaagagaatatgaatagaaaattattacataagtgaataatttaacacaattaatactaatttcaaatatagaatgaagtaaataat

SEQ ID NO: 101292 - DNA, 625 bp, Cannabis sativa
gagtttcaggtgccaaatgacatagaggacatgagttgttctccatcgcaaagattctgtctcccgtgagcagagatccagaaatagctctccaaatcataaggctcaagcgcggatgcatcttcgaataccaaatctacttccaaagtttgctagaatccccaaatctagatttctgatctagccaataagcccctttaacactgaaacgtcccacatctgaatctttccaaatgagaatgtcactatccccatttctatcaatctgaatggtgctgattctgttgcccaattctgggccaaaaaggaaacacaagtaacccagattccatttcctcgttcttctaaacatgagatctgccacacatcgtatactgggcgcttttggtctaacactctccatcaagtctcggaactcctcgtaatccaaccaaggaatccaaggttgccaccacacatccacttcctcccccgaagcaataattgtgcatgccccctcgcaaatagtcttccgagcactcaaaataccccgccaaataaaactgtcagaattcctctcattgacactccaaaaagattgtcccggaaaatacttgcttttgaaagccttgcaccaaggcctgtc

SEQ ID NO: 101293 - DNA, 634 bp, Cannabis sativa
  modified_base (572)..(576): a, c, t, g, unknown or other
atattttaaattcatcatattaaactctaaaaagaagatgatgaaccatttgaatataattttattattttttgaatgaatttgtagtgagaagaaatgcccaaaatatttaaatgtatgcaccaatttcatatagacaataatatcaaatatatcttttaagctaatattttataaaatcaacttgataatttaatttttttaacatcttttaaattttaacaattgactgacaaaatataagtacattgcacttacttaattatactacattttattttccatagtcgagattctatgttttttttacatataaaaaaatttagttacactaaacatatcaaatacaaaaaatttatcacagggttaagactttttagtaagtattaaatgtaatataaattctacaaattacttatatatgggtaatatgcattataaaaaaatttacgtttaatcacattaataaaacttatgactaaaatttaaataattgtgagtaattataaattatcattcttatgttgtcacttaaagatctgtggcgaaaagtattagtcacaaaaattacnnnnngttgttaaatgtatttttagtcacgatacttgtggttactaaaactaaattagtgaca

SEQ ID NO: 101294 - DNA, 632 bp, Cannabis sativa
tttagcaataggacatttaaaaaacagatgataggccgaatcctcctccacaccacagagaacacatctagcttcattaccaaaaatcctttggagtcgacttccgaaggggattatatctctgcaaagtttccataggaacattctcagacgctccgtgatctgaagtttccaaatccgagaccaaagctgatcagactccccccaacgacccttgattatagacttatatgccgctctcagagagaataccccatttatagcgtctttccacactaggagatcatcttgggttgtaggaagccgccctattaagttcagagaactggccacactagggacgaaccatctatggaccaatcgagatatccactccccatcctcatcaagcaatgtagagaccttaatagaattctgaacacataatggattgaaggcagctctagacatgttccagtctagccaaggtatccaaggagagtgccacaaatcaaccttgcttccatccgctataagccagcaagattcattcctgatcagatctctcgtggccatgatacctctagcaccaaaggatgcattcctaggcatcttcaagttccaaaaagattgacccctatttccccaatact

SEQ ID NO: 101295 - DNA, 864 bp, Cannabis sativa
aaaataggttaaaatcccaacactagaaactgacacatataattgtcccaaacggaagtcaaaagagacactgcaagaaatatcacttttgccatcacatttttgtgctaacaaaagtttggtattgcgctggtaaaatggaatttacttctgatatgttggcaaaggggattggtaaatcaacgttggtattagaaacttttggcagcacaaaataaaaagcgctagcaaaaataattttttccagcgcataaaagttagattttagccactacaaatgtgcgttggtaaaattttgatctttttgctagcacagtttgcgaactgtgctgtaaaagttacttttaccaacgtaatagcgaactgtgctagtaaaagtgacatttcttatagtgagacaatggaagttttctaattgctttgatatcatgttagaatttggaagtgtttgcttaaggcgcatgaggttccatcttaaaattaattgacaataagaggtgttatcttattttttgcagcttgacgtggccatgagaatggatgacacgtatcccacatctttgccacatggacggagaaaaatattcttagcagctcattaacagttaatttaaatatttgtcacactcgaatgtccgaacaagataattaaaagatgtccaaccaagatgcaaatttatctgtaccaagcagggtatataagttggcaattccagagattagtctcgtcgcttctaatacacaaagaccatccctataatcgtgggatttagtccgagaaaaacggcaatatgccttattttcctattctttacattataattatggaattgatgtagattcctatctcatttattatagatt

SEQ ID NO: 101296 - DNA, 1084 bp, Cannabis sativa
gtacctatctagttccacttcaggtcccaggtctcggtccgagtcctaggtcagggtccgggtctcgggtcgggtcgtgggtctcagtcctagttctcatgcccgtgtcccgagtctaagtcccccatccaagtccgagtcctaggtctcgatctgagtctaggacctagtcggggttcaagtcttggtccgagttcaggttcgggatttgatcttggtctaggtctgggtttgagtctaggtccaggttcgggtccgagtctccagttttgagttcagatctgggtctgggttcggaggcccatgtctaagtctcccatccaggttcgggtcctaggtcccgattcgggtccatgttcaggtttgggtcctagtcccaattttgatttagattcagtgcctgtattcgggttatggttcgggtcttagttttggtcgaagtcctggtctgagtctgggtcaaggtttgggtctaggttcgaatcctggtctgggtttgcgtttgggtctaggtttgagtttggatcccaggtgtgggtccaagtctgggtctaggtcagggtctcggtccagatctatgtcccgagttttgatcctgatgtgggtccgagtctgtgttcgagtccaggtttatatctggatccctatctaggtccgcatctaggtcttagatcgggtcctaggtgtaggtctgggtctaggtttgggtcaaggtcttggtcccggtctgtgtttatgactgtgcacaggccagagttccggtctcgatttgggtctggggctaggtccgagtttggttcaaggtctaggtttgggtcctaatcacggtcctagtcttgttcgagtatcctcatttggaagttcttgttcaggttccaatttaaagtcccgggtctgggttagggtccgagttttggtcctagtctgggttcgggtcctggtttgagtcccagatctagatccctatcacgtgtctcggtcaaattctggttcttgggtcccatgtctaagtttgggttcgggaccgtgactagggtgcacttccaggtctcgaccccaattctgtgtcccgagtctggttcca

SEQ ID NO: 101297 - DNA, 564 bp, Cannabis sativa
ataataggtttgtaaaaaaaattgaataaataattaaataaatgaacaaacatgaaacaaataacaggaaagtaggttaagatatttcttttttaaaataaaatatctgaaattgtcttagctagaatttaaaattttaggttgttaggaaatatttagaaaatatttaaaatctaacaaatctcctaaatatcctccattataactaaaattcaaaaatctaactaattttcaaaattctcaatttatttaaaaaaaattaaaattaattaaacatctaataagattatataatataatatcttaatttaaatatatttagatatttctaatcttataatttaataaattaaatataacatgaataaaaaactttgaaatttaagatatttagatggttaggatattatcaatgttatctaatgattaaataaaacaaaatatctaaagtttgaaaattttatggttagaaaccctaaaatttctattcaaactaaaattaacaaaaattttcaaaatttcatgttattctgctagattatttctaaattttattaatatttt

SEQ ID NO: 101298 - DNA, 653 bp, Cannabis sativa
  modified_base (623)..(627): a, c, t, g, unknown or other
tgcacgggttgaatggaaatctggagagagtcttcgaattacacatcttacctatgctcatgcatctctcatgaggtttgcacttagcaattggcttcccaatacaaacaaaaccgtggtgtctcaagatggggcctcattcctctttcgtatcaccttgggagcttccatcaacttggcctcatatattttgaataagattgtgtcatttcggagaggtaaaaagcgaacttttaagcttgtgtttcaaaatttaatctataaaattttgtcatctcagaaagatgtgacccaatctcatgaaactcttaagcctcccctgactggaaccatattccaaccctcgaagtatttttatggagctttaccaaaaaggcctaaagctggcgttgcttccatggaggaggttcaacaagagatgtccaagtagctgtcctcattgatcaagctttatggggcataagtttttctttctttttttttaatgtttctgttggtcatatttttatattttcatttctttttgtctttggcccttagataaacaaaaagggggagtagaagtttgtttttagctgtgtttgtctcaactttggacccttttgttaggttttatgccctannnnnaactccatttcaatgtaatctatttt

SEQ ID NO: 101299 - DNA, 655 bp, Cannabis sativa
agatcatcatcatctgatcacggcttgggttttcgagacaaggaaaagaagtacaacaaaagagagctagagaaggagaaggaaaaaaaatgagtttcagagagaaagaaaaaatttattgtgttaatgtaaattgtttttcacaccccatgatcatatcatcatatcattatggtgatcatataatattggttttgtgatgattatccaatcaaaccagagttggcctgagctgagagatctgagaagacttttaaatttatgagatcaatagtgcatgtataaattaaattaaaaaaggaagatcagataggcaagaaagaaagaaacaaattagaactgatcgtatgtgtcatgtttttatttttttcaagtttttggttgtgtttcaaaatatatattgtgaatttgtaatcatatatattataccaaactataagcttttgcaatttagttttgtgtgtgtgattgaacttggccaagaaatttgatgttctaatcatgtgaatatttatatatgttcttttatttcattattattattattgagttaataagttttttatttttttaaaattataggactgtgtgatgagttatatcttaagtaagcttataatttcgtcattaatgaattagagatacatagtgcctt

SEQ ID NO: 101300 - DNA, 1300 bp, Cannabis sativa
gtggggtccgaattatttaaaccgcggtttctcggtttatatgaacagccctaatgtttactgaagtgtgaatatcttaaatattcattcatatagtgaagtaggttctgcaatatatttactaaatatacacacatgtatatattaaagaaaaagccataacacaaataattagttaattactagctagttgtaagaaattagttagttaattacaacttatataactagtaactatttacaattagttactagttatcatgccaatatttaaaatgagtaatttaataacaagaactaaactaaaatcagtattatagtaatatataaatataaaataattgtgggaattctagttagtttcattatgtaagtagtaactagttatacttaattactattactaaatactgaaatttttttgttaggatttttgttatggataaatcatggatgcgtgaggagagagacacactgtgatttcaagcagaattcaatgcatttatatagttttccctaaagaattgtagaaatcctgaatgtatttattgtccatgtgcagattgttataatagatcaaaagaaatattacaatgattaaagattatgtgtatttgagaggttttaatagaaattatactatttggtattgacattgcgaacatttagctaatgatccatatccattaaggaagcatgaggtaaatgttattgagggtaatgatttcgacgatcatccattggacttgtttgacgaagcacaggtgaaatttcttattgatcctaaaaaattcgataattttttaagtgatgcagataaacccatgtttgatggttgtaaaaaactaagattaccaacaatagtaaaattttacaacatcaaaacagaaaatggagtgagcgataaatattttactcaattttcagcttcttttaaagattctttccatttgacaattgcttctcaaaatttacatatgaagtgaaaaagactttaaattccattagattaaagtgtaaaagatccatgcatgtccgaacgattgtattttatatcgtaaggaatatatagacatggacaatttcccaacatgttgtttatttcgctataaaataaacaagagtaaggagaataggaaacttatcctctcaaaattgatgtggtgcatgcctttgattctacaacttaaacgattatatcgtagtgctaaacattctgaaaaatttgatttggcacaagactaagagagtgaaagatgaaaaaatcaaacatcctgcaaattctcaagcttggaaaaaa

SEQ ID NO: 101301 - DNA, 526 bp, Cannabis sativa
tttagctccaagttcagttatgctttcaaaattgtcgaaatttacaattaaattctaccttataaaaccaagctctacaaaattgatattttttttaccaaagtatgctaaaacaattctaagatactctaagcacataattagctttccaaaattctaacaaattaaaatcacactaataaaacattcaaagaattaatttaaaaatatttacacataaaattagtcatatttataaaatatggagttatcactgataaaggcatcaatgaaacaattaaacgaatttaaactccttctacaaaacataattaaatcatctccaacacacaaacttactaacttaaggcatttagaaagaaagtgatacctgaaatttaaaagcttagaataataaatgagaaaacgagttaagtactccgtaaccagaacacgaataataaaagagatattgtgtctgcctatatgagaatttggactcccttgaatttttcgtgaactattccatttaaaactaatgaatata

SEQ ID NO: 101302 - DNA, 592 bp, Cannabis sativa
  modified_base (59)..(59): a, c, t, g, unknown or other
aataagtgatgaaaatacttatatctctttatttatatttaaatgatagagattacatngaaatagagttttatttagggcattaaacccaacatatagtttgtgtgaaccccaccttgttgaggagatagcccgagaccagattctttctcatctctagagtatgcatgacttcattgagaattatgatttttccagaggtaaactttaaatatatatatacacacttataaataagtgttcccaagcaatgtgggactaatcctttaaggacttcataaatgcacttttccaattttcaataattcacaaatatgttccaatagttataaattgcaagaataaattgttactaagtgagaattagattattatgaaaagaattattagtattattgttccctgaactttcgataatactgattttgccctctaaaatatacggcttgttaaaaattttccctaaactttgacacttacagaaacttagtttttctgttaggtttcgtctcattattctatttaaatgttcacgtgtctttgtaaattagtaattttaccccctaattttgacaattatcaaattgtaccc

SEQ ID NO: 101303 - DNA, 809 bp, Cannabis sativa
  modified_base (295)..(314): a, c, t, g, unknown or other
  modified_base (515)..(516): a, c, t, g, unknown or other
ataaatttgaaaaattaggttttaactaacctaaatatctttttcaaaaaaaatgctaacaaattttcaaatttcatgatatttattaaaaattaaatatcatataaaattaaatgataatttaatatcatttttctgattttacaatttaatttacataaaaaataacaaaatttaaaagttagcaaaatattctatttcaattcaaaatttcgtgattaaaataatcttattttaaatttcaaataaggtcaattcattaaaaaaaatatataaatatctgaccttaaatttnnnnnnnnnnnnnnnnnnnnaaattttaaaaaataagataattaattaagcaaaaaaaagatagatttttaacccattttcaaattaaaatttcactaatatcttaaattaattttaaaaaaattattaattcaatcatgataattagatttaaaatttgaaaattaacaatcaaaatacaaaactacacaaaaaaaatcgaaattaattccatgaaaaannatgaaaaaatgaaaaaattggaaaaaattgcatttcgcgcggatggtatgcaatgcataccatccaggcgcatgcacctgggcggatggggctggtttcacgcacagggatgatgccaacaacatttctgcgcacgtagccaccttcagacaaaatcagcgccttcagactgagaattctcggacatgtgtgtatctgatgcacgtgcacccgagaattcttagacatccgcgcgcgcatatgggtgatgtcacccttgatattttccgattttcaaaaaatcataactagtt

SEQ ID NO: 101304 - DNA, 598 bp, Cannabis sativa
ttgtcctcttgctaaacaaagaaaattaccctttcctaataatgcttctattgctaataataagtttgatcttgttcattgtgatacttggggcccttaccatataccttctcattctaatttcaaatattttcttaccttagttgatgatcatacaagattcacttggatctaccttttgaaacacaaatatgatgttattgacataattcctcaattcatttcatatgttaaaactcaatttaagtgcataattaaacgatttctttctgataatgcacctgaacttgtgtttaaaaatctttttgctaaacttggaattatgcatgacttcacttgtgtggaaactcctgaacaaaatgccattgctgaaagaaagcatcagcacctattgaatgtggcccgtgcccttttctttcaagcaaacatgcccataaaattctggtctgaatgtatcatgacagcagcctttctaataaacagaacccccactccccttcttcacaagaaaactccttttgaactcctcttcgatcttaccccagattattctaatctcagaagtttcgggtgtctagcctttgcttctactctaaat

SEQ ID NO: 101305 - DNA, 506 bp, Cannabis sativa
gttttttcaagaacagcacaggaaactatccaaacaaactacaaaagggaaacttagttttaagagtaataaaaagatagaaaatactatattcctcgatcgcattgtgttattcactgtgcggtgtttactcacaatctctaatgaagtaaacctcgcttcacaaatagggcaaggatataactcaatattttgtgcttctgcttccctttcaacatcttcaaaagtaaattcctcttcattaacttgctcttcattttctctgataaccagattttcataaagcaacattgattcttctaatactatctccaattcatcttcgctcatacggaaaaggctagttttttgacttttctccctgccttgctcaaacctataatatataatacactagaaaataattaaccagaaaaagaaattatttatagaagctaattaacaaattaactgtaaccttatttttcttgatggagtaggtttagtgttagttatgttgaccaatt

SEQ ID NO: 101306 - DNA, 682 bp, Cannabis sativa
ggcataaaacccaacagtctcatctcggtcgcctcctcctgactctgcatctgggtccaccaatgatacaatcctcattggctcgacgtccatggggaccgagtcacctgctgcactgcccttagagggccgttgtcaggctttgtccacgggtttgatggtggcacgtaggcacaccgagggcctcatggatatcatggacaagaccgtgtctaagcttaagtgtttgtcccctgcctagatcgttgctcttgggtgccgcgagatgatcagagtaagtttctcctacttgtaaaaattctttcctttaaccattatctaacatacatgtcatgatgtgtgacaggttgcgactattacttcctatggtcaatctagggttctcgcccgcctcactccaacttgtacttgatgccctccgttaagaacactcccagaagattcatggcctagaaacgtttgttgagagtgttgctgctgagaagtagcgtctcaggggtgagcttgaaagcgagaaggaggctcgtgccaaacttgctgaggaaaacgaaattaatgtcaaggagcgtgagaagctatctgcggagttgaaacagatcgaaaacctctccaccgatgttttcttcaaattttggctaaacaacaagaaggttgactttagttatctgggtaagaacatgga

SEQ ID NO: 101307 - DNA, 571 bp, Cannabis sativa
tctatatgagttgttaagtaaattttaattacgatttaaattgttttactcttgttacaaggattattatgaggattttcataaaaatgtgataaaaaaaattattttgaaatataaaaataaaaaaaaagtattatcttatacattatttttttgatattttttaatttacgatttaaattttgattgcaatttaaattaatattgcatttttatgtaaatttttgtaaaaaaaattattttaaacaataaaataaaataaatcattatataagaatgacaatagtaaaattaatattagttcaaaatgaagagacaagataagaatattatattaacttttgtctgttgactctagcagattatttatttattttttttttttgacaattctagcagattaattttgtttcagtatatccattactaatactgatcttactttggtaattagtttaattaataaacttcacattaattttagttttcagtctattttattagatatttattctttattaactgctgttagtggtggttcttaaaccgccattctgcgatcggcgaatgg

SEQ ID NO: 101308 - DNA, 772 bp, Cannabis sativa
aatgaatcttatctctgggcttgacccatggactagtaacaatctgaaaagattgttgaaatcacatacaaaaaccttgtgtgtttttacttgtctacactgtttgttttttttggtttattctaaagttatagagttgtcatttgtagctacagaaaatctgtctcagtaccagtttattattctgcatttaattaattatttaattaaataataaagtcagaatattaaaatacggaatttcaatttgtatcagagtgggttagtaaaatcttagtgagatcttgagattattccgtttaatttgttttgtgtgagatgtctttgtttgtaggaggaagctccattacttgaccacctctgttgaatgattcaaattatccatattgaaaggtcgggatgagagcatcattaagtcacaagatgagaaggcttggagagctatacttatatgctggttgcaacctactgaaaatgacgataaaggtaatactaaggtaaaacctaaactcaattggactactgaagatgaaaaattatatggttataacaataaggttttacatgcaatttttatgatgttggtgaaggctttattaaattaatttcatcttgtgaatctgtaaatgacgcatgggaaatccttcaaactcaatttgagggtatcgctaatgtataaatatcacgttttaccatgttgcaaactagatttgatgaattgagaatgtcaaaaactgaaactttgtctaaattttatgaaagattatctgat

SEQ ID NO: 101309 - DNA, 601 bp, Cannabis sativa
  modified_base (528)..(529): a, c, t, g, unknown or other
ggagaatcgtcttcttcttcctttgcattctcttcgtctctcaataacctaacactgccatcgccggtaaggatcctgggagccgccattgaagagaaagacaaatggatcgaggaaaccagaggaggaagggctcagcaagtaatatgagagagagagagagagagagagagagtaagagagtaggtgtgaatggttatcacatctccattctccggcgatctggaaaatcaacggctcaaattgaattgagtgtgtttgtccctaatgttgtttatttctctcatattcttcttcttcttttcttccgctttcgattgctataggtgactcaattaaaatattatttaaagaaaagtcatcccattttcttcctcattatttattcattttctgtaatttaataatttaatgggataattaaaattattcatttttactaattcttctttcactaaaaagaaactcaaaaaaggacattctcaacaaaagcgaaaggctacttagtaattttttcccctgaacttnnacatgtattaaatcatgcctcttgaatttttttggccattagaaattccccccaaattattaagattgttaa

SEQ ID NO: 101310 - DNA, 625 bp, Cannabis sativa
atatatatatacatgtgtgtgcatgcatgcttatacatggcatacagaaaaaattatcgaagtggaaaagaatataacaggggtcaagaaatctttaaagagaatactgaaattaattagtcaaaatgttttactttggtagctaaatgataaaaatactgaccagctccatccaggctatatcagagtcgtagtagtcatttgaaaggaaagcatcagctctgctatgaagaaacctcttcaaactgcatgtagaagtgactttgtaaattcgagaaatacagaggtgttcatcaaatacgatatcagtaatagagagcagcaaacaagatacctaggtgagcttgataagtcaccagctttatgtaacaattcagcagtctttctgaggaaagaactgtactcttgagcgaagggaacagtatatagatcatgagcagaatgcagtagatgctctgtgtcatcaactgttttattataaatagaagaatctagagcgaattcactacgccttttaataacattgaagaagcctgttgcatcttctttttgctcatctgttaaactgctcttccataaatcaaattcctgttgagaaaattgttggtcatcagtcatggaagga

SEQ ID NO: 101311 - DNA, 995 bp, Cannabis sativa
cccacactcgaagaacccaggacccgcccccccgaactcacccccaccccacaaaactcctcccaagcctccctagctaacacatcaagcacttccaatctagattgcactttgccaaacaaacagagttcctatcataccacacccaccaccaaaccatcgccaataacgcaaaatcattcttatcaagcacctcaaaaagataaacaagcaactccgctaacgacccaaacctcccatgatagagcaccctccaaaggcgaagcttagaccacaaaggccacaaggaagagcaaaagactaacgcatgttccgaagtctccgtttcctcaccacatctgtgacaaagtggctgaaccggaagtttacgcttaataagctgggaattagtcggaagagcccgataatacatacgccaaagaaaaattttgaccttttgcggtaaccgcaaattccacatcccattccaccaatgagccaggtccccagaagaactcccattcctatcactaaccatatcaagagcaaccgcataaccacttttcacagtataacatccattcgaagtataatgccaacaccaacgatctgcacatcgcccacccgtcaaaggaatgccaaggatgacatcaacatccaacctcagaaaatactgtgacaacgtcggaatgtcccaagccccatccataccaataaagtcactcaccataataccatcagtaggagcaggcgagatcgggcgaaacgatctaggcctgggaacccatggatctcgaaacgcatccacacttcgaccatcccctaccactttccgcatccccgagttcagcaactttaacccccatatcaaacttgaccacaaatgagacgacccctggcggtctttagcatccaaaatagacgtatggcgaaaatatttgtattgtaacacccggcccgccaacgaattgggcgcttgcaataaccgccaaacttgtttggcaaccatagcttga

SEQ ID NO: 101312 - DNA, 662 bp, Cannabis sativa
agctcaaggtgtttctttgtatttctcctcctattacaacattgctactactgatatctctacttctgttaagtcacatttcagtgagttgtaacttgagtgttattgtgtgtttagtagggaaatatggtctacatttcctaggcaggaggaagcgatgaagttttccaagtagcatgatcatgcttgtgttttcagttaccaagatcattttaatgggcaaagaaggttccttgtttcaacttatatagaattctggaaaaggttatcttcatacagcttatgttaaagagaaaaaatattgttgtatatatattttggaaattttttgaacattcttctgtttgttatgtgtttacaaagttcagatataagaattcagattcaaatttttgccaccattatgaagtgattcaggaagtgtaaatctatcgatactctcagatcaaccaagataaaaactgtgaaattactgctgcccccttggtctttaaggaacacgattgttgggacatcttgctggtctaactgtgttctaatatttgtaacgaatgcacacttaagtgaatcaattcagggtcttagctctctctagggtcttttggtataactgcaacagagcttgctcatggtcatgttcctttctcaagataccctccaat

SEQ ID NO: 101313 - DNA, 1175 bp, Cannabis sativa
tcaagtatttaaccattatcttttcggtcaaatcatatcacataagctacaatttatctaatttaaataatgtctaattactatacattatttaaatagcatcacatatataactttatttaaataatgcgaattcatatcccgtccattattcaaacaacatatctagtttaaataatgcgaatacattgtaccgtccattattcaaacaacataactagtttaaataatgcgaatctattgtaccgtcccttattcaaacaacataaataatttaaacgatgtaaatccatattgtactgtccattattcaaacaacataatatgataatgaacaaataaaaataggatagtagtcttataccttactcccactccttttgagcaatatttcatacagaaaacttaaaagtttctacttaatttccttacctcgaatgtagagtcctagccttgattgcaatgagagatccttgagaaataatcattttacaaaaaacctaaatttcatacttattaattacgatttatcataatggtacatatatatatatgaaactttaacaatgaatctacaaactcaaaattataaaatgataccttactttccaagaaatctaattgagcactaaaacttgaatacaaatgatggtgatggtgacgccaaaatgatgaaggatatatatatttatatatgagagaataatgaaggttgtttatggtaatggcttcaacaaaaaggatgaaagaattaataaaagaagacttgatggacgttaatagtggggtaaggtggtgaaaataacttgaggttttgttgtttatatatgaatttggtttagatgttgacaagatgagagagtgatgtgattatggttatgtatgatggatagggtgataagtatgagggtttaagagatgacagcagttcagaatgaagagagagatttttgagtctaggtcttatgagtgttgagatgaatgaataattaaggttctatttataggcttctcatagcccaccccacttacctatatcgtatcccttagctaagatttgaatttttaataatatgctaatactcattttaaatcctaactgttctgataatcttcacaaagtcaatcgaggtgataacaaagttccccatttcccatgcaaccgcataatacca

SEQ ID NO: 101314 - DNA, 706 bp, Cannabis sativa
aaatacagaagacttattaagatttcccttctgccccgaagcctcctcaaacttatgcaacaactccaagacacgatgagcctcatccatagtgggcgagcaataaagaaataggactttttaaaatgacaaaataaaccctctattttttaaaatgatacaaataggactttgagctcaatttttaatctttttttttatataaccaacttgaggataattcctaacacaaacagaaacagcaaatttaaccaattttgtcctaacatctctatgtctgattattattaaattttatttcgataaaaatcaatttgaagtcttacttgtactattttaaaaaatacagaatttatttatttttttttctaataattaaatacagaatttattttattatttaataaaatagattgtcgaatctaaaactctaaatacttttaacccattaaaattctatcacctacatagtataatttttttaattaattacattaacttaatatatgactaatcagatgacttaatataatctttttgaatgtaaaatgtaaaagttaaataaattttgagttactctcttaagttcgtaatattatgtagtatttagaaaaatttaaattaattattattttttttttcttggaaaagaactcaattttgaatatctaaaaatatcaactagatgatttatgatttatgtata

SEQ ID NO: 101315 - DNA, 655 bp, Cannabis sativa
atgggatatagctaacaagaaggactgtttgtttgttaaatggatacacaatgtgtatctaaaggacaaacattggtgggattatgaagctcccacagattgtagctaggcatggaaaaagctagttgaagttaagaatcaactgaaacttaaaactgacttggcttctttcacattgcagaattttagtgtttcaagaaattatcagctactttatagtagccccaagaagaagcactggtgtcattatgtgtgggatagagtgatcatccctaaacataaatttattctctggctggtgctgtggggtaggttgaacacaaaagaaagagtgagtagatatgatctgaatgttgatgtaatctgtctactgtctgggaaagaaaaagaaacaattgagcacttattttttatctgtgagtacagcaggaagtgtctgatggaagtgaagaggaacctgagctgggggacaccagcaatcggcttacaaaagctgctgcaaatttccagcaagatgaaaaatgtgtcagcagttagaagaagcataaagaagataatagtagctaccttagtataccaggtatggaaggcaaggaatgatgtcttgtggaatcaaaggcaatggcaagtaagtgtcattgtagatagagtaaaa

SEQ ID NO: 101316 - DNA, 628 bp, Cannabis sativa
ggcacatgataaaaaattattaaatttgacccaaaatataatattgtaccaaatttgatctataataaattttattttttttatttacaataatactattaattattatgattcaataataaaattttacatcttttatttactatattattatacttttgacaataaaaataaaaaatactaattttttgtattttctcaataaaagattaaatgagcatcaataataattgattttctttttacttattataatcttgcattggaacacaattataaaatttgaatcaaattcattattttagcttatttttgaactattttttgtgtaaattttacacgatccatctaataataatattttaccatgataacaaagtttgtcactatcagtatatctatctagtactgatcatagctcagtgataattatgttggtgcctaacaaaatggtcacttaaaataacgtgtaaaactcaattaaatggcggtttaaataagttaattacagtagaatgaatctctatctaaaaatactctattcaagaataatctctaatttgttataaaaaaatcaagtcccaatttgggccacttataaataaaaaataacatctaaattgtaatt

SEQ ID NO: 101317 - DNA, 855 bp, Cannabis sativa
cacatcctctgtgggaataatcgttggattggtaaaagaaagatgtgccctctgagtcggtttaggtcacaaagaagcaagtcgcagcaagttcagtcttgtgaaggtggtgaggtccgatttggtaaccctcaaaaccaagtcctcgcacgagaagggctcgttcagctaagtgtcgtccaccgaatcagtcccactcccttctgcttcttcttcttcctcacctgactctcgagctggggccgcccaatcgtcatccatctcctcaacctcaacgtcaggggcatgcctggaatggataagataattccgggctgacactgtagactcgctgtctctaatctcaatgtcccctggttcagcgaactcctacaccattctctcgatgtctgcggaagacatcggacctaattctatacctacagtaggtgcgacttccccctttgagatcgaagtcgggataaagctatcttccttattgtcctcatcatcgtcaaatgcattgcctcctgagccaagcagctgactgtccgagaggtcgctcatctgaaagatagaagatcttttcagcgtggtgaatgtgtgaaaaacaaaataagtgatctcacccgcataaaactataaaaaatcacagagcgagtactaaatgtgcaaatagaaaaacatcccaaaaaatggttaggagtgtcccagtgaccgcagcggcatgcatctttcggcatgaccatgaggtgacgaggagacacccaccattttgagggatccagctaaagtcacaacctgcgaataagtcacgcatctcgggctaagcgatatacctctaaaacggctgggagaaactcagtgactcaaggg

SEQ ID NO: 101318 - DNA, 543 bp, Cannabis sativa
cttacctatatatctttctaaattcatttttaattttagggttgacctgcttccaattttaatagggcagcccaatcatcatacaacatctaactcctaaagtcaatactatcttagcatagtttctaccataatactctcctttattgttgacaaggacaggaagtcttctttcttggtccgttaacttactaacattgttcatctcaattctacctcgctaaggtatcgccctaggacactctgctactgggtcagaatctgaatctgagcctaaacttgagtttgcaatatctacaccattaatgaacaaaatataaaattagctacaacagagcaacttcaaaaaaaaaaaaaaacaatatcacaagtaatctataataaatagtaactacataaacaaatattatcaaaagtaacaaattaaacacgttttcttttcttttgttatttatctttacctaaatcacaattgacccacattccctcattgatatcggttctaaggtatttagcattgtcttcttcgaggtatcgatcaat

SEQ ID NO: 101319 - DNA, 572 bp, Cannabis sativa
tattagttttgagtattgttactaagtattcttattattaggcatcagtagtatttagcacaatacatgctaaaaggtattattagtgtttagcacattccttgatgtcataccgttaatagtataattaaatatcagatctcaaataattttaaaaaaaaataacttttaggaaatatcgctaattaatcgtaaagtaacacctatagaaagtgttaaacactactgtccaataacaatatttatctagcaccatctataaataacactttgtgattaattagcaatattctcttcaaattattaaatgaattatatggaatctaaaactaaattgtaccataataatataacaattagaaagataataattaaatagcactggtattttttagtattcctaattatttctcaagaagaaaaatgttcattatttattatgagagttgaaggaaaaaaaggtaaaagtgtacattaattatatgaattatatatgcctaataagttgtctttgccgacttgttatattcaatatatgtcggtgcttgcatgtcatgttaatgtcacaattt

SEQ ID NO: 101320 - DNA, 1454 bp, Cannabis sativa
  modified_base (1171)..(1184): a, c, t, g, unknown or other
attaccaaaataccacttacactatcattacttacacaatcagacaatagttgcagggtggttgctgggttgttacgtggtagttgcatcagacaaaagtttcaattagacgatggctgcaaggtggttgctagacagttggccaacggttgcatcagacgaaggtttcaatcagacgaaagtttttgggtggttgctgggtggttggccgaaggttacatcagatgaagatttcatgtagacgaaataactgttagcaaaatgtttatgcaactgtaatgcaactattgtgaaacattaaaaattagaacagtgtttccacctacataacttcatctacatgtctctttatgatttaatatgaacaaattcaccattagatcattggaaaacaacaaaaatacacaaggataaacattttactatagtatcgatgtaattttttttggattatacttgaattggattgttgggaactccagttaaactttttgagatctgcctttcatggatctaaaaattgaagtcaagacattagttttatgcaaattaaactggaattccggttgaattttagtttcgtaatagtttttcctttttatgaatttgaaacaacccctgttttcattgattctggtcgtcctctcaggtgaagtcgccgtacctaatggtggttctctttctgattgaatttttgttttggttgcgttaggttgctgtgtagttgcgcgatggctgcacgatagtttgccagaaagcatggatcctgggttgaaggtgtgtgtaagtggtatttgtgtgattttttttacttgggctgtataaatacttatttggtcagctggaagtatttttgtaatattgttattttttttgcttaaaactgaaaacaaccctttaattttctaattaattttaaaaaattcattatataaaatatataaaatttcgaaaattattaaaatataataaattaaatacttgaaaaatatcttatttaagttattctaaaatacaaaattttcaacttaaattattttccaaaatttaattaaatatcaaattaagtatcttgaactaatcaccttaatttgaaaaatattccatttaagttgattcaaaagtaacaaatttttaacttaaaagtatttaaagaatatctgaataactnnnnnnnnnnnnnnttctacttaattattgatttcaaaaaaatattataatttaagttgatccaaaataacttataataactgattttcaacttaaatatatttttatgaaaaattaaataattatgtatctaaaaaaatctaattggttataacttcttaatttaattatatacagaaaaaacatatagtttatcttgaaattttttcattaaactatgtgtttttttcttaaattaatttcaaaataatttgatgaaaaattaatttcatatatttcaaaat

SEQ ID NO: 101321 - DNA, 527 bp, Cannabis sativa
acatggaaaattggctgctcaagtttttcttggttcattatatacaatcatatctatttttgacttgctataattctgcgcctcaatagaaaacactaaagcaaggaaagaataataaagaatggtgtactaatattacttctccttgaaaggttatcttcggtttaaacatagcttctattgtcaaaaaataaagggtggagattctgcaacaggccaagcttatatggaaataataatagaaaataaagaatgaaattggcagcataggcaaagcatgtgccatccccactagtgtgtgtacatataaaaattattgagcagttcagaaattttaaaaatgagagaattgctaaatctgaaagaagaaggcattgcgattagaggaatgccttactaacaaacctggaatatattattattattagacatattttccaagcagtgtattacagtttccaaaggaatatattattattattatatagcataaaggaatgtttggaaaagttgccgagaaccaaatc

SEQ ID NO: 101322 - DNA, 878 bp, Cannabis sativa
  modified_base (600)..(601): a, c, t, g, unknown or other
cataatagttatacttattaattagttgttattagcaaataatataataatattagacttatgcatgttggccaatacaatatgtgaaaaatataattattttaattattaaaaaaataattatactaagattaattaaatactttttattagaccacaatacatcgaacaattactcttttattttatcactagacactttcacttcacaattgtgtataactcaaacttttacactttataatttagacacttattaagaactcacacacttgtgtatagacttcacttatttttttgtgaactcacatccataagaccaagagtcactacaaaaattaaaatagctacttttagtaacaatttttagtcacaacataaattttagtgactaaatgtgacttttagtcacaacaaaatgttgtcactaatttagttttagtcacaacaagtattgtgactaaaaacacattttgttacaaaaaattgtaatttttgtgattaatacctttagccataaaccttttagtcacaacataagaatgatattttataaacatcacaaatttttttactcttagtcacaaattttgttgtgannaaaagtaagatttttttatagtgggtctatttatagtgcctcatggttggttgataaagccacttcaatttgctaaactagaaaagtagaaatatctagtgactattgtttctaaaaacttctagaaaattattttctagtcatttcttacatttatctagacttttctactaacctttggcaattacaatggactttgtcttaaatcaactaacaaatatgtaactagaaatttctataagtttagaggaggtgatttctaacacccccccccccc

SEQ ID NO: 101323 - DNA, 927 bp, Cannabis sativa
agatagttagggtgttacagttatcgcatagagctacaaaataaaaaggcttgcgatcagttaatggcagtcataacggaggaaggagagaagcaggatgaggatctagatcctcgaattcaagatgaaaagaaccagctgaaaccaatcaaggaattgggggaagttattttagatctagaaaatcccacaaagtgtgtattcattgggaaaaatctggatgaaaaactaaaatagcagctaataagttttctgaaggcaaaccaggattagttcgcctggagccattcagatatgatagggattgaccctaaagttatttgccaccacttgaatatcgacccaaattacccagcaaagagacaaaaaagacaacccctggattctgaaagacaaggggcactcaaagaagaagcggagaagttactgactaacgacttcatacgcgaggcattctacccctcgtggatatctaatcctatccttgtcccaaaactaaatggaactaggagaacttgtattgacttttcagatttaaataaagcatgtcaaaaggattgcttttcactacaaaggatcgaccagttggtggatgcaactgctggacacgagctgatgacattcatggacgcatattctggatataaccagatcaaaatgcatgtccctgatcaagagcttacaagtttcgtaacgaacatgggactttattgttataaagtcatgccttttggtttgaaaaatgctggggcaacatatcagcaactagtaaatgagatgtttgaaaagcaaataggaaggaacatggaagtctatgtcgacaatatgttggtaaagtcggtaaaaagtgaagatcatacaaaagatctcgcggagtgctttgagatattaaaaaagtacagtatgaagctcaacccaaagaagtgt

SEQ ID NO: 101324 - DNA, 699 bp, Cannabis sativa
tcccaactcaaatgtcaaattgcaatctaagggcacatatattaaaaaagcatcttcatacctagactagcaaaagtaaataaatcatataataatagaaattgatattgttaaactataaacaaagagagagctgtgagtgagaaagagctttcaaaaagagaaaaaataggagtggcggcaggagtaagagtgagatagggttagagaatcaaagaagactaagcatacatacatatatatataccaataaatctgatgaaaaaccctaattgtatgtagtgaataaaactggaatgaagtgtagcataatcctaagtagaaatcatagccctaagtagaaagcatatatggagatgaagattttctcaaacctagaaaaaatgtgtgtgtgagagagagagagagtgagagagaagagagatggagatgaagaaatctttaccaggaatggaatagctgaagccattgatgaatttttggaatggaactgagcaaggaacgagtgatccagagagagagaaggaaatgagaaaaaagtgattttaaaatcatcaaatatgtgtttttaaaatttgattaaatttgattttaaattaaaaaaacaaaaaataaaatcagttaccgaacattattttcaaaatgtgtttttataattttgattaaaaaaataacaatctacttttaaaattgttaccg

SEQ ID NO: 101325 - DNA, 697 bp, Cannabis sativa
agatcttggtaaaataaatattccaacatgattttcggaggtcttataaatgaagttcaagaatttccaacaagatctagaatccttaaattgggctttacaaggggagacgaaaaaaatttaaaatatttgaaattttaacctaaaattgaagaacacttgaagaactgatggaagcagaactctcatactctcagttctctctgatagacgtgtaaaacagtgtgggaaagtgattagaggagttctctatttatagcaattgttctcctccactcctaaaccaataaggagtgaatttaaatataaattttaaaagaaagataagagagagaaaaatgctattatcttttacttttctctcttttcttttatctttaaattttgaattccctatttcatcagggaatacaattttcgaaattcctaatcccactaggagtcattgaagaacaaaaaacaattgttgagattgtcaaaattgatgcccacctagtaatttcgtatgaaatggggttcacgtcattaagtcaacctcacacaagtttaaagttgactttgggggaaaattgtttacctaaaaactgaccctggtgatgtggacatcaatgtttgacacgtggtaagtaaaaaaatatctcggagttgagtagtgtaatgaccgctctagtaatgtggattagtaaaggcaattagc

SEQ ID NO: 101326 - DNA, 1418 bp, Cannabis sativa
gtctgggtccgggttagggtccaattcccagatttagacaccgattatgggtcggctccaagcctcgagccttgggtcctgtccagagtcaaaatcaagatcctagtctagttccagctcatgtcttggctcctggttcgtgtctcaggtccaggtttgggtctaggtttgggtctagggtcctgagtcatgggtttggatccccaattcaggtcagggtgctaggtctcggtctgggttagcgtcccacccgagtgcaggtcccggtccttgttcggtactggtccttctctcgagtcatggcctggtctgggtctaggtcacagtttggttcttaggtcccaggtccatgtatcgggtcctggtcccattacaagttcccaatcgcggtcccagtctgggttctagtcctactccaagttcaggtctcggtttttgtctcggtctgggtcccagtcctaatcttggttcgggtctgagtcccggtttcaagtcaaagttctggtatgagttctggtatgagtctggtatgagtccgggtatgagtccgggtgtccgggtctgggtgggtctgggtctgggtctaggtttcagtcagtgtttgggtcgggtcatggtttgagtctgggtctgggttagggtttggattcttgtacgggtctggcatctggtccaggtcccgagtcacgggtcctgggtcgtaggtcctggcccaagtcttggtccagtttcgcgtctagagctagttttgggtctaggtccaattcctgttccaaggtccttattccggttcttgttctaatttccggtctcgggtccgagtctgggtttgggtccttgtctagaaatggttctaggatagggtcctggtacgattccaagatctagacaccgactacgggttgggtccaaccctaggtcgtgggtcaagatccgcatcaaaatcttgggtctcggtccgtgttcgggtctgggaccgagaccggggtcaggtcttgggtcccaatcccaatcctgggtcccgattctgattctaattttgagtttaagtccccaatctatgtctggtcctaggtctagctgtgagtctccaatctcagtccgagtcctgggttagggtcttggtccatgtccgtgtctgggttcaggttcacgtcccgagtcttgatccgagttttgatttggatccgcgtctcgatctgggtctgggtctaaggtcctagtctgattccagttcctgaactcaaacccagactcagacttggacccaggtcttgggtacgggtctaggtctaggtctgggtcttggtccgagtctaggtatcggtcccaaatttaaactctgactacgggtcaggtccaagccccaggaccaaatctggatcacaatctcaagtcccagtttagttccacttcgg

SEQ ID NO: 101327 - DNA, 1238 bp, Cannabis sativa
  modified_base (947)..(949): a, c, t, g, unknown or other
ttttttttttttttttaataagtacactatatctctcttagtttctcatttcttttaatttttcattaagagtcaaaataaactaattagtaagtataattgtgattataaatattatatatttatatattgtgttttcagttcatttctaaattcaatattgtacatagagattttttttttatagatttttcaatttatttaaaaatttattattttataattaaaaaattcaaattatatatgtaaaaatatgttatttcttgatttattttatttacaaagtaaatttattgggaaaagcagtagaaaatgactataagtaagatacgatattagagaatattgtcccacattgattaaatgtaaaagtattgagccatatataagaacatgagctactccactcatcaccaattgattttgagatggaacaccatgattctatttctcaacatggtatcagagtcatatccctatcaaaatttcgatccacacctatccagatggttagccagccgcacgagatccaaatagtacaaagacaccaaacaaaaataagcgagcaaatgacatagcttgtaataaggtaattcaagattggtgagcaaaaacaacctaccatattgatagggtatattggagaatattgtcccacatggattaaatataaaagtattgagtcatatataagaacatgagctacttcacttatcaccaattaattttgagatagaacaccatgattctcaatatacgataatgacaataggtgagaaacaatagtaacaatgattttgaatggtcaagatgtaaatataatgcattataaaagaaaaagtgtttacttaaataataataataataataatattaataacactctaatttttttttctatgtcacctacttattttttaatccttttaataataataataataatnnnaataataataataattaatattaaggtaaatactattttagaccctctattttattaaatgacaaaatagaccctgtattttctaaagtgctacaaatatgaccctgaactgatttttttgtcaaaataaaatataataataatccgatctaaaagtattataacaaaactatttacactttttgtatttgttcgtgttaggaattgtcttgaagttggttacactaaaaaaagttatcaaaaatttagctcagaatcatattcttaccattatgaaaaatacagggtc

SEQ ID NO: 101328 - DNA, 1067 bp, Cannabis sativa
tgtgttcttaaggtggttgctactagaaaattgatttagttgattgagatgaagctcttattcaagagcttgaagtttcttagttaagcatgagttttgtgttatttctgcaatgtaatttttgtggtttttatgttggaatttaatgcttgagttgtatattttaacccgataatgtttgctagcaactttatttggtaatttgaaagtttgatcaagttttggtgtgatttgttgctgaaaatcgtatttgaaggtggctaatttctgtgttttcaacctaggtgccgcggcatggtctgagcatgccgcagcccgcccctgttggtggaacctgggattttgtctcaagtgtcgcgacatggcttgggcatgccgcagcccaccctctagtttttgggcagttttgaattcgaactttgaaaatgcatatcttttgattctgaacaacgattttggagttctatctaccgttggaaagctcgttctgagctctatgtgattatctgaattttaaatgccatgaatatattttatgagttttaaattaggggttaaccctagctgtgaaatctcggattgtgtgactaggattaccaacacctggtcaggagcacccagggattcataatctctgccattgcgggacaacaggtaagacaatggttagcacgtagagtatgcgcagtggcgcttatattgaaaatgatatgtgtgattacatagtaaccggaattagggttattatcatatgagcagtttaatagcctaaggttattaccctagtgatatatgtgtgtaaatgcgatgccatgttaaatgtattgagatttagggattatgtgcttaaggcataataaggtaggactcggtaacaataactgagatgaaccattgtaaggccttattgtatttaaatgtgtgagaacaacacgtaggtttacgccacgtagacatagataggcacgtgagagcaacatgcaggtctctatcacataaacatatatgtgaatggcattactatttaaatagcatgatgagcctattattgttatgatttatactat

SEQ ID NO: 101329 - DNA, 729 bp, Cannabis sativa
ttttttttgaaggaaattgcctgcaaccaaatcatgtaaatcattttatcaagtaaagtattaagagtagaattaattttgtaaatattagaaaattgtctaatcgtgagagagttattgtggagtttgtaagaggtttgtaaagaggctattttgattgtttttgggggggtgtttcgttgtaatctggttgtaatcagtatgttttaattaatgaaaattatttcttgataaaaaaaaatattatttaaactattttttttttttgacgtggtgaaataaaatcacacatgattaacaatgtagtaaattacaattggcagtggaaccttctcgaactaggatagctcattatctaaccgaaggacatgttttatcaaattcacttcatttctctaatcaatatttacttcattttctctcacttaactaaattttcactaacttaaataaaataaaaaatagaagttacccaatgcttttttgttattgtcttttaaaattaaaaaacaaaaataattatcaaatacatttttaatttgcaaaaacaaaaattatattttactttttgtggtttaaaacattcaaatcaaaattttacaaaacacatactgttgttagtgtttttggactaaacatgtgttaccaccatataaattcccaagaaaagatacaaactattttaacaaagtatactctctcgacgaggtctaagcctgatacgtcctc

SEQ ID NO: 101330 - DNA, 786 bp, Cannabis sativa
aggttacacatttatttaccatacacttaatatatattattcacatatatttatcacattttaatctactttattattatattaaaaaataatataacatctagtgtcaagctcgttacttgtattccatattaatatttatcctcatcacacatttactaaaaagataattgcattgcatgtacgtaattttattattcaaccgcactttctacacgggacaatacacccgtacgagaagaagacaacattaatgaatgaaaaatgtttaggctatgtttggaagcaactgtataattattatactatcttaaaccttaataattatactgcatagtaattacattatattttaaaatacaaggtgtgtttgacatccaaacacaccttgtttaggatgtcaaacttctcattctatttttcattttagtcttatttaatttatctccatacaataaactcatttctttttctacccgtgccattcctcattggttaagcccccttattgtgtctttcccaatttaacttgttcagctataaaaataataaaatactcatcttgactctcattccattatttggtatataattttcctattccaaccttagaagtttgagcatttgccattcttatcttaattaaaaattaataaaaaacacaatattaaaaaaaaatctaatttcatatattcatatcatttgttttttttcttttacaagataaaatgcactcaaaaaaatattataaaatagcatcatacataagaaaaataataaaattgt

SEQ ID NO: 101331 - DNA, 849 bp, Cannabis sativa
aaaattataattatattaaaggtataatattcttccacatataattctcacacaattttataaatagttagatcataatctctttgtttgtattaaaattaaataaacaaatgaatcaaaaaaaaatgtggaagaaagattttaatatattaacttttcaaacaaataaattaactttatgatcaatataatttcacaatattataaaagataaaagtgttaacaaactatcataatattataatttcacattattataatcatcaatttctatgaatcatttcttttccaccacacaaatcaaaataaatttaggactaattagtgtagattttgacttcaacttatgaggtaaaaacaaaagagggtaaagacaaaagaaatagacttgtaataacaattaaatttatgagggcaaatttgtcataattagtgtagtttttgactacaacttatgatggtaaaaacaaaatatatagggtaaagacaaaagaaatagacttgtaataacattaaatttatgaggccaaatttgtcattaactatcacaccaataaaccatatttacaatagtaagatgtatataaaaaaagagaatgttgctttcttttaaattttaaagtaaattttataatataataatattaataaaaattttattattaataattattttatcctttcttagctactaagaaacttctacttctacttttagggtgctacattaaattctacatactcctaattacctaattacctatattatcaacttatcacaatattcccattaattctatcaattaagcctgttatgaaatttctcgcccccgatcgagtctccaaggt

SEQ ID NO: 101332 - DNA, 797 bp, Cannabis sativa
  modified_base (757)..(758): a, c, t, g, unknown or other
aagtggtagtaacggtgtaagataattgtaacatgaggtatttttgcctccaaaaataaatattagatatttaagtatataaaatctgaaacattattaattatttatgccgcaatttacccttaaataaacgtagagaccaacttagttctttgatggaatatttattaaattaatttaattaatattcataaatatattttccaaactttttcggctgaatctgtatatattgtgtgattatatttgcttagtttattttaagtataaatacaggaaacttgacaaaacttgatagagttggaaaatgattaataacctatcatgctcgaccaaaacaagcaaatttgggttacaaaacatcatgatgcccttcttataaagtccttttaatttaagcacaaattaatgtataaaatatatataattcttccctaaaatgccaaaagcaactaagttgttgatgataatgatgatataattaaattcaaaataatactaaaatttatttgtaacataaagcaagtcaaaaatagtgtcaattaagaaccgacaccaaaaatttgactttttataactgtagaataggtgttgattttatgatctgacactaaaaatataagtgtcagtttgaaactgatactaaaaaatacaatttgtagtagtcactctaaaaaatcttacttttaatcacaacaaaacttgtgactaagaatgaaaaaattgtgactgattataaattattattcttatgttnngactaaaaggtccatggctaaagatattagtcacaaaaa

SEQ ID NO: 101333 - DNA, 686 bp, Cannabis sativa
  modified_base (41)..(42): a, c, t, g, unknown or other
tattaataagtaaatctgattgtattgaaatgagttttatnnagggcataaaacccaacaaatgttatctgtgatcagcctgttagataaaaaagcactttgagactctgagatgacaaatggaaatacctctttgaaccgaagaaccaacacctttgaaatcaatttgtaaatgacattacacaagcttattggcctataatcacccataccagtaggagtacttatttttggaatgagagtgataatggatttattcagcatatccatttcattgccatcattaagaattcccaaaaccacatcagttactgaagacccaactatatcccaatagttttggtagaacatagccgacataccatcactaccggggcttttgtctgggctcattaattttaaagctgcagttatctcagctggtgtgaaaggttgtgtcaaattgtcattcatagcagccgtaacagtagttgggatagtgtttaaggtgtgattaagtgcagaggagtcaagaggctgagctgtgaagagttcctgaaaatagtccgaaatgatgtctgtcattccttacttcgagtattctgttacaccagcaggattttttaacgatttgatagcattattgttgcgtctcgaggtagcatgagcatggaaaaactttatattttggtctccattttgcatcc

SEQ ID NO: 101334 - DNA, 979 bp, Cannabis sativa
  modified_base (698)..(704): a, c, t, g, unknown or other
gagaaaagttaagaaaactatgcagttcaacgatcttttaggtgaggcgtacttaacataagtcactgacgcccagtacattgtcaggaaaattgcatcacctaattaggtgagcccgtacctacgctcggtactcatcatatatcactgacgcccgtacttactcccagtacgtcgccaggaaaatcgcatcacgtaatcaggtgagctcgtacctacgctcggtactcatcatatatcattgacgcccgtacttacgcccagtatgtcgccagaaaattgcatcacctaatcaggtgagctcgaacctacgctcggtactcatcaaatatcactgacgctcgtacttacgcccagtacatcgcaaagaaatcgcatcacctaatcaggtgagcctatatatcacatgcataatatcatcacattattgatactcaaccaatcaatctttttattatataataatattaactctatctcaatattaatcaattggagaactatgcagtacaatatacttttctaacctttaatcaaggtttatacatttcggccaacccaagtggagaactgtatctcgaccctatgtcacaacagtagtaaactaataactgtttctcccaaaacactgcttaatattaacataagacaatctagggttttctaccaaatcccacggtataaatacactaaaatannnnnnntattttggctctaaaacatacaccatattttaaagctcgctgtaagcttcgaaatggtatatagaacgtccaaaacagatacccgagtcaaaagttatgataaaaatacaatttctgatctcctaaaaatttataaattccatatccttatttgttgtataaactgtctatactgacatacaagatattaactcagtatgtccaatcgttattactcagtcaaaatcataagatcccacaatacattatttataattatgtctttccattcttta

SEQ ID NO: 101335 - DNA, 712 bp, Cannabis sativa
caaagcatgcaatttttcaaaaatagggataagacaaaatacccttgtaatcatttaaaaagttatttttttaatttaaaagtacgttttaaggggcaattgttatacctaaaattcggctctactccaaaagctgacacttgtccaacagaaggaatatgaatcaactctaaggatataataatattatatcaataatcgatattaaataactcgttattattacatcgatgtttgataaataatattcaaaactcattgactatatagtcaaaagcgagataaggataataactattgagctgagattaatgagacatatgcatacctcgggatatacacacaagaagggggatattcacccactcaagtagaatgaatgtaacaacataaatacctcgtattacatagcaagaagatcacctcgcattgctaatgccaataaaagaatatgacgagatgaactacttctcaacacttaacatttttttcttaagatttacaaggaggaaaactcattttaagcgagatgtaaccttccacgtcggtaataaccgtttaaaggataaaactaaagagaggttgggtagttattagatattatccaacatgtgattaaatgaaacgtgggaattattcacgtttcatgaacagttgtatttgaatcagtcccaaaaaagatagctgccaatctatattcttataaataggg

SEQ ID NO: 101336 - DNA, 620 bp, Cannabis sativa
  modified_base (45)..(46): a, c, t, g, unknown or other
ttacaggtcaaagaaaaatataaccatatagttacaataaaaatnnaaccattgaatagtcacccaaaaagtttatatgtaacttaattaaaaataaagaaataaaaaataaattattaatttttattgtcacaataatatcataaaatcttaatataatggatttagtgaaaattaatatactactaaattaaattagtatatacaaatttattatcttatatatagtttgtacataaagatgagaatattatttctcatagttaaagaaatgtacaactttttgtaattaattttttttttttttttgcacatatatattgttataaattttccttttatcaacataattgtctatatttggcaactgttcatttgaaccctagagtatagcttattcagaaggaatttagctataagtacttattgattgatgatgaagattgcctatttctattttaattttttgtgcaaggcaagctttttgacttttaaattgttttattgattattaaattgtggtgtttctttgtttattaggattattgatttcccaacttcaaatattgcaatcttacattgcaatcttctatatcaacattagcttacattgcaatctt

SEQ ID NO: 101337 - DNA, 532 bp, Cannabis sativa
tgtcaagttgacgaacttcccaacatttagtgacagcaatggtaagcacaattctaatcgtaggagcctttacaaccgggctaaaggtttcaccaaagtctagccccggtctttggtgaaatccttttgccacaagacgtgctttaaagcgctgaaagctcccatcagcgttgtatttttccttgtaaacccacttgttcccaacaacattcattcccttcttccttggtactaagacccaagtcttgttgttctttaaggccaaattttcatcggacatggccttgttccagcccttgtgagcaagagcttcttgaagagttctcggttcagcattgttacctgaccatggagattgagctgtataaactttgggtttaaaggtgccaacctttgagcgggtcaccataggatgagtaggctgtgaagctttcagcgattgttggacttgttctgctatgacagaagcagattgctggtttgtacatggctggttttctccagatgatgtgccaagttctgcctccacaaa

SEQ ID NO: 101338 - DNA, 1190 bp, Cannabis sativa
  modified_base (44)..(55): a, c, t, g, unknown or other
aagttcatatttagggtgttgatcaacatacttgtgagtagatnnnnnnnnnnnntaaaataatttccaacagtttggactacgtatatcaacaacttcttccacccctatgtgttataaagattctatggtgtttaaaatataatttagagtttaatgtaaaagatctttgaactgcatatattaataactttttcctcccctatcagatcacaagatcttttattaaataaaatcttaataattttttaagaatttacaattattcataaatattaaatttaaattctattattgatgtggtattttctctatgtagagattataataccatagattttgtaacattaataaataaaaaatacataaaaatatgataaacatataaatataatttggctttggcatgcaagttatagaactaaagctcaattcataaaagcaacttataatgaaatctttttaaagggaaaattattatattaatactctcaaaaatatcacaatgaattgtctacaataatatgaaataggaaataaaattctatactaataattgaagctaaattattcgataaataaaacaattaattcaaaaattaaaaaaaagttcatcttcaacttggacaatctctaccattttgtctaactatccgtctcaactagctaggataacaatccaagtctaagcagctgaagctgaaataagaagaacaaaaacatggttagtagatccagaattaataactcaaaggaataataattctctaaaacacatgaattctcaacaaagttagaaatacattgtttctttgtcaaaaacttaagatactggggtttccagtgcccctttttgttgcaataaaagcatttcgacttctcctttgcctttggattagcaaccttttacccttattatttgtgttaacagctttaagagacttcttgctattcttccatttcttcttctttgcaggtttcgaagtagaggcaatgtttgtctcaggtttttccgtgccagctgtagcatcactagaacttagagctttgtttcctcctttctgtggtcctccaatcgaattctcaaacgtttgaaggttgttgattaactcgtgaaaatcaaaagtcaaattgttcatgacgtaatttgaagtaaagggcagaatagctagagttaaactattcaagat

SEQ ID NO: 101339 - DNA, 805 bp, Cannabis sativa
tatttttaatctagttttactcgtgtttggagtaattttatgcttgttatcttttatttttgcagatttaaaatagaagaagatttgaaaaatatcaaaggaaataagatgaaaaaaaaaaataaaagatcgcataaaagatagttgtgcaaaatttagatccgacctaggaaaaaaaagattgaacaccttgaaaacgtgggcatggaataaacaggccgcgaccaaggaatgggcatgccgcagcccgcatcgtaaaaagcagacatcatcattgcacacgggccacagcccaggaaaggtatgtcgcggcctgcccctattctgaagcaaaaaaagattacttttctcaacgtgggcctattgtggccgcctaattcaaaaatgaatgtgacttttagcatctgcaatttttctatctttttagtccctcaatggctatataaggagtgaacttcagtttatttcgttaagcaattcagaaggaaataaaaggcagaaaaatgtgtacgaattttagagattgaatcaaataatggaggcattctacaggttttcaacatttttttcttctctattttcttctcttttcttaagttaatatgtgtgatttgctataatgaacatgagtagctaaacacttaattagggtctagaaggatattctttgacatggttttatggttctaatatcattttatttaccctcaatctctatgtattctatttcattcgtctttaattacttttaattgtctgatcaccaattaagtgtctgtaattttatgtgagatctgagaagtga

SEQ ID NO: 101340 - DNA, 593 bp, Cannabis sativa
agagagagagagagagaattcttgggagagaagttaatcttgtaactctcaattggcttttgaaaaattcttgtaaccttgtaaacaatgatcaatggaagaagagtaaatgctcttccaaccgagatattaagcattgcacttagatcgaactggttaaaatcctagtgttctcttctcctattctctgtacttaattcattgttttgttttttgattcttggatagtttggttattgaaagtgtgtttgtttgtttagaaatgttcttcgcatcataagccttgattaattctcaataaactggtatcagagagggttttagaagtcatggctgccgcaaaatatgatgttgaaaagttcactggttcaaatgactttgggctatggagaatgaagatgaaggccctactggttcaccaaggcttgtatgaggctttgcttggggaaagggctcttcctaagatattgtccgacaaagacaacaaagagattcttgcaaaggctcatagtacaataaccttgaaccttcgagataagaatctgaggaatgttgaagcttgaaggatgtatatgacaaaatctttcgtgaat

SEQ ID NO: 101341 - DNA, 1026 bp, Cannabis sativa
ctcagccgtcagatcaaataatttactcatctgacggctgccgtacatcacagattacaatccgtgaaaatacaataacaggacaaaatcatatccctatatatatagtactattgcttctttttttgtcaggatattaagtaccattattaatataccacttacagcttcatccacagattttaaaacagtctggctagtccccactctctgtttataaatttatcatttacgtaatgtagctaactagctagccatatacctattcaattatttctaaaacttaattgttcctagattcttttaagctagagtcaagtcgccgtgtggattttttttccattataaaaaaaaaaccaattaatattaattaaaggaaaaaaagaacaggcatgatcaatttgattaaaataaatatacgtacccaaaggaatatagaggaagagagctctacgtggtccatttctactgcaagttgtttcattgactcgtttataacccttcaggcatgaacagttaaaggtcccatttacatttatacagttcccgttgatgcacggattttgacctttgcactcgtcaatatctgaataattaaaaaataagagcaagcttaaaagcacataaataataataaagtcacctaattttttcttttaaaaaaaatcaattaagtcatctattcatagaataactatatcaataatttgtcggggacccgtttgttgcgggtcagaagcgcctcatttcggattctagaaaatggtttgtaatatcatatctataacattgtttgggtttttcttttcgagaatttaattaaaatttacaataatatatttatttttcactaaacaaagaattcaaataatataatattagagttattgtagcggtcatacatttgtgacaaattataataaaaaaaaatatactagtttgtagtgggaatataataatttaatggacatataagaaaaggctatatatatttagctcaactttttagaaatactattggggtca

SEQ ID NO: 101342 - DNA, 840 bp, Cannabis sativa
gctcgaagttctccagtttacagtgtcgccctgcgagaagtctcttgtgtgtctcacccatggaaatgcctctcctgcagacccttcatattcttcactgcataaataacagataatattttcatgttagataattgattatagttatatacatgtaagaatactaacatgaagtgaaataactgaaccaatgacaatacaatgtaagacaattcagagaaacaaattttggttatttcctagaaatgcaaacagaaagttttggcaaataatttcatcatctaaataaaatcatgaagcaaatctaggcaggtgcaatgatattttcttataaagaactgttatgcttaactacaagaatcaacaaataatactgtggtgcatctccctttcatcttgcttgttgtaccacgaaccccagaaaaaagggaaaaaaagaataaatgaatagataaaaatcaacttgagcaataacactgtttcaaagtaattcatcagcctcttactaactttttactttgaacatcacacataaattaaaatgaagtgtgcacgcatgcacaatgaatgtaatcaatttatgactttgcattcattccaaaagtttccatcacacaattagaaagaagggatcccaaaaagagaaccactaatctaaaaaagcaatttctgttgtctgttgaaaaagcattaattttgttctgtactggtattgaacgttgattgaggtacacaaaagacctaaaacaagtgataacagtaagcgaatgaaattaatattcatttgtgcaagaaaagctaaagtgaaccatgcaataagatgttaggttttatgcccta

SEQ ID NO: 101343 - DNA, 757 bp, Cannabis sativa
  modified_base (648)..(649): a, c, t, g, unknown or other
ccaacaacagtctgtatttggaagtagctccagtatcgtgatgctagagggccaaagagcatgttcctggaagacgagtttggtctacctttttattcaagcgcacagaataaaaaagtaaatgatcctcaaatctcaacagaagatcgtatcaatttaaaagggaaaactatttaaaatgaaaatcaagcaattaattcataattaatttctcacaattataggacaggattttgacaaatccaatcatattcaatatgtctagtcagcagattttcttcttcgtgggctgaacttcacgaaaacatcccaaattatgtaatttcatgtaaactccctattagagggattaagagaaactaagtataattctcttaacactataaatacccaacaaatcctttggattaagggttaaactctcttgtaatatttgctcacgcaagctaagagaacttatactcattgtattcctaaaggtttttccagcttaagatacataataacaccgactcgtgtactaaagctcgttaacgttcgacccacgtaaaatttttgtgtgttgttcttatttctttttttgaattatttatttcttcagctttaatttattataattggctttttaaaaatctcagtaaatatttnngtgctttcattgagagttgaaggaagcagtaataccatctgaagattacgctcaataatggtactcacccaaaacaagtctggtcttcactgatccaaatgccaagac

SEQ ID NO: 101344 - DNA, 566 bp, Cannabis sativa
tccaacttgattatgccttgaacggataacccttaaatctcaatataatcatacacttaacatgccatagcatttactcacttatatcactagggtaataaccctaggctattaatagttcctattaaggtaataaccccaatcccggttacaattgctcacatatatcatattcaacataagcgccaccgcacatactctacgtgctaactactgtcttacgtgttgttccacaatggtagagaatctgaatccccagtgctcctgaccaggtcccggtaatcctagtcacaaaatctgatattttcacacatagggttaacccctgattccatactcataaaatatattcatggaattaataattcagataattataccaagctcgaaacgagctttccaaaaatataaagaactcccaaatcggagttcggaatagaaagttatgaattttcaaagttggaactccaaactgcccaaaaattcaagggcgggccacggcatgcccaagccatgtcgcggcacctgggacaacatcccatgttccaccaacaggggcaggtcgc

SEQ ID NO: 101345 - DNA, 592 bp, Cannabis sativa
tgaatcaattaatcaaactatgtgatttgttatatatatatttatttggagttttggatgtaaatatatttttagctcttattaagtttacatagttacagtacctgaagtacctgatcttagtcagtcggttagttaatcctcctcttgtaactaacttgtccctatttctctctaactgaatcaactgtattctgttatgaatacagctgatattttgtttactctgctatataaactgtaataccaagttctgtagtcaatgaataaaacaattttgcttctctctgtttcgtgttttctcatttttctcttccgcaaaatggtatcagagcagggaaagaggagctttccctgaccgatcctagtcttcctctccgatcgtcttctccggtgacgagtatcttccttcttctcgatactctgtttcatcgcgttttcttctctgtctttttctttccatggctgatgaagatcagacttctactcagtctgataatcgatctgctagagttcttgaaactccttcgactccgattcaatatggagctcaacaaccccagatgagcagcgttaaaaatcccatggaaga

SEQ ID NO: 101346 - DNA, 704 bp, Cannabis sativa
gccgccttccaatattgtggggcacaaacatgcaaaaatgtaaaagttcatacatggcataaataatacatcttgaatttaaataaatctccataaaattttaaatcatgattaatagtctagtttcataattagaccctaattatctactaattccaaattaaagttaagcggtctgtacaattatcccccttttaaaaggatttcgtcctcaaaatctaacctgaataactctggatattgagccctcatgtcagactctaactcccaggtggcttcctccaccttactgtttctccaaagcaccttgaccaaagttatggtcttgtttcgaaggactttatcatttttggctaagatctaaactggttggtcttcgtatgttaggtctagttgatgctcaagattctcataactcaacacatgagtgggatcagaaacgtatttacgtaacttagagacacgaatgttatgcactgctgaaagtactggaggtaaagctagaagatatgccaccagtcttaccttttcaagaatcttgaaaggcctataaacctagggcataacttgccctttttcctgaaatgtctaatcccattcatcggagacacttgtaggaacacatgatctcctacttgaaattctacatttttgtgcttcggatctacataactcttttgcctactctgagaggcaagaattct

SEQ ID NO: 101347 - DNA, 783 bp, Cannabis sativa
ttcataccagcaagttttctaaccagaatccaggtatgatttctctttaatgaagtcatttcatcctccatagcttgattccattcatgcttgtatacagatttcatagcttctctaaaattcagaggctcttccactgcagcaatagacagagcataatgcaccagatctgcaaaaccaaacctgtttggtggtttgacagtccttctttttctgtctctgaccaattggtagtcctgatcctcctcttcatcttgttcatcatttactgcatcattgtcagtctcagtcacatcttcttcaacttcagttgttccttgatcttgcatcttatcctgatcactactgggctccacctcaaactgattatccacattctgttcaagttcagatggcattggtacatcttgctgaggtttgagagtatccctatataccctgttttcatcaaaagtgacatccctactgataaagtacttttgatgatctccactctcaatactccacattttgtatcctttaactccctcgggatagcccagaaaaatacattttctggctcttggttcgagtttatcttgcctcacatgagcaaaggctacacaaccaaataccctcaagtgttcatactttgcatctcttccagtccatgcctcaattggtgttttgaaacctattgcagaacagggacaatgatttattaagtagcaggctgttgaaacagcttcagcccagaaattctttggtaagcctgagtgaatcagtagacacctaaccctttct

SEQ ID NO: 101348 - DNA, 520 bp, Cannabis sativa
  modified_base (490)..(493): a, c, t, g, unknown or other
attttagcaacccgaactttagcaacccgaacttagcaacccgaactttagcaacccgaactttagatcccgaactttagattggaactttagattgggtaactttagattgggttagaaaatatataggataaaccgcccaaaccgaccgatgtacaaccctaatatgtactagaaatttcacacttcttattgtcgttagctccccagtcttgaagaaataaaaatccacaaccgaaaaatctcacatttagaaagagagaggatggtgggagcggaggtcgaagcgagggagaacgagagagaagggggagagagagactgccaattttaaaatgtatagattcgaaatttttcacatctaaaaacacattacattggagcgagggaaaacacattatttgaaattttttaaattttaactaattgctaatggttaaaaaccgtggcttataacactataggagttgtgaataaacatatgatctgnnnntaactgattttgtgtgtaaatgtaata

SEQ ID NO: 101349 - DNA, 1560 bp, Cannabis sativa
  modified_base (1047)..(1054): a, c, t, g, unknown or other
agtataaaagacagtataaatgtacagtatttttgtaatttctaccgtatgacagtataaaagtaataaaatgctaaaatacagtaaaccatgtaaaatcccaatataaatcactataaagtaaagtggctcatattttggtttaataaatagagcattgctattgggtttaataaatactaattaaaatggggtttttataaaaatattagattttaggtaaaagtttataattttactattatataatttttttttacaaaaatattatattttttataaaataatctaaaacaaccgtaaaataacaaaacaaaacaattagaaacaataatagaacaactaaaaaacaaccgtgaaacaataataaaaatttaatacagtacatagtattaaatttacacaatattatttttaaaaaaatataatacttttgaagaaaaaaaatctgtcccacaataaaaaaaaataaaatatttctacggtgtaaaaaacccaatttaaatatactattaagtggttttgggccttttttctttaatcttgaacttcattattgggcttagtataacaaggatcctttctaataactaaaaaaagagctccaatgaaaaataattttatatctagaaattaaattagtaaatgtttttttttaaaaaaaaattagtaaaatgatgaaatataataaattaattaataaaacttataaccaaacatttactaagtattatttttttttaacaaaatatataataattaaattaaatgatatacattttttagtattgcattgatatattataacaaaaacgaataaatatattagatcattaaatatatacaatattatttaatacattatatcactgaaaattaatatattgtagtaataaaattatataccgcaaaaattataacaatactaaattaatactcaaaaaatatatgtatcatacttacaaaattatatacactattattaaaatatgtatacatagcaaaaaatttatatataatccttatatatataataaaataaaaacnnnnnnnnatcttaaataaatgatatactacacacaataaaaattatataccatataacaaaacatatacctacaataaaaaaataaaataaaataatataatattatgaaaaaaattatatataccatattaacaaaattatatataaccataaaataattatatgatacttacaaaatcatatatcacctatatataataaaataaaaactaaaatctaaaataaaatgatatactgtacaataaaacttatatactatataacaaaaaaaacatataccttataatagaaatatatataataacaaataaaaataaaaatatatagtatgttaataaaattatatgtcacaccaacaaaagtaccataaaaaaaaataactttaatattatttaaaaaaaatgatataaagtataacaaaatatatatataccatttaccataatatatatactaacaataataataataaacgtaattaaaatatctataccatgacaacaaaattatat

SEQ ID NO: 101350 - DNA, 1122 bp, Cannabis sativa
  modified_base (268)..(279): a, c, t, g, unknown or other
  modified_base (365)..(368): a, c, t, g, unknown or other
acaatcagatcaaaatgcatccaccagagcacgaacatacaagtttccgaacagatttgggtctatattgctacaaagtaatgtcttttggtctagaaaatgctggagcaacataccaaagattggtaaaaaatgtttaaagacgaaatccggcgaaatatggaagtgtatgtggatgacatgctcgtcaaatccagaaaggttggggaggcacatagacgatctggacgaatgcaccagattcctcaggaagtacaacatgaaactnnnnnnnnnnnngtgttcctttggagtcagctcgagaaagaagattcaagccctcctggatatgaagtcgccaactaaaaccaaggaagtgcaaagtnnnnctggtcggatcgccgcactcagcagatttgtttcaaaatcaacagatatgtgtgtcccattcttcaacatcctgtgaggaaacaagcgattcgagtggacagaggagtgtgaaaaactttccaagagctaaaagcacaactcgcaaaacctcccgtactctcaaaacctctagaaggagaagaacttggaatatacttagctatcacagagcaagttgtgagtgtcgtgctgatcagagaagaaaacaacatacaacacacggtctattaaataagtaaaagactcattgaggccgaagatcggtatccattgatagaaaaactcgcatactgccttattctagcaacaagaaagttaaggccctattttcaagctcatcttgttcgggttgacactgaccaaaaattatgccaaatattgcaaaacccagacgcctctggacggctactcaagtgggcggtggagttcggtcaatacgaaatttctttccaaccccgaacaacaagcaaaggccaagccttagcagactttgtggtagaatgcacaggcaaagaggaaagcataccagaaagcaaccccgagccggtacaaatacctcagccatgtaacaatgaagacaacccgacgtggaaactacacgtggacgtgtcagctacagatcaattatttagtgcaggaattgcccttgtcacacttggggccaacacctgcacgctgcagtcaagtttggattcaaggcatctaataacaaag

SEQ ID NO: 101351 - DNA, 742 bp, Cannabis sativa
ttctttgaagaatgtacataactaaatatgaacgcgactcgcatcttttgttaataaaccacgaagtgcaataggtatcaaatgtttcaacaacacatgaaagtcgtgactcgtaagtccaataatctcttgttctttacttttaacacattttgatatgtttgatgcataaccatcaagaacctttgtctcttttaaaatctcccacaaagtacttttctcacaagatgaaaatgtgtaacacgcggttggaattaaaaaattgtccccattttgtattagatgtagtgcttctctaatacacatgtctttgagatctagttgagctttcacattatcattagattttccttcaacattcattatagtgttaagtacctttcacatacatttttttaatatgcataacatccaaattatttcttaataacaatgtacgccagtaaggtaactcaaagaaaatacttttcttcttccaaccatttttatgtaacgattctttcattttctttttccaaatggagcaaattgaagataacgtaattgattgagcatatcattgccccacaacaaactcaattttagcttgggtcatttcatctgctaactgcttggagatctgcttcactgcattcaactaactctgtccttttctttgcagggcatcagctacaacgttggccttcccagggtgataaagaatctcacagtcgtaatccttcaccaattctagccaatgtct

SEQ ID NO: 101352 - DNA, 1641 bp, Cannabis sativa
  modified_base (345)..(349): a, c, t, g, unknown or other
  modified_base (408)..(410): a, c, t, g, unknown or other
catatattgaactatataataatacaattcctcaattactcataattatctagttagggctttgttaatcatttttcttaattccgggtattacataaagcatcaagggaatttatttcagtagacatttttgaaaataaataaagtgatataattattatacttgaataataaatatcatctcataaatactttaaatgttatgcatgagcgcataaaagtaaaacacataaaatattgtttaagttattccacaataaaattctttgacaatagatcgttgtcttagggtcggtatcgagtcaatttcattaagcctgtgagacaattctcatctttattatnnnnnaacctaaatatctcatatttccttttcaaaatataaagtactgctttttgaccaagttnnnaactaaccactatgaagcttaattgcactttgtgagtataactcattgttttaaatttcatgacttaacttagtagcgtcgccttaagggtcggtatcgcactaaaatacatcacttcctcctatcttagtcaagagatcaacctttaacaacaatatatataaacacataccttccttagggtgacgaaatctaagttgtctcgaggccagtctatactccttcggtgttgactaataatggaggttgtaggttacactcacatgtactccgtctcccactcactattttaagttaatgcgtttttttattaattccagaattaatacatattaaccactttaataattatgattaatttatttataataaaagtctcaaattataaataaattttccgtcataattattgaatctgaattataactctttaattcataatttaaaactattttaaattaatataagttaattttaaattaccaagttaatgctaaattaatcttagccagtttacatgcttttagtttcaaaaatcggtaaatacataaatacataggacaatctttatatatatcatgtttctactaagagatgcatgataatataactctgtgaaatttctatgtatggcatattattcattaatgcatgagcatgttattaatcaactattaatgaatatttatttcaaagtaataaataaataatgatgacgagcttggtaataattgagtatttttaattttataacctttggaaaaattagaaaataaattacaaaactaatctacatcctatttttgtaggaccgtcgtaagcctcaaaattaatttaaataattttaattgattatttcaaataaaccttttattttaaaacatcctttaaactcttttaattaattaaaataattttaattaatttattcttgaagaaatcatttatttgagataattttattatcatattagttttgtcttaaaataataacatttattattttaatttgagttaagacaacttttgtcttaatatagttatagatttgagtttaaatttaaaacttaaaattaattatatttatttaattcaaaactaaatttgaaaaataaatattccacaaaactttattattttgtcttaactattaaaaataataaaattattttataatttagggtaaatagcggcataagttgttggaaattattttaccaggatctaagat

SEQ ID NO: 101353 - DNA, 681 bp, Cannabis sativa
atatattaataaataaactctttattaatcatgtaaaataaaagataatatttattgtaatttaaattcaaaaataaatatcttataactgaataacaaaattaattatattcttttattttatattatttataaattttaaatatattatcttataatatatttaatataacaattaaaagataattatctattttaatttaatttattttataaataaaatcaacatggacttttatatatcaccctaccatgtgagccatgttttaaagtccaaaattgatttctcaattttttcacaaataagatttattatttattttgccaataaataataattaattaattctcattaatctcttatttcaacaggattaaaataaatattattttaacaaaataatatatttttttctttaatattatttaaagataaaattctatttaactaattaatatagtttataaaagagagaaagttagtataattgatattgattggtttgatagtttaggtacaatctattatttgtgccttgaattgtaaacatgtgaaattattctgtttgcaataaaatttattaccgatttatcaaaaattaatataatttaatcaaataaaattaaatagttaaatatcatttaattaatcaatttataatataactattcaaaataata

SEQ ID NO: 101354 - DNA, 505 bp, Cannabis sativa
agtaagaatttattgatgtgctaccaaacaaggcaggaatggccactgaacactgaagcacccaagaaatgtcaatttatgcatctcaatattagaaaaagttggtcccttaaatactgctatcttttttccatctgaaacatcgttttgtacaaaatcaaggctgtgatcactggtctgtgtatcacagaaataatgtcatttttttaatgtttctactgctaattagatccattactattaaaagtaaaagttcattagtcatgttttattttaatttataccaaaagagatctgcccacatgttgtattgtagtaagatattcagtcttcatgttaatttagtgaagcaataacataaattatgtatgttgtgagtatgttgattttgagtagctttcaagcatgggaagcaataacatgttaatcatgtatttttttttgtctaaattagattttaattttatttgtgcatataagtgagttattatttaaaatttgatgc

SEQ ID NO: 101355 - DNA, 636 bp, Cannabis sativa
atgtggcatttttgaattgacataataagttttttgtgacagttttgaaataccataaataatttattgtcatttctaaaccgacgcaaaagataaaacaaaaaagtgcatattttgtgttgattttttatatatataattattttttgcgtcgtttcaaaaatgacgctaataaaaaactatttgcgactatggtatgtacgttagtttttttaaccgacgtaaattctttaaataacacttaaaaaccgacaagaattataatttaaatagtagtgttgggaatactaagtatttcccatagctataaaatgtgagatatacttcgtattccccagttataaactattggaattaattgtctttttattttaagaaaaaaagtccatttagtattaatgtccttggttcttcaccattggtaatagctaccctgaagatttttctttccaacggtgctaaattgatggaaaaaaacaaccacttacctttgccaacgattttcattgttgaccctgttgaacgataaaaaaaaaggaagaaataaatttattattatttcattattggttttaaaataataataataaaaaaaatatcagtcaaatagacagaaaataggatctcaactcccca

SEQ ID NO: 101356 - DNA, 784 bp, Cannabis sativa
agactaagaaaatatctaaagctgcatgcatgcatacatagtagacacgtagcacgtaggtatatatataatatgtacatacatgcatgtaatatatttttttttttactatcctagggtgtgataaaagttgaaaattgttattagtatattttaatttataagttttatataaattaaaataataaataataagtgacataatgaaacatatataagaaagaatgatcacgtgatcaaatcgtaaaataatcttcattagtggtttataatctttatataataagtaaaatatgcgagatttaatattaaattacgtacacaattaataatattacacattacaagggtgctaagccctttatcatttcttatatatataatatgtgaattttcatgtctatggatccctaataataagagtattgttattagatactaatgggcttaacaccttctaaacgtgtacgtcttgtgattgattaacgatataacataaaaattattatataaaattatatgagacctgatacttactaatactaataacgatatttacacgtaataaaatattagacactaatacctttaaacatttctctaacactaacgagaacacaacagatatataagataagatatgataatcttttttataataaatattaatatgtcttgtttagataaaacagacaaaataaattcaccaccatcacctcatttattatgagtgttatatacctaattaaagaacctagttgtagtagtgttattataaatagaa

SEQ ID NO: 101357 - DNA, 1515 bp, Cannabis sativa
attgctatgattaacttgttgataaatccaatgatcttattttaatcatagtccaattgtcaatagatcttgttattcttatttttgcactttgacgtggcatcgcataatggtgacacgtggaattcacttggagtatctgctcggagggtacagtctgagcaggatgcctcgctgacatgacaagagcaaagtaattagcaatctgtgcagggcaaccaacacttagcgaattcacctttcgcattgtgagtcatcaacaaaagtcctataacttggggattagattacagagatatggcacacccacgaccccacgatcagtgtattctgtagttatcccacgatcaatgtatttcgcatatatctcacgatcattgtatactatatggattgtgcaatctttctgcttatatccattgtaacgagaggggtaacacttcctctccaagttcatagccctataaatagtgatgcatgttcactgggaaaaggtcgcaaacagtttagtcgagactataccctaaagatattatctaagaatacatattcaaagatactcttgtaagagctataagaaaaggaacctttctccttgttcttaagtcaatacaagtaatgaggattaggctattaccgaactgcacaacctctataaaattaacagctgccaaacgtggggaatggtgtaacaactcctatagatgaaatcgcgcctggtgtgcaagagattaggaataacagttctgcacccaaccagtgcattcataatacaactgttccgcctggaagcaacacccagacgaccatcggagatgctactgagttgcaaaatctccacgacgctcttggactcatgcagggtcataacaataccctgcatcatgatcaggacaaactctgcactgcgttaaatctcgcgttcgaagaacaaaggcgtatgtttagcgagtggaccgatagagatatggaactgttacgggctcatcatacaaagattgaaaatcgtagtcggaaagttaccgtgctgatacgaaaattctaccaaactgtaggtcagcaacctccgaatgtcattcccctgggtgagacagacgaagatccagtgatgaatacttcccaaactgcaaatggtcagtcgcccaatccccggtcacaagttccactcgtgggcctagtggtaggcgagcagaccttgtctagtaattcatcaggagaagtcatacctgatggttacaactagatcaatggtgccattccacccatcaaccaagcaaataatttgctatgtcagccaggtgcttctatattcgaaaggttaggggcgacccatgacctaaggaatgatctgaacagaaggaggggagtagacgatcagaatgtcacaacgatcgtgcagcccagaacccgtactcaaattctcgctcagaaaaatgatgacgtaattcaaattgaccagaatgccaagcaggttagcccagccgtacaggcacagctaaacgaactgaaaaatat

SEQ ID NO: 101358 - DNA, 521 bp, Cannabis sativa
ttttaccatttttatcattcttgtttcgagttatattttggcttttttatacaagacctcgaggcccctactgtattgtcatcgtagtaaagtttaatcactaagtttgagatagattagtgtggttttctatgcttaagacaccaaaatatcggtatcttgattgagcaaagaagacgagaaacgaagctacttctctaatagccctattgcttatttatttattttttcttgtaaatacatttttaaatatactttgcttccttacgagagaaagagagggtttcaaagttttttttcttttatttcctttaacattttggtagttataattttatccgtctctaaaaggctgagttgagagttattgattcacaatgaacataattatggctatttttttttttaattgtataattattgccaaacattaccataaaattaataattactttatcacatacaataacatttttaaatatcatgaattaaaaaacttctttgaagtaatttaaagttat

SEQ ID NO: 101359 - DNA, 1236 bp, Cannabis sativa
atatctctgtgatatgatcccagaattatagggattgcttttgtgattcatgatgcaagtattgaagttgctaagtgttggcacgctgttcggaccgtccactacccagtcaggaaggcttcgtatgtacagatatatgcggtgttctgtttggcatatctctttcgaacaggtatgcaaagttgcttccacgtgtcaccagattgtgatgccacgtcaaagtactaaaattgggataacctttgcccccaagtctgtacgggacttccgaagttgcatgtagacttcatccgagatgcctacgcttttgaatgggtgacatgtgtaaggcgcgtctgttcgtgacttgatgtgaggctgaccaggcgtctcttcgaattttggctaattaatgagctgacttaattagtgcatcgaaacccagtttttctcatcacgctttgacaattacacttgattaattttgatctcccaatatttgcttttgggagggaatcaaagcgtctgaggtattttgaaatggttacctcttttcactagattgcctataaataaggctggattatcttcataattttacttttactgatttctctactaaacaaactgagagcaaaaaaggattttacttcaagtgtgtcatgagattcccaccaaaggcatttgagcagcctcatttggactaaatttaggcatcaaataataagtaagttttcaatctccttctcttttaactttgcatgtttaatttcttggtttctattgtcgaaaatagatgcgttgttgacttgttgtagaagatagatagaaaatctaggctcaaaactttgtgatttactctataatagtccgtactgcttcacggtttatgacctttccctttaatcacgcattgttcgtctttcaccttgctcattctaagcttcgtgaattttttagccctaaacccaaaaatttccaacttctgggttttggcttgaattttgtacatttttcatccttttaatctattgagtactcctggtcggcatatttgcctgtttactgttcgatatcccgaccaaacactcatctcgtgtgttgtcttttgtagatgaaccctggtgagttttggggaagtgaacaccgaaatgacgaggacttgcttcaacttctgtaccacgatcagcctcgtcttcgcgccagtctgtcctcttcgagtggtggactttgtaactcgagctttgaagattggga

SEQ ID NO: 101360 - DNA, 926 bp, Cannabis sativa
tgtgttgtctttttcaggtgttttgacaaccgggtgtttcgggccgaaccgggttcaggcccgaaatgcaattgggattgaaattatttggcattttaaatgttggtgaataaactgaaattaattgggtttaaattgtgcatgaaatgtcatttttaccattgtatgttaaaatgaatgttatatggccctaggggcaaaatgatcttttgacctttattgatttactttgataaaaattgaattttaaggaaatgagaaagaaaattttggcttttgatcccctctcagcagaccccctctctctctcaaaccctcacttattatctctttgattttggaaagaaattgcttggttggagcttgattctttggggttaattgagcatagcatggaattggaaattgaggtagtttttatagctttttattttgattattgttgttgaatttatagttgaaaagcatgagtttgttgaagatgatgaagttgtgttgcatgttagtgggctttagttgatttaagcatgaatctttgattgtatgatgttttggatttggttaagctttagatggagtattgggggatgttttctagcttgaatccatgtgttttaaaggtattttgctgctggaaaatggattgagtgaattgggtttgaagctcttgttctagagcttgaaattggggtttatgtgatttatatgcaatctgaaattggggatttatgttgaattttgatgcataattatgtgttttaagtttctaatgtttgctagcaactctagtttataatttggaagttttggttctgaattggaatgagtttcattgtgtttgtgatgaatttttgtgatgaaggtggctggtttctgggtttggaacccaagtgccgcggcaaggtctgagcatgccgcagcccgcc

SEQ ID NO: 101361 - DNA, 1324 bp, Cannabis sativa
gggacgttacagtagcagttaccctttcctcttcctctataaataatttgtttttcaagtgggattatagcatccactagtgttccatcaagtgcacaaattgcccctgcaataaattaataagtttaaatatttataacaaatattttataataaaataatgttttagagaaacaataccttaaaaaaatttctgatatttttttgagcagttggaatattgaaatcaagatcaattgagggtattatcatctcttttgcaaagtgcatcattgattcaagaacctcgtgaaaatacttgtgaacaatttgtgaagaatgttgaaatcttcgttttatgacaataaatcgctcattatgtgctatgatagttaaaaacattgctatcttttcttcaactgatacatgcttactatttttaatctattctctttgtctaaagtggttgcacaaaagaacaaatgcatcacgagacatctgcatcaactctatgcattgccgatttgagccatataataactccaaagtgtatctttcacttgatagagttgatgtattatctttaactctaggtaaatagttgtgtttatgacatacataccagtaaatgatcattaagagtaaaagttgatcttcaaaatccatataaaatctgttaagaaaattatagccactttagaggaacataaataatactaggactaaaaatgaaacattcataggttattgtaatagatcaataaacttcagtacacaaaattaaaaaagtatgacataatgtaataaataaaaagttatctaagcataactataacttaatcaactaaattaaaaatatcccaatttttttcccatagccttaacccaattctccattatggtgatgtctttcatgttcatccatgcttttctatagctatcgccttcacaaagtataccaatagttcaactatacaaaggctcctcctatccaagtccttctaatttttccatgcagtcctcaacttcaggaccattatttttttttaattaacaactccaatgcaacaaacatcttatcatcaatatcttgttgagatgagagctttcttttcttttttttttcctcctaaaggatttgaatattgagatggagaagtgttcacaacatcatcattttggttactaggtgcactttcttcagcaaaagcatctgtgtccatattaagagatgtagatgaggtaacaagttgaggaattgaacaactaggacttcaaccataaactgttagagatattattacaatgaaagataaaccaagatatatacaactcaattgtaaaa

SEQ ID NO: 101362 - DNA, 610 bp, Cannabis sativa
tctctctctctctctctcaagattgtttttcttaatttgtttaaataaataaataaataatttatcaattcttctattacaatattttaattaattttcgtgctcaaaaatacatgtcgagacattttttttttccatatatagtggtatttattatagttcaatatgtaacttttaaaaaattttaaatagtttaccgtgttgaaaatggatttaaaattttctgaataggcttggtaagctagaatatcaggaaatttatttttggcactgtaaattatttagaattacttcaaaattttattgggataatattgcaactataacgaatatcgatatgaaaaaacttgaaaaagaaatactctactatgtgatttcagacgtaaagattaattaataggttgtaataggaggttattattagtactttttattttttaaagataatgaatgtaaaagttattcttttttttttttgaaatgagtgtaaaagttattcttagtgttaccaatgtgattagctacattttattttcatgagcaaattaattgcacaaaatgtatttttttttggttattctcactaaccaatgtttttgataggaaggtt

SEQ ID NO: 101363 - DNA, 856 bp, Cannabis sativa
  modified_base (495)..(496): a, c, t, g, unknown or other
caagagaggatctctcaagcggaccaggacgagcttatccagactccctcgcatgatgaaattaggaaaaccctatttgatataagcaatcataaggcgctatggccggacgggatgtctgtgcttttcttcaagcattattgaaagtctgttggtgatgatttttgtgaagcagattctgatttatttgtgaatggctatatgcataagggcataaacgctacaaatattgttctcattccaaaaatcaagaacccgaagagaccgaatcactttaggcctatatccctttgtaacgtgttgtataaggttatatccaaaattgtggccaataggattaaacccatattacccagcgtcattttccctaatcaagctgcttttgtcccgggtaggaatattcaggataacaatgtcattgcacaagaaataatccactcgtttaacaggaaacgaggcaaagaggggttttttgcaataaaaattgatcttgtnnaaagcctatgataggttaagctggatatttattgatcatgttctcacgaattatggttttcctcagaaattctgcagttgggtgtctcagtgtataactaccactactctcaatatatgccttaatgggggtcaggttggcaagattattccttcctacggtctgcggcagggtgacccgctatcaccctacctatttatctgtgctgctaaagttttatctaggcttttggaagaggctcttggtttgggcactataaagggtattagatagagtagatgtggtccggttttatcccatattttctttgcagatgaccttatcttggtgggtagggccaatctgaatgaggcaaaaggt

SEQ ID NO: 101364 - DNA, 1212 bp, Cannabis sativa
  modified_base (790)..(792): a, c, t, g, unknown or other
actagggattacattaacctagaaaacagggaagcacccaactaaggcactgaaatggaccagaattgagaaaatgggttgttcggggaacctgccgaaaccgattaactggttttacaggtgctggtaaaccggttaatcagtttataccagtctcccccaaaaaacccaaatcttgctcaaaaattgtccaattaccaccaaactttttagagtacctaaatagggtatacacaatatattccaaccagaaaatcccataaaaactcactgaattcaaacatgccattagagacctaagtttgagtttcaaagctcaaactttctcaattctatcacgatacgtcaaaactaatatcccgatcttaaaatcaacataaataaggctcacaattagaatcaaacacaaatcaaacctaacagcccctatcattcaaaatcacaaattcaaacaaacaccaaagcttaaaaaactaagaacaattgacctaggaattacctccacttgatttccccttgaattccttgctgaaaataccagaaatcagcagtcaacccccttgcttatggctggttcgaagagagagagaagggaaagagaggttgtattatttttggtgttttcttgattttctcaaaatgaaaaaggattttctaactaatcctttgttgaaaataaaaaggctaggtgtcaacacctaaggcagccaccactcactcccttggcaaaagactaaaatgcccttacagcctaaacttaggctaatttaagcttaggggtaaaatggtnnnaaaccataaccccgctcaaactcggtaccctattttctccaatacacatgcaactaagaaataaggttctaaacttacccatgtgattaaactagccatccatcgcattttccattgtcgccgagcaaaaattataaaaataacataatgcatatataatctaaataatacacctagagtttaataaaatctctggaattgagaaattgtaactctaatgcccatttctaacaatgggacccacaattaaatgaattcacaaataattataaaaataccaataattagtgctaattatcttttcaaatccatattatgaaatgcgttcattacaattatcccctcattaaaaggatttcgtcctcgaaatctaacctgaatagctgtgaatattgtgtcctcatgtcagactctaactcc

SEQ ID NO: 101365 - DNA, 717 bp, Cannabis sativa
ttttgctcacaaaacgacaacacgagaagacccatggtacaatggtggagactagaaaccacacgcgtcaacctcatccccccaagatccccagaatccaagggacgaagaggcggcttcgcgagtaaacgtagatatagaagaacaagacagaacaaatgatgaggaatacgaagaaaacaaaaaagaatatgatgcctatgatgatggcagttacactgaactactagccttaaggcaaaaggcggccaatcacaaggccgagctggcagcacagaaagaaaaaaataagaaaatgtaagggataatagtcgccatgtaaaaagccatagagacaacgggaatccacgtgcatccaaaggctatgcctccgggactaggtgaaacacaagaagagtctttgccaagtacccaaagacgtaaaaataatgctaaatttgctaatatgtgagaagagaaaggaacaaaaaagaaagaagaaagatttgtattaaaataattaaataaagtaacacaacatcatattgtcgactcatttaaacaagagaaaacatttttattataatgcaagttttctttaggcaatatattcttaattctcatagttcctataaaatgcaaattaacaaaaatggattagatatggagacattttgtacaaccactactagcactactcacaacactaatatttctatattcatttaacccaaaaaa

SEQ ID NO: 101366 - DNA, 989 bp, Cannabis sativa
  modified_base (400)..(419): a, c, t, g, unknown or other
agtcgacagactcagtaagaaaagcataacataaaacatagaaacatctcgggttataactaggtgcccatacacccgatcataaccctatcctcgtgtcccacacggtcttgagtctataacgttcatacgaaaatactatcgaccataatgtcagcctatatttaatatgctagtcatactctagccttattgatgtgacagcgtcgatcaatatttcagtcaacatatatttattagtaatcattgcaattctaagtatactattactgctatcaatgtattctaaaaggaaatactaacatgtatgctaaacatgtaataatatatgcatgaaattatactaatcttaccttgattctgaattcagctatgccggccaacctgagtagaacaactnnnnnnnnnnnnnnnnnnnnctaaatcacatcgataacaacacgaataagtggcacgctaaatcacaaccggcgacttaggttttaaccaaaaacctatctactgtaacttaacatggaaataccctaaactagcagggaattaaccaaccaaatctctaaaactagcatgaatcgacaacacaaatttttcggggaacccagcagcaaatccgggtaaccggtttacaagtcctgtaaaaccggttagccggtttataccagaaatcctaaaaattccaaaacctaactaaatcaattctaaactttgccaaaacttccagacctgcatattataccccaatagacatattccaagcaataaaataactacccaatctcagaatcgaaaaaacccattaaagagccaagcttgagttctaaaactcaaagcttgctcagacaacaaacgagctatcaaaacatgatcaaatcaacatatctaaacataaacaaacctcagaaaacaatatcaagcactaatagcaacaatagtagctaaaatcacaacttcatgcaaaatctattttcttacaattcaagaaactaagg

SEQ ID NO: 101367 - DNA, 1016 bp, Cannabis sativa
accgccccatgtataacgtttcgaaacctgttcaaaacactatgctataaaatttaaaggcttatacaaatcgaataaatttccttaaagataaagaactgtctacttttgagaggcttgcaaactgttgccctcacccttctatcttctgaaaagataatagcccctaagccaactgaacttgtattatttaatactgttgcatcaaccataagtattgtacgtctctgttcttcttgaggatctctaggtagaatttcttaattatttctatttctttgaagagtaaagctactaaccttggctccatcacgagcagatacaacagtttcataataactgtcaatccaattaacaatctgttgtggttgtcctaattgttgaccatgagtaattttgggaaaccgttttttttttaaataagatttagctaccatttttaagtatttgataaaatgcagggttcataaatatatatttttaaaataagtagtctatagaagaattaagttaaaatacaacaaccaaaatgatataacttttttttaagtgaatatttgtatatgcacataacatggatctaggacacaagcaatggttgacccttatagtcaaccatcgtatcttagtgtataataataaattaggtcatagggaattgaaaacaagagggattggactagattaagtttatcaattttatattaataagggttaggtttgtgttgtgtgagatgaacttgttgattttataatatatttttgttagtgataataagtagcaagtgatagggacacgcacatatacatacattaatacatacatttaaaaatattaatgcataacatgcagttaatttatatattaactcatcacatacaagacaataacgaccacattagcttaccaatatattttaccaaacatgttagttaattattagtgtgatcttacttggttggttgtactcttagcaatccaagaataactaaatagatcttgatgttttgtcaaa

SEQ ID NO: 101368 - DNA, 544 bp, Cannabis sativa
gtacgaggcagcattcaaattactcctcgtgggggggctccaattgtatctcacatgttctttgcagatgacagctatatttttcgcagagtcaatgagagagaagctaccaatgtcctatccctgctgaatgtttttgagcaagcttcaggccaaaagataaatcatgacaagtcatctatcttttttagtaggaatactgatgtccaaactagagatgccatctgtattgatatgggaattcatgaggctgatgaaaatggtacttatctaggccttccaaacataataggtaggaaaaagtcagcaattctgaggtttttgaaggaaaaggtgcagaagaggattcaatcttgggatgggaaactattatcaaaggctggcaaagagatcttgctgaaaactattgcccgagctcttcctgactacacaatgagcgttttttttgttaccaattgaaacaagcagagaaatacaacgtgctatgtgcaaatactggtggagttcttcatccaaaaaggataaaaatatccattggatgagt

SEQ ID NO: 101369 - DNA, 660 bp, Cannabis sativa
attattgagtactgaaacattaaaggagatactatcaataaaaattaactcacatgtacaaagaaggaaagacttttccctgaaccggtcttcatcgtgccgagaatgacagtgttgcccaaatctctaccgaaaccaggtgtcccatcaaattctcgcctagatctccgtcaagatgctccgtccggcatcaagcaaagagaaacaattagagagggacactgcgaggagggagacagagtgttagaaatccaaatctaggggtttttaagggttgcgaacctcgtggtgaagtttgtttaagtcacaaatgattagagtgtcttcgttcaactctaagaagagagaagtcgagaaagagatgatgagagagagagtgaagaacgcgaaggagaaccaacactggggttctcaaatgctcgcaatactggtgccatagtcccgagctgaaacttcatcattttgttaggggttgccaatgaccagggccgccctgagggtagaggagctaggcgtacgccttaggccgtcgaacgctcagggcctcgaaattgtaaaaaaaattattaatatataaataaatattaaataagaagaaaatagaacaaatattatttggtgcagtggtaaagggtcttaagagtcaaggatcaatcccca

SEQ ID NO: 101370 - DNA, 505 bp, Cannabis sativa
taatttttaaaaattattttgaacttcatttttttaaatattgggatgtatttataattttgtaaggtgtaaatagaactccgcttaaattttttagttataatattataatcaaaactttatgaatataattatactagacgtacgtctttcacaaaatattagaaaataaattatttttcttaaaaaaccaatcacgaaaaattaatgcatatataataatatatctttttgtttttcttcctcttcattttttttttaattttattgtttatattttacttattttcatttctttatatacatattaaattataaattaatacctatacatatcacgaatttaagaatattatatagacacgagtatttcttttcttatgtactgttattaataaataacataaatatattttctaaaaaaaaatagattatatgtaaatatgtacacattaattttggatatattatatactgaatttgcactaaaaataatcatcaataa

SEQ ID NO: 101371 - DNA, 830 bp, Cannabis sativa
ctattctttattgattcattcatgacaaaagttgatatggagatactttgtgatcttaatttagattgtgtattttgcctttggagaatacttaatttctcttcttttttaatctgacaaataataaaaatttatttgcggtattacatctacgataatgaatatttttctttttttttttttttaaaaaaaaaacaatgaaataaaataaacaataatttatattaattttttaaaaataaataaaaacaattagtcgatcggtctaggtacataatcttaatttagtacaatccactacaagaaatgacacttttaccagcatagtttcctattgcgctggaagtaacttttaccagggtatttcgcaaactccgttggcaaaaaggtcaaagttttaccagcgcacatagtggttaaaatctaacttttaccagcgcatttacgtgctaggaaaagtcatttttgccagcgcttttcattttgtactggaaaaagtttttaataccaacgttgatttgtcaacccttttgccaacacatcataagtaaattttattttaccaacgcaatgcaaacttttaccaacacaaaaatgtgctggcaaaaatgacatttcttgtagtgatccaaatcgttagaattatttactatttggacatataaatatatatatctatatattcagggttggccctgaggtgagacgaaggaggcggctgccttaggcccctgccgctcaggcctccattttgaaaaaaaaaaatttaggtgatgaatggttagacatgaaatgatttcatttgagaattggagttggatttgttgaag

SEQ ID NO: 101372 - DNA, 1130 bp, Cannabis sativa
atgatgttcgtactcttctcttaccttgaaataatgttgagttgtgttatatcaaacgatctgcaaacaagctggctcatgttttagcgagggattcttgtttctctccaggtcgtgtgcttcaattggagaatcgttccaacgaagtgcgttatattattattagcaattgctagttaataaagttgctaagtttatttaaaaaaaatgaatcattttttaaatcacttaaatagttttaaaattttaatttattgtttaattttcataatcattcaaagtaattttttctaaagatctaaattattttttttaagatttaaaaaaaatatatatattgaatctttttcatttttattttgaggagtacaattttataattgtcaaagtttagggtgctaagttattaatttacaaagacacgtcagcatttaaacagattaatcatacgaaatctaagagaatgattaaatcactcttattgtaaaagttcagaaaaaattgttttattttaatattacgcgcgagtgaaaacgtcttttttgtatttgcttattttgattaaactcttaaaggttacaaaacgtgactcaaatatttgaaagttagttagggtagcttttaccgacttttggaaacaagtagtacaactttactgaaatggattattgcttaggtttcatgcttaacgttacctcaagctatatgacgacacatatatacagtacacagccacttgtatctactcaacgtgactccaaagctctctctctctctctctaattattctattaaacacaccaaactgctctcaccttcacctcaatcacacaaatctcttcattatgaataataccatcaataccaactctcattcatcttcctcttcccttgaccagattcacatacaaaagcccccaatttcgacaaccaactcaatcgccattgatgaatcacttcaaacttccattcaaaatcttctcaagaattggcgaaggaggcaacagtggaagaagaagctcttcttcatcacccaatccaaccagataaacccggcaccatggcgaaagaagctgaccgatttcctcgaatccaaaaagattcgttatatctccatttttcttatcctc

SEQ ID NO: 101373 - DNA, 784 bp, Cannabis sativa
acctcaaatgaagatatcatagttaaagttttcacctattacaataataagagaatgtacatgttatattattgtttttgggtaagacatgtactttattagtcaaagtagattcaaataattgaacaattacctcccattcttattccatattaatttcatttgactcgtgagaaaactaatttgagtaaaattcttgaattgatttttaacttgaagctatttaatttatttatagatgatctctcgggcattggccaaactgtcgtatacgcatcgttatggacgaggcctccgttttctgagttcaatttcttcaagcaacaatagtaccatatgggatccaactgtggcacttaaattcagtcacccaactcttatttctcttgagaaatgtagttcaagcaatcaattcaagcaaattctagctcaaataatgaggattgggctcattggacagacctttcccatgagcagactcctcttattttcagccatttcccacccagagaatttggacatggcaatcctacttttcaatcactgtactcctcatcccaacctttacatttataataccatgatttcggctttatctttctccaaagttcagtccttttctatgtacaactccatgctccatttgggtatttaccctgataaaaacaccttcctttatttacttaaagcttccctatgtgtatcggaggtgaagcaggtacattgtcatgccattgtattaggctttggctcatatgggtacttgaaaaactccctcatgaag

SEQ ID NO: 101374 - DNA, 647 bp, Cannabis sativa
cacataattaatactatttataacaaattccttattttgtgcaatttgataaaaaaggaaattgtgctagccttctaggaacacgttgtttgctctttcagaaacacggtattcagactgcttctgggttcgagtggtccttggcgaaagctctcttgagagaggagggaagataccttcctaacaggtcctgccaaacttgggcttggcccaagttatcttctctgggcccagtagtgggctttggatgctgacctggagtccatgtgtcccttaccaaaaatgcgaataacatttacccccaaactttcagaatgttccgtattgtggaagcttgccacaatccatatgagtagacacgtggaggttttaaagtaatattcttattaaatttcaaatgctaattgattgtggaagatgaactttcatcttcagctttgggaagtaaacatggcagtcatataaaggtggaggagtgcctaaattgaagagttactttctaggaaagcttttattttgacggctacttattattggcgcgaaaattaaaaaaattattttcatcattgatctgtacctcgattccaaggagcattaaatgcttgacatgcctggctactggactttggagcctttggatatgtttg

SEQ ID NO: 101375 - DNA, 1584 bp, Cannabis sativa
ttgaccgtgccgaaggcttcatcagctcgaagaagccattcaacgagtagaaggtgagcaaaagcctggcaagtcaaaggctccttctactggaacatctgcccaacttcccatgacccaaataattcaagctcaagtggtaaatgctccaacaacaaccacaagcaagggaatgggaagaaaggaaaatttgccggcaaaattgaacaagctccccgcgaaaatcaagtcaagtacactggagtcactaacttgactgaagatatagaacgtgtttacatggcaactcagtcgctggccccttataaaaaacccggacccatgaagaaagatgtcagcaagagggacaagacaaagttttgtcggttccacagagactacatccacgacactaatgaatgcaacaacttgaaacaggaaatttgattcctgataaggaaaaacaacccacacctgaaaatgtatgtcaagaccgatcagggtcaaaggaacgacaataaccaagatttgctacccccaccattagatgggcatctgcaagttatcgtttgaggcccgcatattgctgaagattcgggcgaagcttggagaggtatgcccgaacaacacaacatgagcaagaagaagttatcctagtcttgtaagaaatgaagcccaaagttccacgagcagaagagacgaccataaccttcaacgatgaagacgctgtcaaaattaaatttctgcacaatgacccgttggtcgtggaagtacagatagccaacaaaatggtggctagaaccatgatcgacaatggagcctcttccaacatcttatttaaaattgcttatgaaaagatgggactccaactcaaggatctaaccccatgtctccagcctgtctatggtttctcaggtcaaggagtcgcacctctaggacaaattcgtctacccctcactgttggacaagctccgacgagcatgactattatggaagagttccttcaacttttaacgtaatgctaggtcggacgaccttgtatgacttaaaggctatcacatcaatattccactcatgcttgaagtttccaacaaagaatggggtagggatcctaagaggaaaccaacagtctgctggggaatgttacaaccttgcagtggccaaggctaagaaggaagtatcctccaggcagagcacagacaagggaaaaaacatttccaaatagggaacttcccaaggcggggatgaacatatggatcctcgactaggggacccaagcagtaatgttggacctgtggaagagtttaaagagatcgagatcgatccagatatcctgaccagaatgctaaagattggaaaaggtttgttgctcgaagtaaaattagaattgataaaatttttgagagcaaacttagataatttttcctggtcacatgcagatatggttggaattgatccttctatcatttcacatgttctgaatattgatcctaacttccggccataccaacaaaaacgaaggttgttggacaaagaacgagcagtagccctgaaggaagaagttgaaaagctacgcaacaacaactttataattgaagctttcta

SEQ ID NO: 101376 - DNA, 714 bp, Cannabis sativa
gagagagagagagagagagtgctccaaacaatatactttatttcgtaaatcattaaggtacgcaagagcattaggagggagttcttttagttcagtaatgggattcatgttgcgtgcaaagtgaggaggtgaactgtggccttcagaagacataaggaaaaaaaaagcagaaaaagatgttgcatggaaagaatgaagattgatgcatggaaatgaatgaaattgtggtaatttataggcagatgagcttacttcccatgcctacacgtagtaaaaattgaagaggtgagtaatcataatgaacagtaaaaagatgagtatgatgcatgagagtgaaaagattgatcaataatcatctttgagccataaaagattggtgtgatgcatggaagtgaaagaagagcatgatgatccatggacagggggaacaccaaccctccacgcagtaaaaaaaaataaaataaatagaaaggtgagtgatgaactttgaacagtaacaaaaaaaaattatctgtgtgaagaaaaaaaaacattgaccatttctttcttaaacacagacaagggggctaatgttgatgagtaaaaaaaaatagaaaagattgtgtaaataaataaaataataacagtaaagggagcaaaatagtaaatagatgtgtataaaataaaaatatatatgaataatagccgcacaaaacctgagacgaatgtatacct

SEQ ID NO: 101377 - DNA, 820 bp, Cannabis sativa
gggtggacctctcgtccattatcagtagttatggtataatgtcgatgtccccatatacctctgagaatgacatatctaaaatgcatgacttgtatcattagggtgtagagggtgagggtatacccctaggccaaccctttaggaggtaaggggtagtagaatatacccgctagactaacttggcatgtgggtgcgtggtgattattcattccgcttacaaaggtgttagcccgtcatttttcttctcggagacccccaccttactcaagctaggggtaagggtgactgtctgactttcattctacggtcagaccacccttcatgattaacgatcatgactttacatatttttcattaatttagtctcgatatttttgtgccacgtgttgctactcttgacacgtcatcgtcgttaaaatttgggtaaacactatcaaattttttcaaatcgaatttggcattctccatctctcctgattgatcaccaaaatcttgaattcaagaatcaccttcaaacaattgaaacacaaaacttcaaacactacaacaaacttaattaatatcgccggtattattactggcggaatatacccacctctacaaataagggtattatcagcagaataggctatccgtcgataataactaataaataaatatttttttttaattaaaatgcattaataacggtggataggtattaataccggtagaaatcccatccctaaaaaagagggctggaattttaccgcacaaatatttgaacttacaatatttgcccattttattcctctccgcccccttcaccatcttcaacccc

SEQ ID NO: 101378 - DNA, 761 bp, Cannabis sativa
  modified_base (46)..(53): a, c, t, g, unknown or other
aaaaataccatataaattggccaaacttaaatgtgccatatttatnnnnnnnncttttaaaatcccatactaagtgtaatttcctcttaacaaaaagactctaattttatttttcaaaaatataaatatgtatttttactataatttattaaaaaatataactatttaagatactaccgttatattttattaagaaaaaaaagcccaattatatttcaaaatactatcttttaaatttgtaccactatatatataaaaaaaaaaacaaaaaaacataatttttttcatacaaaaaagccaaattagatcttttgcttcaaagactccaattggcttaagacgagcctgtaaaacatcaaaccaaactcgtccaatatggcgttggttttttagatacaggttcgaattttagggccggccaaggacgataaaaaaaattatattaaataatatacaattatataatataatatgtttaatgtgtttgtaatatatattagggatattttacaacgaaactctcataatcttttcaattgctacacatatgatctcaattagaaaaagtagtggcagaattccctttacttatcatgattttgttgcacctagaaacttaacagccaaaaaggctagctgcaacaaattcatatgtaaaaaaattttgtcgctattttttttgttggggtcatatgtgtaacaattgaaaatattaaaagggtttcaccataaataaatctatatattatacattattaaaa

SEQ ID NO: 101379 - DNA, 1456 bp, Cannabis sativa
ctatttgaggcgaaataataaattttgtacgactagaaaagtgatttaggcatttttttttttttggatcaattgtgccttttaagtcatcactataattttatcctagttaccattttttagccttaacctatcatttctttctacacattttgagcctagaaaagataaacccatggatatcttaaatttaaccctaattgtaccataagtagatttttagtttgggggaatttggatgggaagtttgttgtgtgtgtgtgagaataagtgtgaaaattgagagaatatgaaaaaaaaaaatgattggcaacaacttgagaaaaaaaaaaagaaagaaaaatctgacaaccagtgtcaaattcagaaaaaaaaaaatcaatataaagttattacaatcttgtgacaaaattctatcatgtaattagaaagaaaaaaaaaaggtattgggattgtgtgaaaaatatttttggggtgacatattggagaagcttatggtataagcaagcctaaatgactatttcaactacccttacctaagcttaacactacaagtctagaaagatcttctgattcttggttgtgcattactttatattagtggaaaataataagtattgcaagcatatagaattttaggttagtggattgatgactgtaattggcatgcataaagtggttcaattgttagttaattgcattctatggtttcgtgagctgaatgaaaataaattaaagtgtgtcaagagcgtaattgaactgaaattctagattgtatggataagtgaagtttttcataatcatgttattgagtctacttgaaaattactcatgttccggagattgacttgtttaacttttgcttttcgttttagtgttttactcgaggtcgagtaaatgttttttgttaggttatttttagtattaattttagtgtatttttaatttaattttactcgtgcttggagaaattttatgcttgttatcttttatttttacagatataaaatagaaaaagaataaaaaatatcaatggaaaaagataaaaaaaataaaaaaaataaaagattgcataaaatatcactgtgcaaactcaggatcctacctaggaaaaaaagattgcacgccttgaaaatgtgggggaattgaacacgggccgcggcccaggaatgggcattctgcgacccgtattatgaaaaagcagcatcctcgtgtgaacaatgcacacaggttgcgggacgataaaggcatgtcgcggcctgcccctattctgaagcagaaacatattgtttttctcaacgtgggcttattgtgatggcctaattcaaagctgaataggatttctagcatgtgtatttttttttatctttttagtccctcaatggctatataaggagctatataaggagtgaacttcaattgatttgggggagcaattcagaaggaaatcaaaggc

SEQ ID NO: 101380 - DNA, 529 bp, Cannabis sativa
  modified_base (345)..(349): a, c, t, g, unknown or other
cataacaatctcatacacgactcaataaaatgcagggtagggtatctctacattcaacgaccttaccacgtatcatatcccactatggtctctcactttacctaagacgttagcctaaaacatacaacatactacatacaaatacaacatacaacatatacaagtcataacaactataatctatatatatcaatttacaaattcatattgtgtctataccacacattctcagtaccacatgcatattcataataacaaatcataaatcatattccaataaataaagaattcaaatttatgcatattaacacataaaaaactacataatttccttacctcaaatcnnnnngcttaagacttgttatctcgtcactactacctataataagacatgggtcaaggccctaacattagaatttgtactcttacagtacaacagaaagaacactatttttgaccaacaactacacgaattcagtcaaagttgtcttcataaaaatttcaagaaagaggttttgatcatcatact

SEQ ID NO: 101381 - DNA, 1459 bp, Cannabis sativa
ccttctcaatcatccttttcttaggaagctgttcaaaagtatcgttgccatccttcaatgcaatcttcaagtgataaaatgtatttttccacaataactttccccaccaaaccgattaaacacttcaataaaatcatccccatcaaccatagcaaatataaatgtcaatctttttgccttgaggataaccatacaaatacccagaaaagaagtatacaagagctatcttcacataatcttcatcatctttcaatgcaccgctgaagaaaacactagcaactttcctcacagtaaccttcacagtaagcccatgcatacaaaaaatatcctccttgtaaccaagtaacttctttgatttgaacagatcaacatcataggatttcttacaatccaaaccggttattagggaaaactcttcaattccaaaatgcacaaccttgtttcccaatttgaaccagagctcaacatcatccctttcagtgtgaatctgcagcaaaagaacgagataaatgagttgtatttgatagttgaagttactcacatcaagaaattagccaaaaggagactttcgaaacaactccttcttaaagattctcattgatatcatggatgacattgtaaggattgtaaagttgaggtttcccagcaaacctcttcttaacatcaattttaaaataatattcctgtgagagaaaaaagaatataaacaatagaaattaaaattacacaacaaaaaaaataaaatattgaaaaactggttaaccaaaacaaaaagaaaaactaaaaacttaaaataaaaacatagagattatagaaaccagattcaaataaaattgtaaacagaaaacctgaaaataaggaaaataatagagcaagaaaccgatttctttagaaaataaaaattaccaatggagcatcaacagcaggagtctcgctcttcttcttgccatgggatttgaaaactggtttctttttaactttcttagcaacattagccagtttctcatcatcagcaacattagattcacacactttatcctaaaaaacataaaacacaatacaattaaaggaaaatgaaaaaaaaactattaaaataaacaaatagataatatatatatacaactaaaaaataaacatttgttcaacaaatacaatacacaaaacaaccaaaaattataagaaaaaaagaagacataccaaattagattcctccaccgtgtccttagttttactttttttgacgcactagcgtcatcactaacagccttccttttcttggttgaaacaacttccgccacaaccttctgagtatgaaaaccatcatcacagtctgcttgaaggacattagtagccttcttagtgactttgttactacggtgtttgtgagaaacagaatctgcaacatcacctttaacttcttgattatcaacctgaaaaaataaacaaaaacaaaaacaaa

SEQ ID NO: 101382 - DNA, 641 bp, Cannabis sativa
catgcttttagagcttacagaaggcgtggtcatacggtcctcacatgcacacgttgtccttatgattgtacctttccgcttcattctccccgtacttgggagagctttactatgttgagccacattgtcatggatgtcctgtgttgagtgagaagttcatgcatgtcaagtgacttgaggatgcatgcatgttaggtgacttgagaatgcatgcatgctgagtgacctcaaggatgcattctagtcgagtaacttaaggatgcatgcatgttgagtgacttgaggatgcatgcatgcctagtgacttaaggatgcatgcatggcgagtgaacttaaggatgcatgctagtcgagtgacctgaaggatgcatgctagcagagtgacttgaggatgtatgcatgccgagtgacttaaggatgcatgcatgctgactgacctcaaggatgcatgctagccgagtgacttcaggatgcatgcatgtcgagtgacctcatagatgcatgcatgctgagtgatctcaaggatgcatgctagttgagtgacatttgtgagaagcatggtcaagtaattttgagcatgcatggccaagtgacattgagcatgcatgtcaagtgattcttgagcatgcatgtcgagtgac

SEQ ID NO: 101383 - DNA, 695 bp, Cannabis sativa
gggcataaaacccaacaaatccatgcttctttgatggtttgcaagagtttctctgtgcacactcaacacttgtcttgcataaataagcctatgcaagatcatgaagaatagaataatgtccttgcggttggatgagattctactttggaaaatatctcccctttgcaaaaagaaaatttttaacttaaaatccttcaaagactaaaaaattcttgatcttgaagaaaaaagaaccaaaattttagaactagaggaagctttaaaagcaaaggatgaagaaaagaagaaagccctcgatgatcatgttaaagaggcacacaaaaaggtaaaagagattgcctagttgtctcttttccagagtttagcaaaagaataaaaccatgaacacatcattcttagagccacatgtcgaggagagcattaaaattttcaacgagatggaagtagaataggaggtcaagctagctaaaaaacttgcccaagagatagaagccaagggtgatggtgaaccagaagtcattatctctaagtctcctcaaaaggagggttagtttttattttattttgtcattttaagaaattggtcttcgatcgaagacagtttacttggtcattttcactattttttttattgtgtaatgaattgcacttctttggatgaccaactggtctatttatatatgaatattttaact

SEQ ID NO: 101384 - DNA, 541 bp, Cannabis sativa
  modified_base (500)..(515): a, c, t, g, unknown or other
tttaattaaaaattcagattctacacaaaattctacttaaatttgacttttgtttcaatgaaaaatgattttttaatcaaaagatatgaagaaaacaagtttcgtgctcaggggtatgcgatgcatacccctgcgagcgcggaagcaagggaatggccgagatagtaggctgaatgcagcctacttgaccgagggagctcgacgtgacacggcttcagacagcctgtgtctaagtttcctcggttaggctgtctgaaaacgcgtggaaatgtcggcggtccctaggtgcgcgcgcgtgtatgtgctcaacttgagatattttcatccaaattcaaaaaataataactaattcataaaaaatccaaattaggttctgtaaaagccaaaattcatttatttttcatctacttttcatataaaatattttcagatcgaaataaaaaatacttttacagcatatactgtgatttctaaactatcatcaaataagcacataaacnnnnnnnnnnnnnnnnaatcaacacataacatcgttttaatt

SEQ ID NO: 101385 - DNA, 841 bp, Cannabis sativa
cttagacattcagaaattaagaaaaaataaaatatatcacagtaattttaaaagtatatatatatatacaatttaatttctttcgtaataaacatgtattaatcattttttttaattattttataaattctaatctaaaaataaaattaatttataattatataaaattagggttaatactcgaaatgagctcatataagtttatttgcttttaaaccgttaagtctgtcttagtagtgttgttagtaaaattatttattgaaccaacacatcagcaagattctacagattctaaccaacttggataagttggttatgacagttaggatagtttgcaaaaccgttttaattgtattttcttgctttgatgtaacatcttgatttctgttattagcttcttgttgtaaggtctcttactattactcagtataaataaaaggtccaaagctcaacattattaagttgagcaattccatctttccatcgatcatttttctctccattattccattactgctctctctctttctcttctctgtttctggtcaatttctctggtttacaagtctttacatggtatcagagccatggcaaccgatcgaccagaagctccagaaaatctgctaccaaatggagctgcaccagctgctttacccaacaacaacctgctcccattgaatctaagacttgatcgatcaaactaccctctgtggagatccttagtccttgctgcagttcgtgcttacaatcttgatggccacctgcttggaacaaaccctcaaccacaacgcagtcttgcaggtaatgccccacacctagcttttcaacaatggattcgtct

SEQ ID NO: 101386 - DNA, 633 bp, Cannabis sativa
tactgtggtgactgaatatttccagcagctctttacaaatgaagatgtcgactttagggctgttattgattgtgtccatcctcaaattacagctgaccagaaggaaaaactgattgagtttattccagcagaggagattaaacaagctttatttcagatgcatcctgaaaaaatctccaggacctgatggtatgacacccgacttctatcaaaaattctggcatattgtgggtgatgatattgttagtttggtaaggaatttctttactactggtcagtttccaaacaagcttaatgaaactaatattgtcttaatccccaagaaaaagttgcctgagcacatgagtgagcttcgtccaatctctttatgaaatgttttgtacaaagttatctctaaggttcttgcgaataggttgaaggttgctttgccgagtgtgatttctaataatcaaagcgcttttttacctggtcgcttgatctccgataacataatggtctcctatgagataatgcattatttgaagagaaaaaggatggaaaaggaatgagttatggcgttaaaacttgacatgagtaaagcgtatgatcgagtaggttggttgttttttggaggctatgttgattcgtatggga

SEQ ID NO: 101387 - DNA, 500 bp, Cannabis sativa
  modified_base (258)..(259): a, c, t, g, unknown or other
tgttggtgttgattcagtctagagttgggtacttgcatgtccttctgttgtgtccttttcttctacatttgatgcatttattttgtgtttttgtctcccaaattggtcttgttcttttctttttcagtcttctcgctttcaccctttcaagtggtggcaatatttcaatatctttgatttcttgcggaatattccaattgcgttgatttcctactagtatacggttgcttcataggttttgtaacgccctaaataatnnggcacgctacccaaaatacttatggaaccctgatcccctaatcgggattactaatcaaaatagcgaataatttaaacttttaaattaaacagaatgaaaataaaacttgtaatacatttaaacttttaaacggttgggaccccaaaaatgtttataaattttattacaagtcatttttctttctagccgacctaggcggcaaaacagaattcaaaagttcaacactgatagacccttaacc

SEQ ID NO: 101388 - DNA, 557 bp, Cannabis sativa
agatgaacagtacgaaatggggtactgagatttatgtgaagatatttaaaactgtaaaaagaataaataatattacaaaaacattttatttttttttaaaaaaaaagaaataaaactgtcactaaaagtgacatcccacgtcaacatcaaaccttttatataaaatagattttaaaaattgatatggtttaaccctgagaagtgaaaagacacgtagaagtgtaaaaaatgacaaaaaaagattttaataaaaggtagtatactgtcatataaaagttttaaaaatatacaatataaacgtaatttatactgcatggcagtataaaagtaaaaaaagggaaaatgtcaatattctatgtaattttcccaattaaattcagtgttattacctatagactaggaagggagatggagagagatatctcaatagagagaagcaaattcttatagcctgggagatatagttgttgttgttagtaaatttgaaaactaagttagtaaatgtctatttttaaaaaaattaagaaaatggcaaaatataatgaattagctaataa

SEQ ID NO: 101389 - DNA, 684 bp, Cannabis sativa
ataatgtcatttctaggttctacataagattaaatcatttcttttatttgcaagaacttgtatactcaaaaatataataaactttaatgttacatcgttctttaactttgtgaatcaagggtgcaaaatagctaaacaagtgtatgggtgattcttaaaaccttcgtttcttttactactgactacaccttgatttacttctttttaatatttattatcaaatcaaaaaatcacaaactcattagtcactattatcgttattaattaaccttttgtttctatttttctactaacgtttttgtccataatcacctccctgtggaatcgaccgcccgatctatactacaaccaccgctagtggaagtcacattttgtgcgttacaatcagtggttaaatgttacaaaccgtaaagttcaggtggtttagccgctaatatcccttttaataatgtctctctttaattcttacaaaatatataaaaaaaaattatagtatttatatagtatagagaaaaattaaaaaagttaatgtatgatgtaatgtaaaagtaaagaaaaaaaaataggattttggtgaagtatttttgaaaggctaattagaatttttgccctctgaactttgacatgtaccaaattatgccccctgaacttttaaggtcgttaaaaatgcctcatgaactattg

SEQ ID NO: 101390 - DNA, 916 bp, Cannabis sativa
tgtcatactaaaatagaatatttggtaataattaaccatttagaaagatgaagaagagaaaaaaagaaatgataaaagaaagtgacacatagaagcacaattataatataattataaaatttggaatgtggaatacatctaattaaaaaatagaaattatttttaggaacaagtttataatccacttttaatgtatgtacaattaatttatgagtgactctattgcaccaaagctaagctttaaattgaagggtcaataatgacataaaacttaaagttttaagtttataaatagcataactcaatgtttatttttagtggtataaatactcaatatttgtaaaattttaatttttttataatttcgtcagtacagtctctaggggtgttcatcaaaccgcttaaaccgtacaaaccgcccgcactgcaccacaccgcataaaaaatacagtttaaaattttttgcagtgcgattgcagtttgcatttttaccaaaatcgtacggtgcggtgcgatttacaattttgaatttaataattacggttcaagacctaagtcccagagccccaaacctccatcagacttgtgccaatacaatttctcacaagtacatcattggagtttcttcttgttctcattaccacccccactaaagacgtgcacaacctataaatctcctggattaaagaaacggaaagcataaaaagattcatagaatatgtggggatagaatggataatttatttaataagaacttccatgccaccctgcgagaaggaacgagacttccaagtagaaagtctattccttatcctattaaggagagactgaaaaagacccttcttagtttgacctacgtagcaagggagactaagataatttccataacaagcaaccaaagtgacaccaagaatgg

SEQ ID NO: 101391 - DNA, 563 bp, Cannabis sativa
atagaagatttaccaaaacacccttttagggggtgcatagtagacttacccaataccattttagatgttttgtaaaaaattataaaatttagactttatattttgttgattagaattcagactttgtatttttcaagataggacaaaataaaatttaatgataatttatttgtgaggtgttacattttaattatcgaaaattaggcttaaaataatatcttgtctcattttggatatgatatttacataattttgtaattttttttttaatagaaggtgaaaacttcattagtttataataaccaaatcaacaattatagaagaatgtacaacattaagaatattgttgacattaaacatacaatctgaccaagaacaagaacaagaaccgcgagcaaaacaatgagcggttttattagcagatcgcgtaacaaaagaaacaaaaatattaaccagacaatctaaaaaacttttacaatctgaaatcaatagaccaaaaacagatgctaaagataaagaactttggatagcctggagtgcaacaagtgaattcgattcaacga

SEQ ID NO: 101392 - DNA, 742 bp, Cannabis sativa
ttctgcttctgcagacgcatactgttttatattttcttatatatatttgacatttgcaaaaacacgattttttacactacttactaattcataccctacttacccttttttctcatttggcatatccacaaattttctctcttccactctagttatggaccaagcccagcaaactctaaccctagaaatttgaatattaatttgtcgtcgatcatactattgtgacggtcttcttctcaaactcacaccgcaagtaccgaccttcctttgttgcttcttctttgctaataacagcttcatcagttacaaggtaaatttctctatccgttgttcttagactaacaggtttgagttttgtaatcttaagtttgaaagtggaaattattttgcttgtttttatctaattccatgctttatgaaacaaattaatggacgagatttctactcttacaagtcttattatccatattattgaatattattcaaagaaggaccttggttatttatttcctactactatatttgattcttggctatttaacttagttacttatttcagtttcttaattttggattatagatttttaacaagttgtaactaatcatttagtatgtttttctatcatccaaaattttacttcatattttttgaggattatgtttcaaatcgacatcgttgtgtattgtttctaattttgatctgttagaataaaatatattttctactttattggcggtgaag

SEQ ID NO: 101393 - DNA, 582 bp, Cannabis sativa
tacccataacataattggtcacttaattttgtatcacactttataatagcatatacattatacatatgtgcccacataggatttttaatccaacaattttatgctaatttgatgagaaatatcataaagagtgtttcttactctttcagccaatctagacctaattttgcttatttaaattaatgaacaactcttctctttaaacaaaacaaaaaagaagaagaaatttaacattagaattatttaaaaataaaaacaaaaaaaaatcataaaaagcatcttatgagaaaaacaaatataaaaaagtaaaccccacaaatgaccccacttaatatgttgttatttaaggcaatatccattaacatacttaagagaagataagatatgatgactttagatgacttaataaataataatatttatgtacataataaactttcaaaaatattaaaaaaaagcatcattactacttagtacaagtataagatatcatatattgaattattccaaatattttaatttaatatttgaataactactaaccactcataaatcatcactagttcttctttctctttctaa

SEQ ID NO: 101394 - DNA, 566 bp, Cannabis sativa
tacgtggcttggcacgtaacaatcacctagtatttatatatatatatatatggacaagactataataggatatagcataaattttctatcggtgggaagcttttttaaccattaattttaaattgattggtaattattatataaagtatacattcttataataaattgtcatgtattgaattaaagatttatatattattataaaaataaaattaattatatatatattaaaaataaaataaaataatataaatattaattagtccaaaatattaagcttacatctatatctctctttttattgatatttctttctctcccttcccaaccgcactcactctcattcattctctctggcttaatctttgcccaaccaaaacagtagtagagttcgatccttgtttaagtgtgttcaaataataatgacagttttttaattttgttattttctttctctatgaagaaatttggtaaaatgatttgaacctcgaatctgaaaatggagaattaatattttaacttggtggactggaggaatgaccgagtcccaaatgatttattacttc

SEQ ID NO: 101395 - DNA, 711 bp, Cannabis sativa
tagctcaatcttttcagccaaagtaaacaaaattatgcgaaatttgtatatatgaaatttattcagacttacaaaacctttccattcttattttggtctgcattttcttttttcctgaatatctcaaaaacagaaacttatatagaagaaatgttaacctgcgttgtgacccaaactctgcaagatgatgataacgatgcgatcaatgagcttcgtcttcatcagattagggcggaacaatggttgttcgtaatagaaaaggaattgaatagaatagaagatcgtagtgtctgtccgccattgacgtacatttctctttacctctatttctcatccagcgttcgttaatcttccctcccataattctataatcgtcgttttctctagtttcacagccacgccacagattattggtgttaaaagacatttctcctagttaaattacaatcatatctcctttttctgtcattttgtgggagttctatcgcaccttataagattataaaaaaaacccatccaaatacatattcacacaaaatatatgccaaaataaaagcaagtaaacacattcatgtatttaatgaacatgggtacaaagaaaaagaccttcaattgcttccctggggtattgaaacccaatccaacgctcttccagaaacgattccctccctttccaggtctcttccgcttggaagatttcttggagcttag

SEQ ID NO: 101396 - DNA, 528 bp, Cannabis sativa
tttttttttcctagctcctttctgtatagttttgagatcattgctttaaaccattaaaattactcttttttctcctgggaaaagcttggatggattttttaaaaaattgacctttttctgaaagaataataataataatagaagacacaattagtgcttctctgcttttcctttttcctgaaacgcattattaatgttttgtttgtttgggcatgggagtttatatatatggtaggtgtaacttttacccatatggctaggatttgtctctgttctatacaatattactgaattaatctacttttgtactatctatatataatatatatatttatatatgagtatatattgtatgtgcatgctgtgatcaaattaaattgaccagtgttaattgtcactgtagagattactggtttggttttgtcatcatatttacaaataggttttatcaattttgttttcattgtatttaatttttacttgccattattgcttttaataacaaatagtgaaaagagatgatgaaca

SEQ ID NO: 101397 - DNA, 967 bp, Cannabis sativa
tgaaggttctaaaactgaatttcgaagatctctaaaactatagatgaagtcgactaaaatgcacaagaaataagtaaaggacagtgagctgcttgcaatttacagaagagcttgagggttcaaacaaaatgaaaataacaaaatagatgctctattttgaatttatacccaattaataattactatatcatcaaaggaaataagatttaacggatggaaacattgtaaaatgagaaccgttagagcattaaatgctaatgatgtgcctcgaagttctgaactgccaaaagctcaatgcatacaatttttaaaaaataggttaatacgattatacacctacaatcatttaaaaaattctttttaattaaaaagtactttttaaggggcaactgttataccaaaaatttgactatttaccagaagctgacacgtgtcctacaaaaggaatgtgaatcaaccatgataatataataatgatgtatcattaaatctaatttaaataactcatctcaattaagtataaggttgatagataatgttcaaacttgttggctgcttagtcttatgcgagacaagaataataactattaaactagtattggcgagacatatatctgtctcaggataaactcacttacatacaaaggaagaggaaactctcttgccaagtagattaatatagcaacacacaactgctttgcattacacatagcaagaagatcaccttgcattacaaataccagtaaagggatacgacgagatgaattattttccaacactcaacgtgttttcctattaagatgacaaggagaactcacatctgatgagatacaaccttccaaatcaacaataaccgtctaaaggataaaagtaaagagcaattacgtagttattagatattatcccatgtgtgattatgaaatatgaaaattgtccacgtttcattagcagttataaatgaatcaat

SEQ ID NO: 101398 - DNA, 785 bp, Cannabis sativa
gctcttggcctcattgttgattgagctgagtttagataaaatacattgttcaatataaatagtatgcaaatattggtattctctcctcaactccaaattacatcttcaagcaaaacaactccattatcaacctttcatgtatgtcgttcttcacaagtttgctacaactaattggaaatcgacttctcacactgcaaccatctcctttgatatggcctcattcttgtacaaggttggaactgggcatgatattaatttgaccacaattatttatgatcaaattattagtttttgagaaggtaataagaaaaatttaagtctttcttttcctcaagttatttacaaaattttaagtatgcagaaaagtgatatcaagacaaatcaagaagatttggtggtttcttctactgttgcttcttatatgtcatctaccataaatctttatgttgttgaagcatcatcatccaagaaatccaagcctcaatctcttgtttttgctttggatgacattcctacaaaagctcctgttcaaactgcttacaggattgtctttacagaactctctactattcgagcaccacttgattccttgattgctcgagtgatgacttttgagggactccaacgctccgttcttgatgctgtcaaagccttgtctaaggtcccaaaagcttagtctcttttgtcttttattttttgtctctaatcctaacaacattgatatttttattttgtcttagcttaggcatatttgtttctttttattttttggctgctttgaaaga

SEQ ID NO: 101399 - DNA, 503 bp, Cannabis sativa
tgttcatgcaatcatacatcagctaaagcagttcttttcactcaaaactctcagttctattaactattttctcagtttcgaaatcactcaggggcctatggaatccatctctctcaagcaaagtacacgactgatttactcaaaagaaccaacatgctgcactgcaagccaagaccaacaccaatctctcaaggtgtcaagttaagcattgataatagcaaaccatttgatcaatcattgttttatcgaagtgttattgatggcctgtaatatctcactcttagccgacccgatattgcgttcacatgtcaacaaattaaatcagtttatgcacaaatcaactcaacgtcactggaacatttgcaaaaggctattaggatacctaaagggcacaatcagccaatgcctcatctttaaatcatctcaccaatggtccattgaatgttttagtgacgctgattaggtttgctccatcgacgataggaaatccactaccagttact

SEQ ID NO: 101400 - DNA, 950 bp, Cannabis sativa
ataataccgacttgcatctaggcacccatacacctatccacaaggcttaacagataagtaagaatgttcgttactagggtacatccactgtatcacatacactatgtaccattactatacgagtgttggtaggattgtttcgtacctcgagtaccactaagtgatgtaccacacacaccgcgtacctttccgtactagtgctagtaacaccgtaacatactttttaaacattgtacactatacaaatgcactctgtacctggtagtgtacgaatcacaacaagcatgcatatatatcacacatacatacattcacatttatataatatgttctacgctattcttaccttatttttgaattcaagtgagttggccgacttgaacgaaaaaccacgtgctagatggatgccctctacttgatttcttgttgaattccaaaaaatggtgagggtttgctggtttctttctggtcttggtggtggtcgagcaaaggaaatagagaaagaaagggattttcttgattttttttttcttagtttcctctaaatgaataaagtctaatttcaatattcagcttaagacactaaatggccagctgtaaagctccaagatagccaccaacacccataatccaaatgaccaaaatgcccttgttccttaaacttaagccattttaagcctaggagtaaaatggtccaaaaccacaaccccgcttaaacccggtattctatttatctcaaatatttatcacattaagaaaaaggttctagacttacccatgtgactcaaacgcccatccatcacatttttcgtcaccgccgagcaaaaatcataaaaattacataatgcatatttaacttaaataatactcttagagtttaataaaatctccagaattaagaaattacaactgtaatgcccattttaaataatgggacccacaatataata

SEQ ID NO: 101401 - DNA, 882 bp, Cannabis sativa
  modified_base (412)..(417): a, c, t, g, unknown or other
  modified_base (709)..(709): a, c, t, g, unknown or other
  modified_base (823)..(824): a, c, t, g, unknown or other
ttttgaacatatagtcatgattatattccattgtgctgacgatattataatcatgaacagatatatgttctggacttaatagaatatgtacattaaacataatcatgatttactaaacccaacatagcaatctataagtgttttatttagggcacaaaacccaacatagactgctactagataattattcagcctgtggaaaaatttatacagtttttggcgttatcccagtaatggattaaatggattaactacaactactagtgttactagtgttacttcctgactaacacagatatagtttccaaataataaagaatctagtaccccccaagtggaagtaaacacatatatagaaaagaatttcacaatatcaaagattttgtaattaaggagatgtaatggtggagannnnnngtattgaatacaacctgtcagatttattacaaagataatactacatactgcacttgatttgaacatcaaagtgttgagattagttgaaatgcacttttggttttataattagtgcaagtgagagtttttttgggattttataccctaaattaaactctaatataatcagatttgctaattaataaaagatcaaaaatcattttatcttgcatggttcacataatttttttcatgattaaatgtttaatgtataaattctattaaatccagaacatataattattcatgattntagtgttgtcaacacagtagaatataattatgattatatgtttcaaagtttatgacccatgatttgtctgtacacttgattacatgataatcagtgataaagtttacttacacnntggataagtgttatgtcctttctagggcattggtaaagtatgctagtattggatgtat

SEQ ID NO: 101402 - DNA, 870 bp, Cannabis sativa
tatatatatatatatatctatctcatcttctcttcttggatatctcttctttgtacctgccattaacaaattttaatcttttaaagcttttggaaacttttaattctcgtgttagtttgcaatctctttggtatattgatcctcatgacagatttagaatgtataatgtgtgactttttgattcaaaatattcgattttggctttggctatgcttcttgactctttgagtcataaagaatacgaggctcatattcgagttttgaaagaaaaacacacataaggattcaaaacttaccttggctggcctaggaggtcttgcttgagacctggccggccctaaggcttaattatgggagttggccagctttagggttttaccctataaagctagcttgttaatgcctgggtttggtggccctggctagttcttggctgagtcatgggaccttgagtaccttggtcggcatgggccttagttccacttgggtagccaattttctatcctcttgtgactttggtaagaatttggctttgtaggcatatacaaccttagcctcatatgtggtttccttagaaactttgtatgaagcttaatggtgagtctattatagtcgaatgttcaacttaatactgtaaggaactgtgccttagccgtagccaagtatgtggcccctataagagatctgtcaagttcttttcaggctatgtggttctagcaaggccttgacctcatgcatgcgaaccgatttcatatccgaccttaaagttttcatgttcttgctttggcctataggccctctatttttgaacactactattatttagctttaaagccatctataacggacatatgattgtcttggctgtct

SEQ ID NO: 101403 - DNA, 1123 bp, Cannabis sativa
  modified_base (136)..(138): a, c, t, g, unknown or other
tttttagaactcatccaggtccaattcacaattatacacattggatgttggatttctccaaccgatccaatccaatattgcaggctcaatcgaaccgatccaataaaataatggattggatcggttccatccaatnnntgaatccctgtattggatcggatccatccaatacttttgatccaatattttttagaccggattggatccatccaatattaattggattgattggatccatccaatccaatccaagagtaaaacctaatttttcacctaaacggccaatatattagttcaaaatattataacccaacataaatccaacctaattgtaacataagtccaatataaatccaacctaaattgtaacataagtccaacataaatccatcctaaattgtaacataagtctaacatcaagttataatacgtgttacataaacaagagtatacaaattatgaatatcatagaatccttcatcagtccaaactcgaaagtgacaatgtcactcaattctgaacaatattacaacccaatataaatccaacctaattgtaatacaagtccaacataaatccaacctaaattgtaaaataagtccaacataaatccatcctaattgtaacataagtctaacatcaagttataataatacatgttacataaacaagagtatacaaattatgaatatcatagaacccttcatgagtccaaacttgaaagtgacaatgtcactcaatttttaacaaatacttttttaaagtttgttaatactactctcactttattattattttttttttcttaaaagaaaaaaaatgatactaaagattaccaccaagatgaacgatttttcagttttttatcaataatgcttttttttttaaagctatacagttaatatgaatttaaaatcataataaaattggtaaaattggggtggaagtgagaatagcatatgatttggaaggtggtcaactctgaaacaaagaaatggacaaaaatgttgtgatttttgtatagtgctaatttgaaatttaaaataaaacattcagactttgttgaatcgttattttgtctatgctccggtccaatcaaattcagtacaccctcattgttttt

SEQ ID NO: 101404 - DNA, 930 bp, Cannabis sativa
cttaaaaactgcctctaaagggggtttttgtagtagtgaccatctatagaggatcaatgattgttttgattgaaacaatagataaattataacgtatatatacttggtgtatggagcgttctatctaatcaggagtgcaattctaaatctatagtggagtcaggaggaattaatgagttaggaaatttacttgataaattttaagatctactattaggagcttgattacataggcctaaggtctcacattgtctgagataatatcatttcgtagattaaactaattgatttaataagccaattagaatttaaatataaactatgtcttatttgagaatttttaccaagtttggaaaatttttagaagaaactagatatagagaattatttgttaattatgattctttgtgggtctaattaataagtatatttaaatattattttatttgataattattaaaataaaattagtatttaaataattagatgagataattggtaaaattaaaaaggatactttagtttcattagttgaaataaagtgggaaaaagctacaaaatagccctaaatttgaaaagtaagttaataaatgtctcttttttaaaaacaaattaagaaaataaccaaatataataaattagttaagaaaaattatagaaatacatttactacctattatttttttgaaaaaatatataataattaaattaagttatataattttttagtattatattttattatattgtaacaaaaacgaataaatatataatattattaaatatatataacattatttgatataacgtatcactacaaattaatgtatcgtagtaataaatttatgtaccacaaaaaaattacaacaatactaaattaatattcaaaaaaatatatatcatgccaaaaaaattatatatatcactatt

SEQ ID NO: 101405 - DNA, 635 bp, Cannabis sativa
atttgaaaatgaaaaaatgagaatagcatagcatgacatgagaatggtttcttagtgtgaaagatatctttgttattacaggtataattttttcttgtattttattttgattttaggatttttgtttgagaaaatttgttcttagcttttattaggtttttggatttaatttttcaaattggttttgggtttaatatctgaaatgagattttgttgcttaatttcaaaaacaaattagtgggttttgagtatgctagtgatttttgtcattggttgattcaattggttttgtggcagaggattattttttagctaagatttatctatatgcattgttttctatgtgaacttatcataactaagcatggttcacgacatggtctggcatagctgtatatacttgtggagacgcctactttgcttgctattttatggagacactttctatacttgtgttgttataatctaatctattaattctgacaaatttgatagcatatattatttagaggccactatatacattattctagttagcaatacattttacctaaattcatcattacaatgaccgctgttttcccactagattccaattctgcattgttataaaatgagctggtttgttaatttgt

SEQ ID NO: 101406 - DNA, 886 bp, Cannabis sativa
aaaagaacttttgaaggggcaattattatacccgaaattcggctgccatctcagtggaggacactgtcaagataaagggaatatggattgacgcaatcgctttttatggaatacctcattaattacataagtatctgagtatatttataacctgctgactgtaaagtcttaggcaaggaaccaatatacaaactgatgcttagcatattagcgagaaaccatatgtcgctgaatgggaatagcgaggcatcaaggacagtacacattgtaagacgaaagctacacatatcaattgcgaaagcccttagtgtataaactaagtgtaacatttggatcggatcaaaaccaagtaagtgaggtgcccatctcgctatgggaatgcttcctataactccatccagttacgtcagcgaggcttacaaccctgacgagccaaaagctaacattcaaatgagctttgaaggattctttgtaaataagaaccgcattgttcgcaagacatgattcgtcgatcttggaaggaaaaatggccccagctcgctattgagatcactggaacaaggcttctgtcaagacatctccagatatgacaattaaagacgtgtttaaaacaagataactttaacccagtaaaagcgggaaaatcacagctatatgattttcaaattataactgcatttacactacgtgacatgtaatcaaactccgtgattttaggtgatgattgttgtaaacatattacagtcaactttgtaattaactgcccactatgtaattataaatagtggcaaataagatcaaaaaggggaaagaaactcatacaggatcggccttcaaaaataattagaaatctaaataagatttactcgtggactatgcagaattt

SEQ ID NO: 101407 - DNA, 671 bp, Cannabis sativa
aaaagtatattgtactacatagtgttgtatgtaatgcaattagtattgttatgaattgattaatattgagatacagttaatattgttacataatgattagattgattggttgagtatagataatgtgatgatattatgcatgttatatatggacttacctaattaggtgatgcaatttccctggggacgtaccaggcataggtataggcatcagtgatatatgatgagtatcgagtgtaggtacgggctcacctgattaggtgatgcaattttcctggcaacgttcctaggcgtaggtacatacgtcagtgatatgtgatgagtaacgagcataggtacaggctcacctgattaggtgatgtgattttcctagcgacatatcgagggtagctacgggcgtcggtgatatgaaaacgcctggttatggcatagatcgaaaccattattgggtttctacctagcgatgtattaggtgtaggtacgggcgtcggtgacatatgataagtaccgggcgtaggtacgatctcgtctgattagacgatgcgatatattggtgtcatgttgtggcacgagctcacctgattaggtgttgcgattatgtaatatatgggtgcaggtttttggcacaagctcacctgattaggtgatgcagttatgcaatatatgggtgc

SEQ ID NO: 101408 - DNA, 627 bp, Cannabis sativa
aacttggtctttgttccagattatggcatttcagactgtccacaaagtgtataccagaccaacaatggaggcagcataagtttgctttcgaaacttactcattttggctcttcctatccacctaattaatctaggcagagcagtagcagaagcatgccattgcagctactctttcactgcactcaagcattctgcagcaactaaataatcaaataacagatgggagcttgtttcttcggcttgacagtagagaacacattgtgtgtcaccagtaattcccattcttactaatctatcctttgttttaagtcgtccttgaattgcaatccatgtgatgaagctatctttgggggtgtttaacctccccaaacatgttgactccagctcatcttttctagattcggcctcagcaattggtagcctttggcaacgtgataaggttggagagcagacaactgacctgtacaaatatctctgaactgttctttcagcaaaacaagccttctccaatatcaactcccttggataaggggcttgtagtgccaccaattttcatctcggatatacacacaatggatccatttcatccaaagactatcttccttgtttgaaatggcccaaatatat

SEQ ID NO: 101409 - DNA, 724 bp, Cannabis sativa
attttgttttcttgtagcttttgcgaatcacgagacttcgattgcatggacttgcgtggtgtttaaaattgagctctgcaatctgtaattccatttgtccattgctaaatttgtttattaattcgtacctataaattttgtttgttgttaagaattagtgcagtaggttagaaaaatttgcttgttactagcaaatttttggttccaagtgaaaatttcaattattttcaaagctcgagctcattttaattgccagtcttaatcaaatttcttcaagcagaattaagttttcgtagtgacttctctaattctgatcaaattttgtaatttgagctaatcttcttacagaaaattgtgaagtgcaatggtttagactttatacttagttcatcactcgtcactggagaaattgaggaaatctatgcatggaaaagcaaggatttcaggaaaaagcctcaaaatgccacttaaaatagtgtttgtttttttttttttaatttttttttaaagggtacttaaaatagtgttaaaacacttattttctaacagaaatcgagggtaaattttgtaatttccagttggattgtaagtgatgcttaaattgttaaaatttaaaatggaaaaagaagtggaagatttagggttgtcagcaaaggttgtctcaaatttggactgtattttgtttttttatatgctagagtataatattgttacataatcttaa

SEQ ID NO: 101410 - DNA, 547 bp, Cannabis sativa
tatataatggtgattgtgaccaaagaactgattaattaattatttggactagccctctatcctaatccgtctcttcaaccacccataattgttaaagttcatttattgaaattatataatattttacttaataatttaagcatgatatatatgcaaattaataacagtatttctgtgcattcaaataaaatttatggaatcagagagagtgatgtagaaagaaacaaattaatacttaattaatttatgtctcgcactcgcagcgcagcgctgtccgatcgatttaattagccatacagatttggtttacctcttccccacttcccatgcacacgtccgcatcgtacgtattcctccaacatcaatgtattgtataccaccacccctttacgtagttatgtaataaattaaatataaatttagttctgtgatttaaaaattgttcacccatctcttagttaaattataatttagaatataatatttgtcaaaataaagtatgataataccgtgagtacaatgataattaaggttttttttttttttt

SEQ ID NO: 101411 - DNA, 666 bp, Cannabis sativa
aagagcaagggcctgtggcaactagtggtgtttatataatctacaatttgtggttccgaaccccaatcaatccagactaaactatttgcgatcggactaaataaatttggtgtgaatgatttgattaatctggaccgttttaaattctctggttcggtcacagttttaaaaatttcggtagcggttcaaaccaaaccaatccgcataattattatatatatttaatatatttttttttttggacaaaatattaatatttgagaacaagtttagatagaatattaatattgagtttattttattaggataataattttttattgttatttatatattataaacttattaaaagtaaaaaaataccgaaaaaataaataattattgtaaaaaaaaaaataaaacaactacaaaatacaaatcatagttcgaaccaaatcaatccgttgttgagtggtttagtttgattatttaattggtttggttggttttaaatttttaaaaaactgtaatattggttttgtttgaaaaaattgaaaattcaaatcaaactaatatgtgaacacctctagcagcaaataaatataaaaagattattaatcttacgagaaaatacacatttaattgagaaaaggatcaaagtcgggtagtagagtttttttttttttt

SEQ ID NO: 101412 - DNA, 652 bp, Cannabis sativa
atctttattataatgaaaaataaaaacacagttttcactacaaaaatccatctgcgatcataaattttaggggtgtattcgaaggttctctacagggtagatgtgatccaatataatacgactgagctattttatcctggggacgatcaacaaattctgactgcttacaaattcctggacagtgacgcgaacgtcttaaagagagcgatctagtctgcgactcaactcgaatttttcattcggtaatatcgttcctcttttatttttgctaccaatttactcaataattttaagacattcattctgctatgactactaccgatgacttttctagttctactgctgacattaacaaaccttttcattttgatagtttgtactttaaatgttggagacagaagatatttttttttttaccatgaaaaaagttgcattttcactttaaaccaattttgtgtgaatgggtgaggactcactcacttgacccaccacacacacgcgcgccgtccgctcgagctggattgattggttggtatcgtttttacagaaaaataattatttttattttttaatttaattgagaaacatatttaattgaaactgattacttagttgtatcagttaatgggacacgttcaactaattacacccc

SEQ ID NO: 101413 - DNA, 795 bp, Cannabis sativa
gtgaagcaatcagacatttgtctctcaaagcaagtatggaaagaacttggggaaaaacttttgtcttgagaatgccaaacataccaatactcccatgagcacaacattgaaataaaataaagatgaacaagcagcaaaggtagatcaaactttgtatcgaagtatgataggaagtttcctttatctcactgctagtcgacctgacatttgttatagtgttggtgtttgtgcacgatattagggaaatcccatggaatctcatctttctgctttgaaaaaaatcattcaatctttaaatagcactgttgatttttggatttggttttccaaacacactaactctaatcttgtttgttttagtgatgcttattgggcatgtaaggcatatgatagaaaaagcactagtggtggatgtttctatcttggaaacaatcttgtttcatggcatagcaagaaacaaaacaaaatctctctgtcctctggagaggctgagtatattgctacgggtagttgctatacccaattgttatggacgaaacaaatgatggcagattatgtgtttgatttgaaaactttaactattttctatgataatactagtgctataaacatttcaaaaaatcctgttcaacactctcgcacaaagcacatagacatctgtcatcactttattagagagtttgtagaaaataaaactcttgtcttagaatatgttgaaactagcaagcaaatagctgataattttacgaaagctcttgagtcggtccgttttatctctctaaggaaatccttagg

SEQ ID NO: 101414 - DNA, 929 bp, Cannabis sativa
tgttaccagctatgaccatttgaagatctttagatgtgtggctaatgctcacatcaaacaaggaaagcttgatcctagagctaaaaaatgtttttttttctaggataccctgaaggagtaaaaggttataaaatgtggagcatagaggaaggaaatcatcaaactaatttcatcagtagagatgttatgcttgatgaaacaccatgtacaaggatctttcaaaagaaaatggttcacacatagctattaataagatcaaagagagagttcatattgaggtggagcaaactgagaagcttcagatggtagatgacacttttgaacaagaagctaaacaggtaattaatgaacaaactagtgaagaatctgggaatgatgatgagcatcatgattaccaattaaccagagatagggaaaggagaaatatcataccaccaaacaggtttggatatgatgattcaatcttctatgctctaaatatatcagaacttgatggtgagggacctggatcttatgaagaagctatggtatccatttacaagctagaatggaactcaacaatagagtaagaaatggtatccttaaggaggaatggcacatgaatagtagtaaagaaagaagtatggtgtaaggtgataagctgtaaatgggtatacaagtacaaagaaggtattcctagaattgaggaagcaagattcaaggccagattagtagctagaacattcacacagagagagggaattgattacaatgaagttttttctcctgttatgaaacacacctccatcagattacttttaagcattttagctattgaggttcttgagttagaataactagatgtcaaaaccgcttttcttcatggagatttcaaagaggaaatctacatgaggcagccaaaaggttttgaagaaaagggaaaggaagac

SEQ ID NO: 101415 - DNA, 560 bp, Cannabis sativa
ggaaggagagaagcatagagtcatagagctgcatttagccaaataaagaaaagaaagagcaatacaaaagtaatgggacaccaaggatgatacttgtaatatggttttgagcacatattatataaattcatatacatccaacacactaagtcctgcacttggtatgtgaagagaaaccaaacttaccatcttagacatattcacactctaagaagttaagatcgaactataactgctatgctacccaaaataataatgtaactttcaaggcaccataaatttacataacaagaaatacaaaatcttattttcaaaaataaaaaacatcaaagtggactctaaaagtaacaacaatagtatgatgtcgtcacaaactcaggcagatgaacaatcagctacaaataaaaatacccttttaggcaaattaaaaaaaaaaaagtctgtttatatcttcttctttttttttttttcaaaacttctaacaacgtttacattttcattttaatagctaacatcaccaccataatcatagtagtgataaccatatagtgatgaaaact

SEQ ID NO: 101416 - DNA, 1276 bp, Cannabis sativa
aaaacaaaaagcaaaattaaaatcagcaaaactagattaaaagacatggaataatttaaccaagtcttaagcaagaagtcacttacgtattatgcggaaggtggttgtgccattggagaaagactagtcatccagaagaattcatccttaaaaggggttttatttggcaaacctacaatgatcttacgatcacctgtgtgagtcccaagatagtaaaaaccccctgctgcattctttctcgtaggaacaaccttgacagagtaaagatactctattttcaagggagtggggcactcctagttcaaaattttgtacagaatcttcaagcttgtgagaattctgtataaaatgggattcaactggaatggggcaattcctagatgatttaggaagttcttgtagtagtcacgcagggggataatggctccagccttgatgtgtttgaggctccaagcgcctatccctgtcgagccactcgtactggccttgccactagtcccctcagatgcttcgcgaataagtcattctggtgggtaacagttgaactcgccaacagccaccgatctaacccgacattctcacttatatttaataccacaagtccttaggatatgacctacataatctctgatggcttgcaccttcgactctattagttcagcctcgaaggtgatgttaggatcctaacgagtctttgattttcgaggcttggatgtcataatttcaaagtccaggtcacctagtttaaaagcaattgtgactctgtgtaaaaaataaaggcctagccagaggaattgacgataaattagaggatcaggccaagcagcatctcgcaagaaacaacatttgccttctgtaatttcttgcaagaagcgtctgtggcaattggcaatgtcatcttgatgggtttttaccaagtgttccctaatttttgcatcatttatctctaatttagatttgggtcctgaaattctggatttatatgggttggcaagtttagtgggacattctgtttctaaatattttggacgtctgaaccagatttgaacattgctgcaaagagaaagcaatcccaaatcctggatgaaatttatcaaaccaaaagttggtaaatttgagaaacccaaaaatctgcactgcctaaaccctaacatttacccagaaacaattcaatcctaaagttgctaaaaccaaatgagggggcaaaggtgttaactaagaaactagtgatcaaacctagaaacgcaaaatcaaaagcatgtaagaaaataaagag

SEQ ID NO: 101417 - DNA, 730 bp, Cannabis sativa
  modified_base (461)..(464): a, c, t, g, unknown or other
gggagaaggaactgcatggtgttgtgtgcggcgtatctcggtaggtgtagcatcaggactcgggtgcagcctcctgcgtgtctgaacgtgtgcattgccatgtctttagatacgattcgcttaggcatccgcgcgcgtatcaccttgtccgagtgactggtgtgcgtgcgattgagccatgtgcatccggatttcaaaaccacataactttctcaatttttatcagaatcgagttccataaaaacgaaaattgattgattaatttttttcacaattcacaaggacaaggaatcgaatctaaataaattattttcagaatgaaaataaaattattttcttggaaaaattttgtaattcagacacattcgtcaaataacacataaaataacatgaacacatctaaatcaacacataaacaatattcatcgttttaaatccatattacatgaaagtaaatcatnnnnatggctctgaggccaattgttgggaatattttactaggatctagatttagtaacaaatatgttgaattaatatcctaaatatgaatatctctaaaacaatgaaattaaacacataatggtttaagaaaaccttacattggttgcagtggaaaataatgactccttccgattagatttctaatccttgtttttttttatcgcagagtattatcaagatctaatcctggatctctttctctccttcagatttggttaccattgtctta

SEQ ID NO: 101418 - DNA, 705 bp, Cannabis sativa
attcaacttaattatttctaataaaagagtagagcttaaaattatctatttaacacttaaataaaaaaaaaatcaaacttaagaatgtaccaatagctctatatgtctaatttattaaacttgaaacatacactctcgttagaaatactaatataacaactaaactcgttttttccataacatactctattgcagtcacaattctttttttgagaacacttctcttaaactcttgatttataaaaataagtacaacctatcaaaatcaaactaaattatgtaatatagctacaccttgaatcatttctttaaattttccagaaaatatcccattgatcgaaccctacttacaaaattctaagacatatccttctaaacacaaaggaaaatctagttacactaaatttgtacacacaagatgtaacgtagcataaaacatgtaaaactaccatgaacatatttactcaaacttacagtacagtgagtcgagctcgtctcgtggcaatgaactttacatgttagggctaaccacattctttaagattgtattgctgtgataccatatttaacgttcccgcttcaagcctcccatggtccttacacccgcaaaataatagctcttatacacgagtacgtcactcaggttgctttctggactgatgactgaccctacagaccaatacgagtatttttagcgtgctttgt

SEQ ID NO: 101419 - DNA, 1535 bp, Cannabis sativa
  modified_base (217)..(217): a, c, t, g, unknown or other
aagcttcccaagacatgtacaatcttcatcagagaaagctcggttcacaattcagtaagctcgtacttgtgtagtaatatatgtgattatttaagtacgataagaagcatattagattataattatttgttttaagtgtgttgcctttaagtccataggagaggtattaaattttatgatcgatgtctaacaagcctggcttatgggttcgcaggcnaagtcctataaaatggacgcccagtggaatacgagaagtcagggtaatatggttgagaccggaggtggtcagggaaaccagattccccagaatccctttggtcgcagtcgtggtcgtggcagagcttagggtggttatcctgtaaatcaaccacaagttcctccggattgggagcagaggtttgcgaaaatgcaagatcgaatccgccaaaaagatgaagaaatttagagattaaggcagcagggtcttcctgtcgtgcctcttcagcaagctcaggctgtagcagttccagtggtgccagcagatcaacctgttgctgccaaccgtatggagctgttatatgaaaggtttcgtaagaaagcacctccagtgtttctaggaagtccagatgtgatgaaggctgagtagtggctcatagttattgagcgaattttgaattttatgggggtgattggaaatgatcgggtgacctgcaccacatttcaattccaagaggacgatctcgtgtggtgggagttgataatcctcactcggtaaatcactgttatgatctgggaagaattctgagagttgttcaactccaaatattacaatgaagttgtctgcagtgctaagcggaaagagttcactgaactagtacaaattgaggggatgtcagttactgaatatactactaagttcgatcgtctagccgagctcgccgttggtattgtgccaactgattttagtaagaaagaaaaatacttggcgggttcgaatgtgaagattagacatgatttggtaagaactaccaatgaagcaaccacttatgctgaaatggttgaaaaagctttgagagccgagggtgctgtgaaattccttcaggagccccgagtgactctgaatgttggttgaacccccacttttcttaatcctgcttatggtagggatggtggtgattccaccacggatcagaagaggaaagttaccccggtatctggtggctcaaggcacagtaagcggttttgtgggaaccaaggcagaggtggacgctagggttattcttaccctgagtgcccacgttgtaagaaacatcatccgggagagtgcaaccagaagacatgctttctgtgcgacatggtggggcatttcaagaaagattgccctcaggcaaagaaagaagagccgaaagcagaggtaaaaccagtacctgctcgggtgtttgctatcaaccaagctgaggctgcagctagtccttctgtcgtgacaggttagcttcttgtcaacaactccttatttatagtattatttgattcgagagctacacactcatatgtgg

SEQ ID NO: 101420 - DNA, 511 bp, Cannabis sativa
gacaagccaccaaactagtagcatgcgttgacctctgtctctttccagcatggtacatccatcccatgcgcgtatgcaaaccagcccacgaatgactacctgtgtcatctcgtgtggagactcgtagccaaggcgcaccacaacgtctcttggaggtttagaaaatttggctcatgctatatgttgtaccaaatttggcacgacttttagtaagtgctaaatttagaccactttatacaccaccattgaagtccacttttatgaagatgagctaaaatatgcatacacactacacttttaggtctccattatatatccttattcactttaattagattttttttttcaattatacataactctgtaaattttttttacttgttgcacaccatttaggtgtattttattttgtttgtaccaattattaatattttgtcatttgtttttcaaatcccacattttttccccttctcaaaaaatctatcttatttttttactccattttttcttt

SEQ ID NO: 101421 - DNA, 702 bp, Cannabis sativa
  modified_base (655)..(676): a, c, t, g, unknown or other
cacagatactaaacccattaactatgatcaccaacaatataggctaacacaacaaattaactatccaattaacccaaagtttaataaaactaataaataatataaatccaaataaaaaatctaatattttattcttatatttctttctctatatttaatattattttataatatatataaatatatttagtggttttttttttcatttatatatatcatttgctttgtttttttgatcgtagatttattttttcatacttgaatgccaatgtttattctctgtacgtaatacttgtacagatcttttaacataattataattaattaattctgtaagaaaaatagtttatattaattaattagctacacagatcgatcgaacagtgtggataagtacagaaaccgcttttaattgtttggatatatgctttcaaattatagacttgccaaccaaactatattcatatgtgtcctcaattattattggccacccaatgaattatacataacccccatccatgaatctccctaaatttcattaataacaacaacatttaaaaaatattggaaaattctacaatacacccctttaaaatagatatattaatgcatctttatctattttagcacctaaaataattttggaaaattctannnnnnnnnnnnnnnnnnnnnntatattgatgcacccctatctgtttt

SEQ ID NO: 101422 - DNA, 572 bp, Cannabis sativa
tatctattccattgactaaaatagattaaatatatttatattacaaatatgaatccttttatagaaattagattggacaagcaataaatttgtaatgagttttggtaaattttgaaagaaatggttatgaattatggagttctaaagcttcacttgttttcaatgaaattgttaaattgtaaagctttacttatggatttgcaaaatgtttctgttatggttgtgaaacggtacgctaacgtagttgttgctcgtaactttgttagagctttcattttttacatcttgatagtgtttttgttatcttctttgctaacacaatttgatggttgataaatttgatatttttaaaagttgaatttgtttagagtaaatactattttggattttgtgttttgcaaaaattacaaatcggatcttgtattttgttaaatgataaaatagactttgtattttctaaaaaagtaaaaatagaaccttgaccttaatttttaataactttttttctaatataactaacttgaagacaattcctaacacaaacagatatagaaaatataaacagttttgtc

SEQ ID NO: 101423 - DNA, 546 bp, Cannabis sativa
aattaaatacgataatacggcgttccaaatgagccctaagtgtacaatagagaaaattaaattttaagttttcaataagattaagtatactaatttgcgagagattaaacaagatgatatatattgggttctcttagatctaagttcaattattatttttcaaatattgttcgacccctttttttttcaaatctaagtttggatttgtgtcatattttagtgttgatttgaagtgattattattgcaaatattatggttgcgttagttgtggatggtagtggtaatggtggtggagtggtggcaatggtgatggaggtggtggtgatggtgatggtgatggtggaggaagagagcgtcgaaagagagagaatcattagtaaataaagaataaaataaaagaaaataaaaataatttatttatttattttatagttttaaattatttttttaattttaaaataaattttgcaatatttttttgataatttttaaataataatattatgtgtactaatataaatgtgtcatgtgtataatagtgtata

SEQ ID NO: 101424 - DNA, 532 bp, Cannabis sativa
  modified_base (36)..(50): a, c, t, g, unknown or other
gaagacacttatgatgaaaatccattgttagtttannnnnnnnnnnnnnngtcagaataagaaactaagaagcaaagccaagaaaactatggtaaaaactattcgtatggaacaaccaaaagtttttcattacaaggaccagaaaggaaatttcgttaggaagtctattcaatggacgtaacaaaacttcatgttcctagtattataggtttaagtttatctaaacctattgcttgtggtatacctggttaattaattactctaaggctagcaacttaatttagtaagatggtgctgcatttttttttttggcaatctacagaagcttctcgacttctagacatagattttatttctcaaaggaaaagtttcaaatatttcagaaaagataaaggccaaaaaaataattccttgaataaccagtgagatgtctcaaatatgctttgttatgcattagactagacacctgttgttgagtgggagtaatgagttgtcattagattaatctaggaaaagaacattggaagacaat

SEQ ID NO: 101425 - DNA, 760 bp, Cannabis sativa
caatgatcactttcattaacattgctatgaaaatcactctctctacgtaatctcttcattgtttcttttaattaatatatttgtattgtgttctcttttatttttatttttaatttatgaatatgtaatgaattatgtatcacttattatggcttagggcaatatatagtgccctactaatagtttcaaacagttaaaatttgtaggaaaatttacaaaaatattgaatttttaataaatgtttacatttatactgtcacacggcaaaaaatatatttatactgtctttgactttctttttttcttttacactgtagatgccaaaatcacataccaagcctctatcttctacactcacagacagaactactcagcaatacgagagcacctgaaaaacaataattaattctagcaagatggaacaaaaatagagaaatcgacatcgaataaataatcatggcaaaacaactataaaacaacactaaaataaactaaaaaaacaaaaggaaagaagaataaaagaataataaaaaaagctaaccatcttctgcacaaattattttaagatataatagtggttatatttgcaaggccagtccagaaaaatcagaataaaaaaactactaaaataacacaaaaacaaatgtaaaacaatgaagcatatataaccacttaaaaaaaatataaaaaaaccacacccctcaaattttttttgccaatgagcttgtcaaataaatataggagaagtagaataaaaaaa

SEQ ID NO: 101426 - DNA, 802 bp, Cannabis sativa
aaaaaaaaacaccagaattatagaggttcgaccccttgatggttgtaattgcctactctcctttagttgtattgacttgtgagtagagaaacaagaagaccttgatctctttcaaaagctcttacaatgatctttgatttatttttctcttgaatctagatttctctcgcatggtccatctgaatgaaatttgtgtcccttagtgagatgattccactatttattgggattaattacatcaattagtttcccaaaactaataagaagtaaatgagaaaactatgtataacctataattacaatgagcaaaataggaaactaggcaagttgtcttttcttctttgacactgcatatccatcccataaaattagagatattatcacatcttccaagcatgaagatatgtgagatatctcctctaaaaatatttaactcgcaccctctggtcggctcatgcgaggtgcttagatgctggaagctggtcagatgttctcacacgctttactcgaacgttccatcttctattgactttgagtacctaatctctttataagaggtcataaaattctttacatgttacctaagtggatgccacatcaccttaccaaatcacctattgtctcataattaaactttttaagtcaatgtttgactctcataataacattaaaataattttactatggagagagaaatatcgcacgcgtactggagagagaaatatcgcacgcgtattggagagagaagatatcgtgtattggctgggacgtcgagaagcttctgttcggttcagtcggtcgg

SEQ ID NO: 101427 - DNA, 747 bp, Cannabis sativa
atgtatttaatttaaaaagaaaaacaaggaaacaaatataaagggcaagcttaaagaaaataagtttttacatcacatacaaatatttttaacttattttttttgttactgtgtgatagaatattttttttaaaaaaatactgtataaattttatattgtatactgtaatatttatttaaaaaatactgtataaattttatattatataccgtgttaattttttaatgttgtttcacaattatttttttagttgttgtaccgttatttttaattgttatgttttattgttattttatagaaagataatattttaaaaaaatatataaaattgtgaatttttacctgaagaaaacgacaatgatctatgattcactcaatcaaacatatatctcgatctaaccattaacaacgacacgtactcaaaaggccgaaagcgacgtaactctctaaaaaaacaaaaacgagaccccaaccacaaaactaaatcaaaaacacttgtagacaaattgcctctacaaaaggtttatttcattatctcttcaattttttttcatttaaaactaaagatattcaaataatgtttggcatggaaaagaaagaaaataaatgagggaatttcttcttaagcaataattttatagtaatttacctagggaaatttgattttttatacttagaaaatcttaaaatttttttcctaaaccaataatttaaaccctaagaaaactataccttttttttcaaaa

SEQ ID NO: 101428 - DNA, 1217 bp, Cannabis sativa
tagtacatcattgttttcattcccctgattcgtaaatcctttgggtctttgaggtacttcttgatgaggtgcttggttattctgttgttcatatactggaacatccctaatacccccaggttgttcctcctagaaattttggggatttctttgattttcttcttgcctcctgtcctggcctggttcttgaacccccaagaaggtctacctcatggccttcttgctctaagatcaggtcgattctgtgcattgtttcctgagtcgccttggctactgtagcctctctttccaactcattgtttcgttggttagatttggctaagcattgtcggagttgtctatttccaattctactaacggtacatacctaggggatcataagcatcctcacttctgggtacataccctatagtatcattgggttcttcatttcttccttctgggttttggttgttaccaccatgactccttcttgaacgtattattccagaagtgggtggcctttgagaacccattggttctttcccaggacgatgtgtggtctcatcaggatgactttcatcattttgagtgtgatcatccacggacagattgtttgttaggagtgaattttctaagttttatcacgtaggctgtcaatgaaagcaccaaactgttaatgcagatttttgttaactaaaaataagcctttttcgtaataaatttaacacaaaaataatgaagattaataaagtataataaatataataataacaccaagaattttatgtgattttacagttaagtcttcatactccacgagtctatcttattcaagatatttctgagtacaatatacaattaacaataatttctctcccatatctttcgtccaccttttctgtagaatctgtcctatgaatataggttggcagttattttcagttaaattttaaatacataaccgtttcttgaaacgttggaattgatcacatttcattaaaacacgtgtagataacaaatgataatcgcataactacttgttattcttatctttaaagacggttgatgctgacttagacaaaagcatctcgttctgcctgttgatgtttaatgttgacttggataaacatatgccttctagcaatggcatgagcaccagtgtactgagcaaacttaagaactgctatttgaccataaggccttgcagactggtgttcagttttatgccctaaata

SEQ ID NO: 101429 - DNA, 736 bp, Cannabis sativa
  modified_base (680)..(681): a, c, t, g, unknown or other
aatatagtttaattttatagaattaggtgaattattttttaataactaaggtttgtttatgtggtgtcaaacctgcagataagtcaattactttcactcaaacaataaaaaaaagttacatacaaatgtcttaatttaagtaattttatcacaaaaaatataataatatgaatataatgatttaaatattttgccgctaaaaaaattatttgattatttaagtgttataaccatcataattcaaacaattttatcgcaagtatcccatgtattggaaaaaaataaaacctatatatatttataatgttgttgtttagggagtgtttagagtgatgatgctttctcataaaatcagttaaaaaattctttgctggaattcaaagcttattctgaaaaaaaaaaatatattaaaataataataaatctaaaacatgatttatagaaagggaaagtgaataaggtgtttttttcctttgtaggtttaattttttttaacagtaaactttgattgaaaataatattgaaaggatgcagaagccatacaaataatagcaagaaaacttatattgggtacggtttttgatataattaccaattgtatcaaattgcactcttcgagtcactgctaaacttcaataggaataattcaaattttctctcatttcattcattgatccccnntttgtgtaatagtattacatatttatactaactagacaatactaacaattactaa

SEQ ID NO: 101430 - DNA, 828 bp, Cannabis sativa
tcctcagagttcgggtagttaaatctgttagtcttactctttatcttcatgtaagcctatatatataaaggcatgttagctctttaggaagcaagagagagagaaaaatcagagagagtgtagtctgattggggtgtgaagaaacagagtgaaaagtaagagtgtggcactgtccaagttgtgtttcttggagtgtctgagtgagagaattgggttttctcttgtactgctctgaggctatgtaacatacctgttctaattgtaactttggatcttgatatgaatgaaatgaatacctaagggggtagcaggaagtaggcatttttgttggccgaacctggataaaattctgttcttaattctttgctttaagtttcatgttttatgttgtttgctgatcctaacctgtgatgtttatgtcgaattgaagtgttgttgatttacaacataggtaatatttttagggcattttacaatcttgtatacattattttaattaattacaaaatatgtgcaaaaaaaacttattaccattttcttatacatttttagatacaattagaaactttttttaaaattttttataaatatatatggtaataattattgactattatatatattttttttaaatttcataattattgctaaatttaaacataatgtacttaacataaatacataatttcatactattattgactattatgtattcatatattttacaagtattttcttttgatttgtattctttttaattattattgaattataaatgtatgtaaatttttttatttatatttagttgatatattatcacatttttat

SEQ ID NO: 101431 - DNA, 667 bp, Cannabis sativa
ccactgtcttgaattcttccaacttccttttcttagctaaaatttctttcatgaactttaggtaagttggcatgtgctccaaggcctccgcaaatggaattaatgtgcagcttcctaaacatttcaagaaattttgaaaactgctagtccaggttattctttcgaagtcttcaagggtaaggaattttaatatggtgatctatgctgatcgcaggcgaagtttctttcagtgcaagaccctcagtagtcttcttttcctttggtgtctgtgtctgcccgttgatcttgaatcccatcttcaattggttgcttgtaactaggttcctcataactctttccactcctcaaggaaattacttgacattgctctttttccgttgcctcactagtgctaggtgaattcccttgagtacggttgcctatttgagcagtcaactatcccatttgagtttccaaggttttaatgcaggctctagtctccatcatgaattggagcaataaatcagcttggatatttgaacctccattaggactttgttgttacggctgttgttagttttgttggggctgatttctctgatggtagaatccctgttgcttgtgcccataattattgttttgagaatagttcccaatggcttttgcttgatccattggcaaactgttc

SEQ ID NO: 101432 - DNA, 647 bp, Cannabis sativa
agcttacagaacactacttagcagtgtcagttctccacgctcaacattagagtgtaaaagagatagtacccacaaccttttttggcgtggccttccaccattcttcagtagtggcctctgctatgcaagtcaagcaggggtagccatttgatgtctagaagcaaaaatttgttatgtaagcttgtatattaaatttatgtatgttgcgtagcaacaaagaccaattaatgaataaaaaataatatttatgttcaaattattgtgtctaaaccacttactaaaaagattaacttcttaaagttagtattttttcagttccacatgcgtatattaggtagtaccctaagaaaattcccaagcaaggtctatgacacttggtgaattgtatgtgatcaagagaccgtaagtctacgagctcacttggagcgcacccacaccgtaaaatggattgaactagcacagagaacttatgtagagaaattttaaagctaaaaatacgatactaaacctacctctaagttaggtgcaggcatacatcagcttgacataaagaaatgtaaatctggatactgaccacctggttggtcacacaatccatgataaaaatcaacaaggccaaacagtagtaatgttcaaaaacagagtgc

SEQ ID NO: 101433 - DNA, 624 bp, Cannabis sativa
atctgtttgtttttgcttattggtcttgtctttagacatggttgtatagtttctttggagtttcttggtggtatttttagtgttgtttctgtttgacattggtctgacgttgtgcattcttttagaattataattaaggagtacttcttcatttgattttatatgatgtgatcgtgtttatgtgttggaactaattaagtgtttcattaatcttgtcttttgagatggttctttagtctttccctttaattttttggttcgatttgttggtccttgttagtttttttgtttatgtggggcgctttgacatgagttgtgtagctcggaatcatcatggtgctatagtatagaagcattcaagagggggaagattagttgtgttcaacccgaaattactgagataataggcattaaagaagttttgagttggattgcaactcattcgtggagtagagtcatgttggaaacagatagcttggtgtgtgtccaagcgatccagagcggtatttttatgcctccactgtttggtcttattgttcaagatgttcgaaatttgcttttggttttatcttttggtgatttgtgttctataaaacgatctgcaaataagttggctcattgctt

SEQ ID NO: 101434 - DNA, 556 bp, Cannabis sativa
ttgaatatttcaaggaattttaaaaactgcttatccatcttgttcttgtgaagtctttgaggatagggaattttgatgtgatggttaatgctgatgaatgcatggtggagtttctttttgtggaagaccataaatagtcttctccttttctggcgtaggtgctgtctctacattatcttcctcctttggcttgtctttgtttggcccagcataggtcttaccctttctcaaggtaattacattacagttctcatttggatttactttcgtagtactaggtaagttgccttgagccctgttagtgttttgatgagcagccaacgaccccacctgggttttcaagaccttaatggaagacttaatctctgtcatgaattgtagcaacatgtctaattgaggattagaccctccactagaggcttgttgttattgtggatactgttggctttgttgagattgattttgctgaggataaaactgcttctggaagttctgctgatgactataattattctgatagtttccaataatggcgtgggcttgctccattggcaaa

SEQ ID NO: 101435 - DNA, 692 bp, Cannabis sativa
ggtcgatttttacccgtttttctacacgcgggtctaacggacccgacccaaacccgatcggaaaagacaattccaacgaccaaaaaggcccaaatcaattccaaatgaatctaagtgcaaaaattaagacattcatatagatttcatgcacgaaaaatacgaaagaaatatgaactttaatattacaaagttaatcgggtctgaaaaagttttgactgaattttttttccatctttaagtttttcaaaagatattcacatgcttagattgatctataatactatacgaatatataaacaccgaaaactgaaaaataaaataatccgaccaaacttcgtacgtttatatatatatatatacaatgtacaatatatatataaatatatatacagaaaaaatatatattataccgatgaatgaatgtatacaatatatttatatatatgaacatgaatgagctgaatgtatataggtatatacgtatgaaaatgtatatatataatatgaatatatatgtatatacgaacacggaaacaattatatatatatacaacaccgtatacacgtatatatatatatatatgaaactcaaacaaaatcaagggaaagataaaaacgctctgataccaactgttagactattacatagtatatgaaatatagcatacatataaacgatatgtaatgcggaa

SEQ ID NO: 101436 - DNA, 594 bp, Cannabis sativa
  modified_base (66)..(99): a, c, t, g, unknown or other
aagtggttacagaacgcatttttgtttttcaaaagcaaaattgttaaaaacaaaaattttactttnnnnnnnnnnnnnnnnnnnnnnnnnnnnnnnnnnttaccaaacggcaccatagttaagtttgaatttttattggagaacgaagaagtccaatacttcaattgaaataatgcctaccaaaatgatgttgagttagagatctcaacactctcaaatgttgagatacgtttttgcttttttgttacttttcgaagccatgtaattaactttttatataaaagttatatgtaattttagaatgcataagtgcatctctatttttgtgttttaggatgtaaataattatattttttttagttatttatgggttatatacttaagtttaattctcagttataaataaatatataatataacatcttacttgcatatgaccgctacagtaattttctaattataacacacgcttttactaatcaatgagttttctagaaaatcgtaccaaattaaaaattttaattaaacattaaacttttataaatacaaatatacgaaggagtcgaaattccgttttaaaagtttacaatatca

SEQ ID NO: 101437 - DNA, 814 bp, Cannabis sativa
atctcacatgtatacatataataaatgatataaattcaaatatcatattatatatcactatatattcatatgatataaacacatgatcacatatatgtcacatatatataactcacatataccatatatatatattactatatatcatgcaaaatagtaaatcacataatatacaccaccatacttacccatgaatggtttttatacaaaatctcttatccttatattctcaaaatcttaatttatctcctcttcctttgaaaagggataaacttttgattgttagaataaaagaaagattataatggaagaaaatcaagatgcattactactctattgtaaaataatacaagaactaaaataagagattgattaaatatatgttacaatacacatatatacattatatatattgcatatatatatgaaatgtaggaagaagaattataatacatgtaatataatacatatatatatagcaagagaagaatatatatacactcactcacaaccttgagtactgtaaattaatgggaattaccatgacttgaacaaggtattacatctttgtccaaaagcttatttcccctatatctctaagtactaattaagagaactctgatggaaatagctttgagaattatcaagccttagggttttctaacaatgtacttttttgatagaaaacttttcatcctgaatgagctagcaccaaagacttcttttatagtgtttagatgatcacacttagaatttaaacacaccacctcatttctctccaataaatgaaagtattaatctattttgtaacaac

SEQ ID NO: 101438 - DNA, 1304 bp, Cannabis sativa
ttgttgcttctgtagcatcaactccaaagggcccttcctctcaaacccgtgcacaaaaagcttcacttgagaaggaactttgcaccaaaaggcaccatgacaaaccaattcgtgttgctaagaagcttaatatgaatcccccctcgacctcctcaagttctgatggagaaaaagaacccatggaagtgtcctctgatgactcagagaccacaactgagtctattccttctgaaaaagatcttccagaagatgttggtgtctcctctgacagtgaggaaactaacctggagcctaagccaccctttcccaaatctacatcagcccctcctcattctgctgctactgccaagggtaaacaacccatgaagagctccattcctggtaatatttctccctctcaagctataaattccagattttattacgatgacaaccaacgtgattggaatctatatgctacccgaaagtttgagagtgaaagaaattatgatttgcatgctcatcgagtctatggtattgtaaagtttgttcaatatcatcattgggaaaatactcttactagttttgaagggtatattgaaggtattgtcaaagaattttatgcaaatttgtctgatgatatgcttgatgagaaatttgaatttttttggtaaagtttatgtttgaggacattggttttcattgactgagaaggatatttccaaggctttgcaactgcccaaaggtgtgtcaaatgctataagactatggattgtcacctcatgattactgaactcactggtgcatgagttgaatggaaatctggctaaagccttcgcatcactcttctcacttatggccatgcttcactcatccagttcgctcttagcaattggcttccgaactccaacaaaacagtggtgtctcaagacttggaaaattttctctttcgcatcacctcaggggcatccatcaatctagcttcttctatcttgggccgaattgtttaatattgaagcgtactcataagcttgtttttgccaacttaatctataaaattcattcctcttagaaggatgtggcttattccaatgagagacttgagcctcccctcagtggcaccatatttcaaccctcagagtactttgatggagcttttcctaaggttcctgttggtgcaaattctgctgctgcaagttccagttctgctcctgcagatgtcaaggaagtcaagcaggaagttatcctggtgaacaatcgtcttgctaccatagaggaggtttagcaagagatgtccaagaaactgtccactttgatcaaacttt

SEQ ID NO: 101439 - DNA, 722 bp, Cannabis sativa
tatatatatagacatacaaccatacaaccacacaaaaacactactacttttagaaggttttgataacttgatgcatgatttagttgaattaagattgcaagtacaatcatataatttgggaagcatttaaactacaaataatctcaaaagaagttcatttgtcaaaacaatatagctcaccaaacagctttaaagactaaaacagtaaaagcgcaataatcaatacaaaattaagtaatatattatgcaaaataaaatgactaacctttgaatgctaaaaaaatactttatagtgaaaccaaatgcatttttgattaaggaaaatgcatttgaattacaatcagctatcattctaggcaaaagttaaaaataaattatgggaatactatagtgttgattggtaataaaaaaaaaaggttgttagactatttaatattaaaatatgggtataataaaaaatttctcatgtaaatttctcatcaagttataccaattgaaacccaaagaattcggcccaaaagctatcaacacaaaagaaaacaaatcaacaagagtaaaagactctttctctctccaatcaaatattactctaattcacattatgtggttcggtcaaaaacaagagtcaaacactgactctcctcatcttcagagtcggcccaacaagagaatcagcccaagtagcacatcccaatgatataagggatttttttatatatata

SEQ ID NO: 101440 - DNA, 1337 bp, Cannabis sativa
aaaagtgtcactatatccttttttatttcttttttttttaattctttattattattttcactatattatatatttttctaaaaaataatattcttttaattcagattttatatattataaaaaataatttaatttattatatataaatacaattaaatataaccataataattttaatttattaaatgtaaacattattacaattgtttcaattaaaataataaaaggctatgaacaaaataacaaaatacaaaatattattattaataattattaaaattattaacaaaaaataatacaatctataaacacaattttaaacttaaattacaaattatatgagccttaataaaaactcatatcagtttctattaaaaaatacaaagacacaaaaaaaaaaaaactcaaagtatcacaatgtacacttgttaataaaataaacctaaacaacaaaaaaaaaagttcatatccaaagccactgtcaaccagaacttcgaacaccaagctatcgaaaaccaagcccgtcgaaccgaagcccttcgaacacgaacgtcgatcgtgcacccagacccgcacgaccttcaaatgccgtcccgctgcatagactagagacacggagagagagggagagaaaaataatcagatgaaaaaaaaaataaatgtaccgattaagccagtgttttgggtgcgtttgggtggcggagacgtcaaccgtggacctatggcgattgaatagagggagacgacttggggttcaaactctatttcgaagtcctgtgaggcaaacaatgggcttgaagtttggaagtattccttgtccgtcggtggagctcgccttgcgcctttggaggtcgtcgtcttcaatggaggaaggctgggttaatatagatctgaaagggatgagggctggttttacagagaggtgcgagaagaggaaaaaaaatatggatctgaaattattattgtgactattgaaaaaaaggaaagagagagactattattattagggttttaaactattaccctaaatgatttttttaataaaaaaaattaaaaattgaaaagatttattgagaaagagagagggaaagtaccatgcgtgcatgtcttttcaactttttagtgagcattaattatttttgttttttcaaaaataaaaaaatcaattcaatgtatgtaccattctttttaaaaatatatatatcatttaagaaaatatttattaagttgttttttttagtatttattattattttaattaaatttatggttatgatatagtgacgcgctaaacgtgtggctacatgtttatctagtcacatttggcgtgtcactat

SEQ ID NO: 101441 - DNA, 503 bp, Cannabis sativa
gtcctatttgtggcgagagtcgaaaaagagaaagggagacggaaaaaaagtagctagaaaagttttgcggtagtttcctttaattccgagactgaagaggttatacagttcaagacactcaacagaagacatgcagtggcacaactctaagatacctaaagaggatggcatgcttagacaccctgcagatgcagaagagtggaagcagtttgacagacatcttccatcctttgcacttgagcctagaaatgtgagattgggattggccaccaatgggctcaatcactttggtaacatgagtaacgcttacggtgtgtggcatgttattttagtcccgtacaacttacccccgtggaagtgcatgaaacgtgagtcgttaatgttgtctcttttggtgcctaggtgcactacccctagaaaagacatggatgttttcatgagaccattgattgatgaattgagggagttgtgggattcaggtgtccaagctcgagatgcttaca

SEQ ID NO: 101442 - DNA, 760 bp, Cannabis sativa
tttctgtaggtttggcattcccataaagagagaatctaataatggaacccaatttgatggcgagttgttcactaagttctgcaagaggaacaaaattatcatgagcttctcgttagtatacaggcctcaggcgaatggacaagtggaagttgttaataaaatcttgaaggatactatcaagaagaagttagacgctgccaaaggcaggtgggtcgatgagctacctcaagcactctgggctcacgaaactactgagaagacggcaatggggcatactcctttctcgttagaatttggctcgaaagcaatgttgcctattgaagtgaacatattgactcacagaagagagttttataatcgagaagaaaactaggaacttctaaaattttcgttggatctacttgatgaaaaatgagttgagtcgcaaatcaccaacgcagcatattcacaccaagttacaagatatttcaacaaaagagtcaagaaaagactattcaatgttggagacttggtgctaaggcaagtatttgctaatacgagagatggaactgcagaagtgctcaacccgaattggtagggtccatatgtcatctatgcagtagttggaattggagtttacaaaatggctcgactcaatggctcgctaataaggaactactggaacgtggaatatttacgacccaagtaccaatcaataaatgatgtaactcacattgctgatgtaaaattttaactttagttatgaataaagagaatcatt

SEQ ID NO: 101443 - DNA, 705 bp, Cannabis sativa
taagaataattatttattattaactataatttttatacttttagttatttagttatctgtgactaaaaggagtaagttttttttttatctatctctagtctttatataatctcaagttgtattaacttggttcatttcgcatgcgaaatacgttggctttcgaagaaagagcgactaattaataagaaagagtaagagttgcacttaaatatcaatacatatatataagtacggcgaatcgaactacgcgttatttagcaagagaaatagttagaacatcacaattatattcattttgatggtttataactgaaaatctagaatatatatggtcaaattcttagttgaatagtcaagtcaaaccaccaggcacacttacttttcattaattcaacgcgtcgagctatataacttcattcttaaatcctcagcatatctttgtctacaaactccaaaaccactaaccactaagaggattctccgccactttttaactcttatcttttaaaatatatttaatactaatatttctacatacacgtattttttttagaaatttttacatcaaaaatacaaaatggtttttttattacatatatactcttacacggcagttattacttttgtacactttaagtttttttatttacaattttactacttacacacactatacacataatgtcactctttaaatgcaagtga

SEQ ID NO: 101444 - DNA, 1383 bp, Cannabis sativa
cataaaatgtcaaatttcccattggtaatctataattatttatagtgttttaaaactctctctttctctctgtttattactaaatcaatactaactttttctcctctctttttcatgaacaatcaccatccgagtttattttcactaagataagattgagtaaccaccatgctagtttaattttttatgctctgctcaaaaaagattcatactccaaatcatttttttttccttatccacttatattttatttttacaattttaaaaaataaacttaacatttaagggtcagtttggtacgcaggattagactagactggacaagattagatggaattatttaccccaccctgctagatgggataaataatctcagacatatgagattagctgtaatagttatcgagacttctaacacgcccaaacactggattagataaattaatctgtgtcatgcgtaccgaacataccctaatagttaaatttttttatataatatagtagcagcagaattttaggaaacatgaaattaacttcgtattgtaatatttttaatttaactttttctcttttttattttatttttttttttttttttgttttttgcaaacattatggcaaaatgaaaaggcacttttatggttccaaggaagcattttatagcttagtagactactatcttatgaaagatacttttatggatcatggcagagattagtaaaagaaatttcttttaaaaaaatatatatcttatcatgttttagtaaatgaagggactcggatgcaaaaacatcgaataaaaaaataaaaaaataaatgcatactgcaactttagtaataaaaaggcatgcgtattggaataaaaaatgtcagcatttatcaaaactaagaaaaacagccaatggaggacctttaatccaaaaggtgaacaagttaaaaaaattgtattaatctgtttacattgtcttagtcacaagtaaaactatataaatatagcttgtgatttgcttgatctcctaccaaaacactttttactacaaaaattgttatctctcacatccaaaaactaccccattttctctgaatattgaaaccaatgtcccataacttgtctgccatgcaagaggaccttctcccaaatgctgaaggcttgccactgaacatgaatctttctgaggtagaagtgcctacagtgagagcagtagatgaaagtgtggtggataagaagttagtgatattgtaggaatttttttctttctttgccctacacacaacaaagtgattaatcaaatccccaaggccaaatctgacaatttacccagtcaaagaaagcttttgactttctaatattataacccaaaaaaaaaaaacgacagctccctt

SEQ ID NO: 101445 - DNA, 547 bp, Cannabis sativa
aaaaaaaaaataaaaattcataacgaacaaccagagattgccacatggcaatttatttaacattttaaaattaagtatctatagagttccaaaaatataacttaaatattaatattgtcaccaaaaattaaaattaagtatttatttctaattaaaaattaaatttaagtatatatgccgcaaattattcataatataattgttaatatataatatgaatattaatattacagtatcatttttagcctcaagaatttgctttttctaatactttattcaaaaaagcattttttttaatagaaaataaaattgggttgctaaatttctatttttgtgatcacattgacatatttatatttaaaaaagacattaatgaaagtattggaaaattccatagtagaccctctaactatttttgcatctaagaaaaaaaaagtttatgttttttttataatttcgtacgttataattatttaggaccacttgtaaatttttaaaaattttcaaattatttacagtgccaaaaattaagtttattaaactgtta

SEQ ID NO: 101446 - DNA, 724 bp, Cannabis sativa
aatatgattaaattgggaattcagcaatccattatcaacaatagaagaacctttgtgaaaccaatgatctcaactaaattaaagttaaaagaaaatataattacaatggcataaagaagctcaaacactttatgttgtggaatcaaaggatttaaaacataatatcaatatagatggaaacaaagaatattcataattgctaaacctgtttattaaaccatttaaacaaaaaaaaaaaaaaacctcagctgaaagtacaataacgttgaaagcatggtgagaagagaaaaaaaattataaaaactaaccaagtcaaagaatatgttaatgtgtatcaaagaaggacaaaaatgactctacaatagtaaagaaaggcatatcataagcaaggctggcacatttccacgctagaaatcctgtaaagaaagatcaactaattactttgaagtttgaataaatagaaaaaaggccaatgctgtagttaaaaacatcaagaaaaaagtttaagagagcagccataagataaataaagaatacaaacatgatcaaagtcagaaaggaaagcaagaaaaaaacagcagtcaatgtcatattgttagttatgtatgtaccggtactccttcttctctgaaaatgtccttcgttgcttgtaacattcctgtatattttgatggtccagacaagtttctgcggactaaaccccaggaggttgtgggttccagtt

SEQ ID NO: 101447 - DNA, 575 bp, Cannabis sativa
tttctggtgatattattttagaataaaatctgtttctgttatattgatttaattactctctctatatataatgttttatatacgtggatatgattagccattaggaagttagaaaggcagaataaaaagagttttagattgattatgacattgacatatatatttattttgtgtatttatttaatttattatgctaattattatatttgtctttctttgtgcagtataaattgtctataatatggataatgaaaaaaatgtagaggagatcatcaatgacttaaccactacagaaactaatttgtctagttctgatagggatgagtcaatgaaagaaagaagaaaaaggaatggaacgaagaagagaaatgattgcctagacaaggacaaggacaaagaaaagaacaacaacaacaacgaaaacgagggttgtgaaaaggaaaaagacagtgcaagaccggaaaagaagcaaaggattggaaggaaaacatctagtgtttgggatcattatactatgttgccagattgtgatcccaagaagccgagggctgcttgcaattattgtggtaccgatt

SEQ ID NO: 101448 - DNA, 710 bp, Cannabis sativa
  modified_base (212)..(215): a, c, t, g, unknown or other
gtcagttccaagagtatgggccttaccaaattcaagtaagcgaggattggattttttttttttttttttgggaaaaaacttacaaaaaaatactagaatttgagttaatttttacataaaaattgtcacacggaaatcttttcaaaaatattgtgtttttacaaaacaacaatagaacacaaaagaaaacaactaaaaacaacagtagaacnnnnaaaaataaccgtagaacaacagttaaaacttaacacagtacacagtataaaatatacacaataattttaaaaaaaattccgtctcacagaataacagaaaaaaagttaaaaatttcagtatgttgtaattatctcttttttttcatcttatttaaagattttgttaaagtgagatatgattgtttctaatagtacatttttaaaaaaaaaaaacaaaacttatatttttctaaaaaaatttattagtttaaaatttaaatgttgaaaagaatgttcttcgaattaaccatttttcctaaaaaaattaagattatctttatgggataaactcatttttgtagtaataatttttctggattaaaacataaaaatctcacaccgcgaaaagttactattcttataaaaatattacatggatgccaaatccaaaagttgaagggcttttctattaatgttattttagttggtgaagttctaccatatcatttgccttat

SEQ ID NO: 101449 - DNA, 519 bp, Cannabis sativa
  modified_base (359)..(363): a, c, t, g, unknown or other
cacgtgagagtgagagaagaatggggaagttagtttaggatatttgacttagttgaatttaaatttaaattatgaggaattttatattagtaattaatcgatattttatttcttaaaaaagaaaaggtatagctgagtttaaattttaaattcctagattttatctaatcagttgaatatatacggtatggttttaccatctttctctctacttagataattcctaaatctctcatagcctctatcacaccaaattactgaatagcataaattgaagcctctatcactgtattcgatttcgaaggtaaaaacttttactgtctcttaatgtcaaggttggatgtaggtttttcgtaagnnnnntttattttcgttttcagagaaatagactttcataaaactaccatatatctctcctcgtatatcagttttcagtgatctaggtaccgttttaaagataatttaatgttctacattttgtatgaagaaactctttcctaattctgattatttcgatgt

SEQ ID NO: 101450 - DNA, 1165 bp, Cannabis sativa
tattttgggtaagtgtaggaattaatagaattaatgatatagaaaagggaaatttgtggcataaatacctattttgttcattttgttgctaataagtacccaatttttaaaaattacggcattaatactcaaaactcattttttacactacccccgttggtactcactaacagaagttagtttggtttttttttcacctaattaattaaagattacataaaactaattaataaatttaaagaataaaataaaaacaaaaaaaataataataatcctttaataaaacaaaaagcagaagaaaattccaatggcaccagatgagcgaccaagagtctcacttcacatcaccatgatgagaaactaaatccccatttcgcaccttcccacttcttaaaccagattctgaccaaatattttttagcaatctcccattattaattgcaatactctgattttgagagatgcatccatgaatgataacactcgtgaacatgaccatacataggaaatatgtccatcaacccctctttcttttccaatccttcatgtgcttcataaaccaacaactgatgctcaagcccattaattcttcttaaaatgctaggaatcatttctcttcacctcaaacaacttttcatgcccacccattcaaagaaatcacagtccttcaatatgaaattgcagcataaaattccaaaaatcaacataaatgactagtacaaatcataaccctttgctacaccatattgtcctttcaagcttctcatcactcgttatcgattcggttagagagagatggtgcgattaggttaacagagagataatgtgattgggtttacaaagagatggtgaaattggatttacagaaagatggtgtgattgggttatagtttgtggttgtgcaattgggttgctcgatctatagtttctcgccgtggtggtgcgatggtggggatccggtttctcatcgcgaggtgggactcttgaattctcgtctggtgcgattagaattatcttttactcttttttttttttttaattttatgtattaaaggattatttatttattttttattttatgctttaaatttattaattagttttatgtaatgttttattaatttattaatttttttatctaaaaaaaaactaacttctgttagtg

SEQ ID NO: 101451 - DNA, 979 bp, Cannabis sativa
gaaaagcacaatcataatcataattataacctgaattataattaggcgcctatacacctaaccataaccctatccacgtctccaacatggtactgagtttagaatgtttgtacgacaacctatcaaccataatatcagcctatactcggtactgtagtgatactctagccgtatggatgtgatagcattgatcagtatctgattcaaacatacatttattagtatcaaatataactctacgtatattgatatcactatcgatgtaatctaataagcttaataacatgtacgctaaacatgtaaacataaatgcatatcactatactaattttaccttgtttctgaatttaagtgtaccggtcaacccgagtggaactgctgcttgacgatttacaggcccctaaatcacaatattataaaactgatgagtgacacgctaaatcacttttcagggacataaaattgaaactaaaagtttctctattgatggataacatggaaaaagggaaaaactagggttccctaaaaattcgcaaccggcagaccggttccctaaccgaaagatagattatgtggggtttcctggggaccaacaaaaattttggttcccataggtcccattaaaccagttgactggttcagtgtaggaaacacccaaaacactaccaacagctcaaatcgattccaaatgccaccaaaccttccagacctgctaaatagatcacaacaaacatactccaagcaataaaaaccagaatcatccccaaaaactcaatcaccattaaagatcaatgtttgagctctaaaactcaaaccttatccaaatacatatccaagccatcaaataacaataattcaactatagaatatgaattcaaatactgtatagctccacagaacccttatcctaaaatcatgcaaggaaaactaagtaaagcttaagaaattaaaggggaaagggtctaaaggctttaccttt

SEQ ID NO: 101452 - DNA, 650 bp, Cannabis sativa
aaaaatgtaatcataatattaatatttaatgtaaccattagaacctcttatatatatttatatatataaaaagaacttgtgaatgtgtgtttgtaccacattgctcgtgcgctagtaatttgtaagatttatattatactttttatctttgaattgtacaactgtagaccctctacactacactacacaacaacacaactcaacttagatttgtcttaaattaagttctaagtccgaagttcaaataatataaagtgcttttataatacacctctaaaaataaatgtatttatgtgatagtgtataaatatttaggacattttagaaatttttaaaaaattcagaataatttatagtacaaaaggtcaaacagattgtatcactttatgctctattagggtttttgtaacacttgttgtcgtcgtttcctattccaaccaaggcttgtcgtccgtccatggccttaggcgtggccgtggtcagggcctgattcatttctccaccatatctggcttatgtgccttgtttatcctcacttcatcaatttttcttttctttttctctagtggtttcttctttgggtgtaagtgtcggatctctcggtgctttgctcagctggtggttgtaattttttcttcgactgtatttga

SEQ ID NO: 101453 - DNA, 625 bp, Cannabis sativa
atcttgctcaattagttataatttcatgtaataataaattaatattgttttaattatttaaataaataatttttatatgaaaatttaattaaataattatattaataattattgtaaacttgaaaaatattgaaaaatacaaaaatttattaaataatcaatttatatataaaggaaggtttaaagagagatgatgtggcattctatgtgagttttgttttggttttctttttttcaccttttttcatattttttaatattttttttttatacttttgataatatgagagtcatgttaaaaaagtcccacatgatttaaaaatcatggtgggtggtatagttttacattatatatatatcactattcttttgttttgatttatcttggtaattgataaatttaatcttgcccaattagttataattttttaatgtaaatataaaatatatttttgtatttttcaatcactattattttgctttgatttgtttcaaagttaatattatctaatttttatgtaggtgattgataaatttaatcttgcccaattagttataatttttttataataaatacaaaatatatttttgtatttttcaatatttgtcaagtttaaataattat

SEQ ID NO: 101454 - DNA, 559 bp, Cannabis sativa
aattcttctctctctaatttggcttttgagtttgttgttatgtatataatgtaggaaatatatgtagtaaattggtaggttttttttttattttggtatttaaattttcttttaaagtaattaaattttatgattagttatttaagatcggttgtaaattttagaaaattttaaatagtttacattgtcaaaaataaagtttaaataattacttaccacacgtattataagaaaaaaccaattacgtgtacaacaaaatatatatattttatttttgacattgtaaattattcgaaattttttaaaaatttactaattattttaagtaattatgacatacacaattataaaaaaaaaattaaactaaaaaattttcggtataaaaatttactaaaatacatatttagaaaaagagaatgtactgtaaaattagccaataatataatattgtcataaatataagtatgatgatcatgaaaacgtgaaaattcaaacttatatatatgtagttattcaataatgattttatatgtttcattatgtttatatatatatatat

SEQ ID NO: 101455 - DNA, 743 bp, Cannabis sativa
tacgaccttacttccaagcacacaacattgaggttttaacaaactaccctttgcggcaagttttggcaaaaccagagtcctcgggcagattgttgaaatagtcaatagagttaaggcaattcgacatcaggtacaatcctagatcagcaatcaagggacaagcccttgcatatttcatactcgaatttccaagcgacgaagtagccattatcgcagaagagcaaattgatcctgacgtaccaaacaatgaagggtggactttgtatgttgatggggcatccaacagtgaaggatccgggggtggcataatcctcataagtcccaataaattcaaggtacacagtgcccttagatttgaatttcctgcatctaacaatgaagccgattatgtggctctaatcgcaggattaaaactcgctcttgaaatgaaaatcgagtatttacaagccttcagcgactcccagatcattgtttgtcaggtgaatggagaataccttgccagaggaggtcgtttggccaaatatctcgctctcacttgtgagttattacaaaaatttaaaaagatagttgtctctagaatacctcgtgcttacaattctcatgcaaatgctttagcccgattggcctcaataagagaagcagaattactcgatgtgattcctgtagacatgttaactcatccgaaaatcagtcgagatgaggtgatggagattgataaagccaaaaaggtcacctggatgacc

SEQ ID NO: 101456 - DNA, 822 bp, Cannabis sativa
  modified_base (690)..(690): a, c, t, g, unknown or other
gaattaatatcggttttagaataggatttgtataactatatttctaccttaccaagctctttatctaatcatcttctttctcatttctaattttattatttgttttacttcattccaatttctaccatattctattgatacttatttttagtagtaatttacctccctgtggatacgacatagcccgtttactaccgtgaccgcagtgtaactaattaagcgaaatcagttcacatgattactttcatggttatatgtttaatatataaattctgttaaatcataaacttatagttattcatgattatagtgttgtctacacaaaggaaaataatcatgattatatgcttcaaagtatttagtctcatgatttatcaatttagtatatttatactgatgtgataatcaacaataaagtacacaatgatatgtggaatgtcctttttagagcattagcaaagtatactagtatcagatatgttgggttttatgccctaaataaaactccattttcaatataatctttatcctttaaatatcaataaagaaacagaagtattttcatcactttgtgtgtcatttggttcatgttattatttataattttattttattaataaatttatctaaatccttattacatttatgttcttgtttattgtgtcatcagcacagtggaaagtaatcaanattgtgtgattaaatatatattcttagatttatcagtactatgtttacttgcaccttagataagtactatgttctttccaaggcattggttaaagtaaagcttgggttggatacatggagtatgcatcggaa

SEQ ID NO: 101457 - DNA, 778 bp, Cannabis sativa
gatgataatagattaaaataaaacttaatttagtgatcatctaaacaaaattaaaataataatcatgacattgaaaataaaagaatagaagcaatttgatataatagaaactaaaaaattaacattaatcgtagaaattaaaaattcatgtcttgggttttaatataacccttaactaaaaagagcctaatctgaactagacattataatataagtcataataaaaagtacgagattaaggagaagaaaaggaacaatgatgtagaattattggtgtcgtaatctccttcttcttctttctttctctttgggttttctctcaaaaactcaattcaaaggtgctaaaaattgaaccctaaaggtcctatatatattccctcaaaaatatttgattaaaaaaaaagtttgaaaaaaaaagaatcacgctctcaccgcgacgagcttctccattcgtcgcggccataacccctgtcagcgagcttcttattttcttgctgcaacaaacctccagccttcgctgctgcaaaaatctcgagttttgggtcttcatagattttcaaaactctaggggctcgtttggaacactggattggacataaaaggattggattggactgaacaggacaagattggattatgttaaaagtaatcatgtgtttggtttagacttgactattttatttattttatttttaaaaaaacttatattaaaataaaaatatataataataattaaaaataaataattcccatcaaaaaaataaaaagaaatagcaaa

SEQ ID NO: 101458 - DNA, 800 bp, Cannabis sativa
actccaggtgtacaagaaacaggatatacaagtatcgtaacaacctactagattagggtgttaatagagattgtttgacactttattttagatttgatgtgatttaatttttctctaattttctatgtgcatctattttatttatactttattatttttaattgtccgatcaccaattaattgttttatgatttcaatgcaaaatctaagaagtgagtgttgattatactatagttaaatagacatagatttcgatataggaaaagagtacttatataatttgtgtagcatttagaatttttatgcttaatgccttctctatgtttaaatttatcacgagagtagaaaatttacatataggttgagttttatatgttctagcttgagtataagtttctttagtaaatctgctatcacatgaaaattgaaatttaagaattaaattattataaatcatataaagtagatttaactgaaattaatcaccctaatttttaatcattgttaaaattacactttaatttatttttgttttctttttaaatatattggaaacttattttttcaattattatagtcaccaaatagaattaggaatttaattgtttggtaatttactgcagcccttgtcggatcgatttcacttttgtgagtctattacttatgaacgatacatatacttgtatattagatttttcacaacactggggtcgtagcaggcaaggaggagcccccctcactaggggtcatgtgagcgaggtagagaggtccctcattgcgggctgtgctagtgaagtgag

SEQ ID NO: 101459 - DNA, 562 bp, Cannabis sativa
ggagcacttatggcaacattttcagacataacaacttcaattttgtacgtttgaacaatgtatttcttatacttaagagagtaatataaagggaagattctaagaaaggattgctccactttttataaaaatatataactaattttatagacttgtcttataagatttgaattgatcaaccatataatatggtctttaaaagaatccaatgtgatttttcaataggtcaaatcctacctaacttcatataaccaaatcacatgtatgaattatgtgaatagttttccttcttgttattattagtgaataattaatttaagaagctaatactcaaatacttagagtgggtgcaaatttcttaatttataacttaccatacgatatgctataaaaataaataaatgatagatgttcgggataaaaaaacattgatcaaaatcattataactcttcagtaaattacaataaaattttttgttcaattataatcgttgaatcaataattagattgatcagatgttttcatgtaacagtcaatagtcccgtgatccgtaaaggggaa

SEQ ID NO: 101460 - DNA, 524 bp, Cannabis sativa
acttcaacttacccctaaggagtattcattagaagatatattgaagcaattgtaaaatctacaaataagactaccaagaaaacataacaaatctggagggggggggtgaagcgtaaatgaactcctatggagctcaacttgtctaagggaagcattttcttcgaacttgaatattgtaaaaacttgtcacttaggcacaatttgaatgtaatgcatattgagaagaatgtttatgatagtgtgttgggtacacttttaagtattgatgggaaatcaaaagacactgaaaaagcaagacttgatctagcagacatgacgataaggaagaaactccacccttataaagttggggacaagtggaagaaacatcctactagttacactcttagtgtcaccgagcgttaggatttttgtgaattcataaaatctgtcaagtttccagatggttttgcagccaatttttttttttttttgatgaatcagaaatttcattgcacaaacaaccaattacaacatttacaaac

SEQ ID NO: 101461 - DNA, 743 bp, Cannabis sativa
taaaataaattccaacagtattttgaataaactcaaaaattataagctgcataaatattattcggagccttagaacagtccagaaaaatatgcagattaagttttaaatttttcaaacaatttataaatcataaaaattagcatatgtctaatattattcaatacatataaaatcaagtacaataatcaagttgagtccctaccactcccaagtcgttaaattttgtccaaaaagatgatcctaagctctcaagtcctgagctctaattgtttagtccaatcttagatatcactctcacctataccattaaatggctaaataattatcatcattatattctacatttaaaaccgagtccaatgacatataacatgaatatattaaaagtttacaattatgaaatctcacctaagcggtgcacattaactatcagtgacggtagaaatcggtgtactggaaacatcatcaaaactaaggatagtatatatcaaaatgaacaccttgaggagtagatcacacctatgctaattatttgtcaaaatagtacacgatattgttggaaagctttcaaaaaagggcggagctacaaaatcgtcaccaaaaaaagtagcaggttgggtgaaataccttagtgtagattgttctccttgatgagatgagtctagtagtgaagatgactcgtcaaacagacaccgaaggtggccagaaaatccattcgaagtttgaacctctaaactttgac

SEQ ID NO: 101462 - DNA, 739 bp, Cannabis sativa
gtataatcaatgattcattaagtaatcatcagtagaaacatgtatattcaattagatgtctaattgaaattaactaatatttaaacattcagaagttaaatctgttaaaagtaacagattgtaactaactatttaaatcaatatgagatatgatttaaatacataaagttttaatggatgtggttggaccacatcaagattgagaacaattgatagaaaaagttcatacaattaaatcttaatatatatgataattaaaaagggacaatttcaaaagttaaaattaaattttaatagtcatgaccatcaattaaattcagaagtaataaaatattttagtgggattatactacttattaaaatacaagatcattttaacaaaactagattgttcctcataagaacaatagtgtttctaaatcaaatcatgatttccaatagaactataaagatttcaatgaatgagatttattaaaatacaagatatacaaaggaaaagttagaatatccaattaatttaaattactgaatattttaacatatagaatatcaaagccttaatgaaaaagaaattaataggaaagttaacactttttgatttcaaactttagagtcgaaatatgattattcaataatcatgcattaatagtctcattgaattattcaatacattaagatgatattaaatattgaattttaataagtgaaaattttaaaccttactaaaattatattgatt

SEQ ID NO: 101463 - DNA, 536 bp, Cannabis sativa
atttatttatttattaaatatggtagtgataattttaaattttttattttattttttacaccctacatatattatgaaaaaaataagaaataaatttgtgttaaagctaatgtaaggaagattaaacaattgatacttgatttcttttaaaataaatatagtatatttatcagttttgtatttgaatatattttttaaaaaacaaaatataaattaacaaactaataataatatattcagattaaaaaaaataacattctaaaaattttaatattcagatgtaaatataatattttattattcaaatttgtattgactcagactcagtagtctgatcttattgcattttacccaaggttagatgttcaaacctaatatgttgtgcatgtgcttatgtcaatttttttattatatctttgtgttggtattttagaatattctttttcttaatgaatgtgttgttaatattaaataacttaaagatacattgcttagggaattgaggcttatcataacatttttattttatagtattg

SEQ ID NO: 101464 - DNA, 574 bp, Cannabis sativa
aatcttacaaagagtcttcaatcaccatgcattaacttgagtccacacatattttctttgctatttcttcaaatctataaacaaataacaaagttagatagtatgtctgaaaaagcaaaaatataaagcatatcaaagtttttatttaatatcaaagcatatatataccagtgtaaaaatatataacattagtttaatctggttatcaaaaaaactttattcagcaaaaaagaaaaaacaccaatttaatcttccttccaattcgtaagaaaagtctcttctagtgacagaggcatgacaatcatactttaagaagacccccattaagttaatgaaaattctaaataaaggaaaggagtaattttctgtggttaagtattgaaaataggactaagaaacctttctttagcaaagaaggagagagagagagagagattacagggcaacagaacacttacagagtgaaatcaaagtaaaatgattaactcaagaaaccgataatatacaacaccaaaaaataaaaaaaaatgttaaaaaattggattcaaagcatttttatatgatcaaagttata

SEQ ID NO: 101465 - DNA, 1810 bp, Cannabis sativa
  modified_base (459)..(467): a, c, t, g, unknown or other
agtagtagctcacttagcaccaaggtgttaggggatggtggagagctgacaccagggtccccccttaaagagcattctgagcttttagctttgtaccgagaacatacatgattttggctttgtagacatgtggctaaaccatataccaaaccacagagtttctcaaatccaattgcaccattgtattcgtagacccaaataaagggcgaataccaagtcctgtcctaatccaggcaatattgatgatatttacgaaaatgccactgccgtacaaactaagcatcagcatgcacctcaacatgcgccaccacttgaccaccactttgccaacttgtgggcatcacttagcttgtaacgtgccatcttagcatgcaggttacattctcccccacttcaacatgtcgatgccttcatcgacggaccgcaggcaaatcttcctgatctcgactcctaagcttnnnnnnnnnttctcctgaatcctaagtctgcacttgtccctttacctccatagaaccaccctcttggtgacgatctccctcacccactcttcgactcgatcaaagaacttgtgccactctcgctattcagaaccacccacggagtagtgcctctgcactagaatactttccccaatatgaactcctccaagtccctcacaacgtccctccagtcaaccaagtagcccttgcaacactgatcctgaagctaacacatcctctgatagtagctcactcgccaatcatccaatgcatactcctttcgacaaggactaagtatggtgcacccctcggggtgaggtttgcaaaccaaccgtacccaacgacactgaaagaacatgcttctactgaagccaagcccctctagacaagtccctctagaaacttcacacgccaactccatggcgcaccatcctcctaatggcaattgagcaagacactcctattgcaggataaaagttggtgcgtcccacctggacgaggctcgcaagccaattgcacccaatgcagcaccaagtgcactctttcacaaaatctcttcatgaagttctgaacattggtcctccagccctaccgcacacccacgacttcatgcaaaaggcccctctgtcccactgcatacatgctcctccgagcttctttcacgtagtcaatgatctaacaatcacccaaaaccacgaattttccctctgtctcttgcttgtatcggctcccaaaactatgtcacaagtccatctcccaaaatcaacgctgcatcctctaatgacacgttaacttttgacaaacttgataacacaaagtcttactcttaagacttgaagtcatcccaatccgctatctcccatcggcatatgctctctgaatcattcgacttacagtgtcacatacaacaccaatgtcccacataaacacaaaacatgcccataacatgtcacaaactagctcagtcttgatcccagcctacgccgcaacatattttctatctacagcttgcagcaaccatgcaagtcttcgcactgaacaacccatctgttgtagtgtttcccccgggattcacacatcaaaactaaacaagtaccctgattcttcaaacatatgaattagtgggctcccccacttcaacttgggaagaacttctctcttagaggaatacccctcaagatatagctcgcaagctaatcgcttactcgcatacggtccctccattctgaaatgtcattttgatgaagaagttaaactaatgcctcagtcattctgactcttcacccctcaacatttcaacgttgccatagtaccttagtcttgatgaattt

SEQ ID NO: 101466 - DNA, 891 bp, Cannabis sativa
ccttaaaacttgtaaaaccagttttgaacttatgaaccctgtgaaaccaaattcgacactatgaaaaatcataacgaaatataaatgctaaacactaaagttaactaaaaataagttatcaaaattagcatagtcgctggagttgctgccggcactgggaaagtcaccgtagttgctaccggcgctaaaaaagtcatcgaaattggcattatcgctagaaaaatcacaaaaaaattaccaagaaactgatttattcatcaagatcagtttcttgatgaagataagaaaccagtttcttggtaatttttccggcgacaatgccaattttgactaatttcccagagtttactgtcggtactgaaaaagtcactagagtagctgccggggtattagtcgtcagagttgttaccaacgccaaaaaaatcgtcagaattgccattgtcgtcagaaaaattactggaaaaattaccaagaaaccgatttcttcattaagaaacgactttcttcatcaagtaactggtttcttcatcaagaaactggtttcttttcatcaagaaaccagtttcttggtaattttttcgacgactatgccaattctgatgatttttccaaagtttgttgtcggtgccgaaaaagtcgcagaagtagctgctagcgtcagaaaagtcgtcagaatcgacactgtcaacagaaaaatcaccaagaattctttcttggtgattttgttcagtgatttttccgcgcgacaatgtcaattggacaaatttttcggtgccgacagcaattccgacgaattttccagcaccggctgctactccattgactttttcggtaccggccgctactccggtgactcttccgggaacgacaacaaactacagtgacttttcc

SEQ ID NO: 101467 - DNA, 992 bp, Cannabis sativa
cccccctcggttttacatccttagttcaaactatctatttcatacacgtataaaacaaaaaaagtcacacatgcaacaaactctttaaacatcttattggcatgttattttttttttaatttctaaaaattttgtcaaatatctttaataactacaacttatattatcataaaaaaatgaactaaaaatatttttttagataccaaaacagataaatgtgcattgatgtacatatttcaagggagtgtattgtaaaaaaaatttaataattttattcctaacaaaaaaaatgtaaaatatctaatataattttgggtgcttctataattacaatacactcccttaaaagggatgtactgatgcactatttatctgttttggcatttagaataattttttagtctttttttttttcatatcagtgtacgctaaagctaacaatatagaaaatagtgtttaaacagttttttttttataaatgtataatacaaaatagtaacgcgtccaatatactgtttaaaccctaatttttgtgtgttaattcttttaaataaaaattcttaaaattttgcaaaatatcttaaataattataacgtacatgatcataagaaaaaaattaattaaaaaattatttcaaatactaaaataaataaaagtacattagtacattcttttaaagagggtaatttaaaattttccactaatttctctttttaataattttccagaagtagaaaaacatttaaaaaacatatagtgagcatataaaataaattttaactcaaagagacataatccctacttaaagtatgttcattagttcatagttcatacacatagatacacatttttttaattacactaggtgaatgtacgtgccgagcatttaagattttggtctttaagattttgaatgtattttatttttaaagattacaaattttttgtttgaaaaaattaaatatttatatttgaaatattatttaataat

SEQ ID NO: 101468 - DNA, 786 bp, Cannabis sativa
gaagtaaaagaatttaaaaaaaaattagaaccatcgcaccaccacaaccaccaccacactattatacatctcacaccaccacatatacttggtggctgtagatcgacgctaatagtgtatacatatttttttatattttatcttttgctttagtttttgatttagcgtcagatagataactgacataaattgatagttatttgtgtcagtgaataactgatgcaaaaaagtgtaggttgacttttgtacaggtcaacaagtttgaccagacgcgttgaccgacataaaaattcctttttgtagtagtggtccgaagtccacagacggaggatagccagccatttgtcaaaataaatcactcgagtctctaaaacaacatcctagtagtttcatcacgaaaactaactaaggtaaaatcgaagtgcatacgcactattcgaccaacccccaagtttttccaaattcttttcacaaagccctcaaaaactctgaaatgtggactagcaccagaactatgcaaacaatagaggttcgtcacaaagagatttcaacatcaacctcatcaagatcagttttagcaacaaattaatcccatattttcataggttcagagtaataaagcctagttgaaggagctctcacctggctagctttgaacttgctccaagtatctttagcagaacattgatagtcctccttttcaacctctttagcccaatttgacgccctaataagacctagagaagcaccaccggctggacgactcactttatcacacgaaatctc

SEQ ID NO: 101469 - DNA, 758 bp, Cannabis sativa
tgctatatttgtatgtataagtaaaataattctttcttttacttttatatatcacaaaattagtatgtagttaaatgaatttttgtgattaattcaatattgccaaattaattatattttttattttattattttatcaaaattttaattttataaaaaagtgtaaaatattacgaattatgaaatatataaaatatttgttatttatactaaataattaattaaataaagaaatattaggacaaatcatagaattataattttaaatttttcaaaattttaacattaaaaaaatattatatttatttttaacaaataaaactattttcttagctatttcttatttatagctattttcttatgaatattgtaataatggagaaattttttttatctatatttacatataagaagtacataacatgaaatttgaggtgctaaaaaagtttcaatataattacttttcaaaattttagtgatttcactccttagtgagttattttaagaaaatcaaacattgtttagaaatcaatatggtgttgtacttagagactatatatataagtgatttgcggtataattacctaagtaaaaaaaattattattcataacatgattgtttgacaccaaaaaaaaaaatttacatatatagactacaggtgggtatcataaatattatttctattcaacacttgatttttaatattaactaaaaaaatacataaaaataatatataagtttttaagatttattttat

SEQ ID NO: 101470 - DNA, 822 bp, Cannabis sativa
ttttttaaatgtatctttcgtacaggagggaaatttattaatgatatatatttttgaaagggtatgctcctctctacttttatgaaattgtaatttttttagtatttctagaaactgtaactacgcggcccataatgtggccaaatggcgtttgccaacaatgttacgggcatggtacttggtagagatatctactatacctgttaatatcttttgtaatgatcatgaggtctaacttcagttttatttataaacgcattttttaaaaaaaatatatatattttgaaagggtatgagatatttgacaaggacaaagaccttgcaacaagtcatttctcttttattttattctatgggattaacatgatgggtattaatttattaaaaaatacaaaagtatatagcatgtagtgtattattttatttaaaataataataatttatatatataaaaaaaagtatgagccggtgacataacactttaatactatgtttataaagagaaatgggaatcaattgtatggattgattctcattcatttgtttactaaattttggaatgggagaaactagtgggcccacacaaattaaggagaaaacaaggggaaatgttctcccccattttcataaagaatacctttctcgttccttaacgtaatttatattaattatatttttattaattaaaaataaaaaagacaatattatacttgaaattcggttgccatcttaatggaggacacgtgtcaagataaagagaatgtgaatcgatgcaatcgctttttatggaataactcattaattacgtaagtatcagagtat

SEQ ID NO: 101471 - DNA, 695 bp, Cannabis sativa
ataaaggaaagcacaaaaagtgtctatgtgtgctcttataattttttctttccattttttctattttctaacacattttcctattttgtttgaaaaccaaatcatatgtacaaactgtttagatttaatatatgtaggttataaatagtattcttacaacattacttttctttgtctaaaaaatattattttttatgggggattgatgaacataatattgtccaattagtttcaattttttttttgaagagaattatatttttgtacttttcaatatttgtcaagtttaaaataattataaaaaaaagctctttgattaatttttcatataaaaagtattatatttattttctatgtgggtgattggtgaacttaatcttgcccaattagttgtaatttttttaatgtgattgcaaaatatatttttgtatgtttcaatcttctttttaaaataattataaaaaaattaatttaattattttttcatattaaaattatttttttataatttttattttaattttatttaaaaaattaaaattatattgatttattaatataaaaaatttattagaataataagacactttaaatatatatttttaatatatacttccgtgatatgagactattgtgaattttaaaattttaagttatatatatttcatcaaatatgtgagtgatagatattattt

SEQ ID NO: 101472 - DNA, 557 bp, Cannabis sativa
tttttattaatgatagttgctcatagttttgcttgagtattttgttcttttctaattcgagtgttcaacaagagcgatgtttctattgaggaagaatcttatcctttaactgatttagcaaattaataaaaattatatatttacctccaaaaagattacacgtagttttaaaataaaacctaaaaatttcattgatcaagtactaataatccaaaagaagaggggagagagataaaggcattgaagatattgatgaaattttttgtttgttaaaagggagaagggaactaagagatagagagaaaatctttccatcaaaacatataaattttaatccctcgtgggagatttataagaaaaaaacaaaaatatgaaatagtgacataacactttaatatttttctaattatttatttttaatttttttttgtagttttttattagcttcataaataataattaatataaaatatattatgataactaaaaaaaatttaagccatttcacgttttggctttttcttcttcttcttcttctttctttttctttttttttt

SEQ ID NO: 101473 - DNA, 706 bp, Cannabis sativa
tataagaatcagcagcaaaacatagctgtcactacaatttatttatcgaaattccactctgcattgtcttgtgctaaaactatatcatcaatcttcaagagatccaaactcctagcaacaatcttgaaactttttgcagtaatctcgtgtcatgttctttagtaaaaattactgtacaaaatatgaacgattagtcactattaatttcattcaatgagtcactatatatatatatgtatgcttatcttttactggtcatccataacccaaacatagttttgaacaaagcagatacaaaagagacccttttcactacaatcaaaattcagaatttgttgtaactagtccttatgttaatatgccctgctatgcataatactctcttaaatgaagcaactaaatccacacaaaaccagagttaaatatatagatatagttaccactttcagtacttcattataaattttttggaagcaattcatcctttaattaataataaataaataatagtttacctttggagaataagaaacaacttattcttcactttttactttgttgcaatcactgaaccttgaaaaaataaataaataaagattcacatatagaacaaagaatctgaaacaaaatttatgtcccacacaaaaatcttaacagtacaaccttaaaatagaacaattatctctgtacaaaaacagagttgaat

SEQ ID NO: 101474 - DNA, 521 bp, Cannabis sativa
caaggctagggagatcacatatttcacctttgagaatcttccagaggagaaatcgttgacataatgttggtagtcctcttcattatagaacaatggaggttcttaccttgctttggctcttagttccctttgttgcaaagcttcagccaacctcttgctaactcttgaggacgaattggatgaggaagacattgatgtgaaaagaaagctttgtatgttgttagtagagatgaaggttagggtttgaaaggtaacaaaagagagtaaagtagaatagggctattaaattagggtagaaaatcagaatgggaaatgaaaactcagtggtggggtttttgagtggtgaaaaatcacatttgaaaggataaaaaagcccctagaatttggttcctgcgccatccagaattctggatggtttgtgcacagagaaccggaatttctgttgctgcagaaaccaaccagcttttttctttttcaaaacatgcccaaaaagcttcatttttgacccaaatgaccccaaa

SEQ ID NO: 101475 - DNA, 1035 bp, Cannabis sativa
cataatcaaggatcgctctggtatctcaaatctaatcacaaataaaatggtggtacaaactcgcagaggcgtggctgatccagcgaatccacagacagtggatcctgcactgtagaacccagggaacacaagggttccaccaaccacgaatcctaaacatccatcaactgtaggtcgtggtgtgatgactcctatggttgaaatcgcgcctggtgtgcaagagttcagcagccaaccagggcattcataacatagtcgttccgcccgctaccaatgtttaaacaactattggagatggcactgaaatctagaacctccgtgctgctcttggagtcatgtagggtcataccaacaccctgcatcatgattaggaagaactccgtgctgcggtgaatctcgcgtttgaagagcagaggcacatgtttgttgaatggagatataaggagatggaaacgttaagggctcagcaagcagtcattgacgaccgtactcggctggtcactgtgttgatacgaaaaagcctatcaggctactggacaacagcttgtaaccatgatccccttaggcgagacagatgaagatccagcgatgaacacctctcagactataaatggtcagccgcccaatccccagtcacaggttctacctatgggccaagtggtaggcgggcagaccttgtctagtaattcatcaggagagatcatacccaataagtccaaccaagttaatggtgtcggccaacaaattggccaaaccaaccagttgctaaggcagccaagtgtttctatatttgatagattagggacaactcatgatctcaaaaacgatttgaacagaaggagaggattggacgaccagcttgatgcgccaataaggcagcccagaacccgcgcttaaaatcctgctcaaagctatgctgatgtgactcaggtgggccaagaggccgaacaggttagtccagccgtgcaggcacagttggacgaactaaaaaatatgctccaaggcctggctggtcagaggaacaacgatctcgag

SEQ ID NO: 101476 - DNA, 830 bp, Cannabis sativa
  modified_base (321)..(328): a, c, t, g, unknown or other
ttccatgaacgtgatgtcatcgcattctcttttgaacaacttctctggtccttcactgaggttgttcacgttggtgagcgacttctccttgacatcctttgcatatcgctcttgcgactttctggagtcgcctgcgatatggggcctgcctatgatggtcaatatattgcgaggcattctcgaaccactcgcgttttgattttcctctttgtcatctgcttggggatgactttcctcgttccttttatatttgttgaatttccaacactccaaagtagtgcgaccaatatctttatgatacttatagaattttttggggtnnnnnnnntcgcggtttcccctgatcgggggtggcttcttgaggaccccatttttctcttcgatagcatagatatggtctcgtgataccgcgagctcagtataattcgcgaagcgcggtccaccttttcttttaggcgaggattccttcttcggaggggacttggccaatttcagacttcggtgtctccatggactgcgtcttcttgggcttcgacctctggaacttttccctcggggactgcgggatcgtgactgaggcactggtaacttacccttgtctttgcccttctccaattctgccagagaattctcaatcctcttatgcggttctgccatggcaaagaactcgactagcaattctggtctctgggcctgtagctccttccaaaagtcggttctcggcagtacacctattattagcatacagactagcgaagactcaggtgccttctcaaattttgttatttcgccattaaaacgcttaaaatagacctggaaagactcaccgg

SEQ ID NO: 101477 - DNA, 908 bp, Cannabis sativa
atttgtagtatccaacatgactatgaccaatcccatggtgtcactgttgactgataacaagctcaaaggagctaactttatcaaatggatagagaacattaatattgctctcattggtgtaaatgccctatttgtgttgactgaagaggctcctgagcagcgaggtgagaatgcaaccacggcaattaaagaaaagtttgagctttggcagaatgctaacaataaagctccattctttatgctatctagcatggttgactccttgaaaacaaggtttgcaaacactctcacggctgcagaaatcatgaaccaattaactgaactgttcgagatggaatcaattcaagctcgctttgaaacgaccaagaatttcatcaatccacggatgaaacctcatcagagcgtgcatgatcaccttctccagatgactagttccttccaagaagctgagaatcatggagttgttatagattagacaactcaagtgagtttgatcttgaacagtttgactctagcctttctgcccttcacttcaaattatgtcatgagaaagttggagcttgacttccacgagttgattaacaacctttagacatttgaaaattatattggaggaccacagaaaggaagagctaaagctcctaattctgggagtgctaatttatggctaaggctgaggaaaacattgcctctacttcaaaacccaataacaagaagaagtggaagaatatcaagaagcctattcaagctgggaaaatagtgaaaaagaaaaaggttgctaatcccgatgaaaagccaaaagtaaaaatgcttctattgcaatgaaaagggccactagaaaccccaatgccctaagtttctagcaaagaaataaggtatttctttatatgctataaactcatgtgttt

SEQ ID NO: 101478 - DNA, 652 bp, Cannabis sativa
agcagggtacaaacatctggttcaagagcatgaaagagtggattggtgcaatgaagtttggtctagactcaataccccaaagcataactttctcacatggttggctatgttacaaagattgaaaactaaagaccggctctgcaggttcaaggtgattgaatctccggtttgcagcttctgcaatgttgcagatgaaacgattgagcacctatttttcaggtgtgatttctcccagcagtgtctattacaggtgaagaaatggcttcagtggagcacccgagctgatactctgcaggtcattctaaaaagcataaggaaggctaagcaaaccaagtttaagaagagtgtcaaagcataaagtactgcagctcttgtatacttgatttggaatgcaagaaatgaactcatttggcaaaagaaggtgcagtaggcaggggacatgttctagcagcttcaaagaattgtcaaaattagaacaatgcttgtaatgccacaaaaagtgaaaatcaaagatagagaatggtttgaatgcttgtaaatatttgtatagatttattgaggccaaagatggtgcttttaggatgtaaataaaagttttgtgcaatgaacaattcctgattcatcaaaaaaaaaaaaaaagtgacccatgaat

SEQ ID NO: 101479 - DNA, 927 bp, Cannabis sativa
ctagtcatttgaactctatatttgtattatatgtgttatacaagtcattccgaaccattatgccaaagataacattatgttaataataattaaaataatttgtgatataaataagttcaatttttgattgtaaataaatacataattttaatttttaacagtaataatatttaagttataattttaaaacttctgtaggtactaagctcttaagtattaagtaaattgacatgtgacaatctctgattgattcaagtagttaaattcttattttttatctaaaaataaatttaaatataccaataaaaaaatgatatgtggataacgaattgacactcaactaatagatatctacgaaagctttaaaaatataacttaagtattattaccgtcaaaaattaaacttaattatttatttacaattaaaaatcaaacttaaatatttacgccttaaattatttcaaaaaaatatcacttttaataatatattgtatctaattaatatataaattcttcattttgatgagggggcagcctcttgtcccttggtaggtccggccatgagtgttatatatataataattgaatgagaaagagaaaacgtcatcaaggtgaaaatcataaaaaagaaaagaaatagaaaaagaggtgttgtctattctattttgttatctttaacaagctagttaacaaaagcaaagattagccaagattggtgtcgtttttatggctttaaaaaggaacgttgcgtcagtcttcacatatatatataggcggcaactacgtccgaggcacgtgttattttattttttagaatttttttatctaaaatatgtaatttaataatagaaatattatttataaattttattgaatattttgtaagataagatgtttacccattttaaaaatattacataggataag

SEQ ID NO: 101480 - DNA, 576 bp, Cannabis sativa
taacttctgctatgtatatatataccatataaatattatatgaatgatcagtacaaacaaattatattaataattggaaagtgtgtttggaaaaccacgaggaaattagactcaggtgtaattaaaggtaaatatatataattttacgtatttgtcagactacgtaattatactgaaattggctaattatgtaattagaagtaattaagaggtctcaattctcatgccgtcaatataaatttaatataattacactgtgtaattacttcaaattttcaattttaaaatatgcatacaatctttagtgtgaatattattaattaagtctcattaattttaaaaagggaggagatagtcaatggctcatatgaacacacacatgcggtccgacggagctaagttggtgggtgtggatcgacttctctactaatatacggttagaaagatatagataaagttttatctcaaaattaattgaaaattaaaaaagttgtcaataaatcttatatatcctataatatttaatacattaataatctgatattttttaacgtctttgctcatcaaccttaaaat

SEQ ID NO: 101481 - DNA, 663 bp, Cannabis sativa
  modified_base (608)..(613): a, c, t, g, unknown or other
aagaaaaaattcatattcatatttttttttctcttcctcaaagtataaataaacactgaaaagagaagaaagaagaaaagagggaggaccctgaattatctatgaatcttagtgtatatggttgtggtgatttttttttaaactaagttgaaagagaataatgagggtaatgtttttccttcttaaaaaatcaaaatcaaagactcctttatatatatattatatataaatatatgtaaagtgagattgatgttcttagactctctcttttaaatgtcaaaattcgtaaaaataaattgcattatatattgttatacttatatgtgtacctttttattctaaaagcaataaatatgtacgtaaaagtattaagattaagcataacaatgctatctaataatttcttgagccaaacttattataatgttccattgaagctattaagaaaactacattgaagtaattttgttatattggaagatgtatatattgtatacagcagggccggtcctaaggtatatggggcctaagacaaaattaaaatttgcggcccctatacatagattaactacaatagaacctatatttaagaatactctattcaagannnnnntctaatttgttataaaaaaatcaagtcccaatttgggccagttataaata

SEQ ID NO: 101482 - DNA, 542 bp, Cannabis sativa
tacccattaagaaatattccatatatatatataactatctccttacgtaaccaaatgtctattttcttacaccacatatatatatatatgtatgtctatctactcatctaatctcgtatttcgggatagacatccaaatatttttatttggcccaacttgtggcttttataaggaacttatatccaagtatctgtctaactgattagactaacaagacgagcccccttgaagaactaattgtttgcacaaacattactcaaccaagaaagccacatacacgcacgatacaacgactactcaaccaccatgctcgaaccattcaggcaactttcttatcccaaataatgagatacgcgtacaccacttgacttaggaaggtaagccgcttggccaacacccatgttattcaatagtagcacttgatttaatattattaactctccagctagaatgaattctagttagagagtgagggacaaactgtagaggtaagaagttacttaatatttacaacatatttgagaagtccaatatgcaagtc

SEQ ID NO: 101483 - DNA, 697 bp, Cannabis sativa
taattatggtggagagaataatattattaatcatcactcgaataagaataataatatcataccaattcaaaaccaagctgctaaagctttttcttcttatggagggttcattttctaaggattatgatcgatgatgatcatggtgtacttgtctctagctagctatacgtgggtggctgcacattattaattgaaatttattaatatatatatgtatactcttagaggttctaataattatattatatatcttgtgatgatgattttaaatttttaatgtatgatattaatttagtcatgattccataacctatgtgtacgcagtagttctactatttgtaataaaaatttcagacttaaagtactgattattaattaatgtaatgattatgaataattatatacatttatatatagtgtagtactttcatttcatattattatatgtatagattattttgatcgtaattatattaatgctttgattcgggccggttgcgcggccgtattcttattatgataatataagaaatattaagtactaatttaaagacatttttgtagtgatgctaatcattagtgttttatctatatggagaatctacactaagatcgatctctaattaagtacttcagtggaaatttccctttgccactcaccctattaaattcaccataataaaaaaaaaaaaaaaaa

SEQ ID NO: 101484 - DNA, 505 bp, Cannabis sativa
ttttgtatttttctgttcggccagtaggccttctttttagacgaagtgaccggccaagcggtctttaaacttggaatattttttatttttcaaacaactggatgaccggacaacttttaatcccaggtttaaattctttgttattcttaatgaatttcgttccttgtttatgatcgttgtgcaacagtgttcgttttgtttttttgtttctatgcttgttatttgtttttaccaaatgatttgtacatgtataggtgcccccaagtgaccgagaaaacttttgactcttggtcacttgtttttcacaagtatattttttgtctgttcgggtctatgggtacaagcagaccttttgtatgcatttaatggtaaatgtataacttcctaataaacttgactcaatttgaattgaaataaacatctttattcatttattggccgggaatatgtttgttaccgtagtaacttacattgaagatattatattgatctagtctgatcttta

SEQ ID NO: 101485 - DNA, 665 bp, Cannabis sativa
gatatatttaaatgatatagagattacattgaaatatagttttatttagggcataaagcccaacacaggtcacatcggtgtccctctcatctccgtctcatacgtcgcaccaccaccatctcccgtccgtctctctctctctctctctccgagctcggtattaatacatatatttatttatatacttttttatttattatatatatttattttgttattgtataacttttatgtttgttaaagttagttgttattgtaacaaaattaattagttgttttattttaatttgggtaaaattataaagctaatgcaggaaaaaaaagggagaaagtacagatttttctgccattaatggtagaaaaatcggtatttttcttgctttattttttacattctcgatggtttaaaactattgcttataatagggtataggcgatggttttaaaccgtcgcctatagtataaagcacaatttaaaaccgtctcctataccctattataggtgacggttttaaaccgtcgggaagtccaaattagcgacggttttaaactgtcgcctattttgcacgttttacgacggtcgtataggcgatagttatagaaaccgacgggaatactttaaacgactgtttaaaaatgttgagaaaaaccatttttgtagtagt

SEQ ID NO: 101486 - DNA, 633 bp, Cannabis sativa
aaaaatattattagttattaagtgtgattattattattatgtatatttaaaaaatattattaattattaggtgagatgttacctatacttagttaaataaacaatgtcattaaaaaaaatattaaagatttaatattaaacataataaaaggaaacaatacagttacaattaaaaaaaaaaataaagacattttataaatttttaaaatataatgttaaagtatatgatgttgggatggtagattttggtagtgggtgtaaaattctttcttttttgccccgttaaaatcttgtgagtagtttcaaggcctgcaagcatataaaggagattagcaaaatagtagactcaaatgagcactatgaaatgaacgaggattaagaaccataattgttgctgatcctagctcaatgaaatgaattaccaattgctttgtctgaaatcatagtcccatccaaataatatggttcccttcttgtatccaaattttagatgcatttttatcatatcatggaaatagtaaacatgtgtgacgtacaagtattttataacttaaaaagagctagtttcacacactaaaaactatggtagagagatgtttaccatttaccaacaaacattccaagaactatatg

SEQ ID NO: 101487 - DNA, 575 bp, Cannabis sativa
ttaagatagatgccacgattgccttgtttgcacccccaccaaaaatctctaaccatgccgtctattttagctacaacttcatcgtttgcatggtataaactggtaaagaaaatcccaccgattttatctgagtagcacgaccagctttagataaagatttcaacttccacccatgcaactttgagaccaagttatctatgatgaaattaaaatctacatctttcttacgacttcggaataacgggagatccaggtagttaatgttacccactcccatgctgaacccaagagtttgcttaataccacgcttcatcccatcactagtattcttgttgaaaaagatggatgttttcactttattaatatattggcccgaccaatcacagatgtaaagtaatattgcgttgttgatgttttataatactccgaatgaaacagaacctgtattgagattacatataccttatatatatttatataatatgggctatttaggatttttatcccccaatatctatgacttatcactattatgcatagcttagttagttggggtgtatgacacattacacaat

SEQ ID NO: 101488 - DNA, 723 bp, Cannabis sativa
  modified_base (284)..(284): a, c, t, g, unknown or other
ttttatttaattagaaaaatatctcattttttcattatatgggctgtggttgttccatcggctgaaaaaaaaaagaaaaaaaaattcggcaaaaaaataatgaaaaaatattgagttttacttaaatatttttcatataaacttatttttcatatagtgtaaaaagatgtattttttgatattttcattaattaagtagctaatttaagtgtagaaattcaaaactttcttttattattcgccatcggatcacaatctaatggcttaatatttttaaaattaanatttatagttaaatttatttactatctatcaatgggtaatatccattaagaagtattccatatatgtatacatataagaacatataaatgggtataaactgctcggttttgggtgagagaggtaaagattagttgttgggtgttttgattttaaggtatattgttttgtataataaatatgttgaatattgtatatgttaactattaactcttttatttatttagtgcctattcatgtatttttaatttttttactagttagttactattagtaattcgttactaattttcattcatattcatgtattattactaattagttattcattagtaaccagttagtaataaattaacttaactagttagtaactaggtactcataaattatataactagcaagtagttaaataattaaatttttaattttgtagtaattctt

SEQ ID NO: 101489 - DNA, 709 bp, Cannabis sativa
  modified_base (667)..(668): a, c, t, g, unknown or other
ttttaatggcttctcgatatcgatccgaacccgcaccctgagatattccctccaaacaccattgaagttattctcatcggttttaacaaagcttccgatatagttcgcagcgtccgaaaccaccctttccgtcttaaaacccgcctgaatatcatgcaattgaacccatatttcgaggtgatgcagccgcaacgccctcggaacatccccggttttcaatctctcaaagattaacggagcatttttgaacgtccatggactacgatcaatgacccgctgaatatctatctttcacatacatacccatacctggcttccatagcaccgccatcaagttttgcatcgctatgaagtcgatcggagtgtccgtaagaaatcgaccaactatgctccaccgagtatcgacctcggcatcatcaaccaacggccaatcgtattgaactgctggctcctcctcctcctcgagtgggatgatcgacaagctaccaccgagatcctcaaaaccatactctgctgccatcataaacgccctctcaaccactcctcgcaccaccgtaaaaaccagacaaaaactcaacaaaactaaacaaaatcaaagagacaaacacacaatgtcaaaagacaagacaaacacttaattggtttttttaccaggatcttagatctnntcacaagtatgttgtttaaacaccttaaatatgaactttct

SEQ ID NO: 101490 - DNA, 1169 bp, Cannabis sativa
agggagctatatcagatcccacctctataaaatcttcgtgttctttggcttttgagttctaattgtgtaacacgtggcaaatatcaaattaatacgaccccgcagttggttggccaccttttgaggtgaacacctttttggttgttaagtaccaattaagcacattaagtgctagctcaaaaatacgtggcgacatatttctttagcttatttaatacatagtccaataatatgtcaccacatatttttgagttgacacttaatggccaaaaaaaggtatgactgcaaaaaaatcgtaagataatgtactcttgtcgcaactttttcttttgattaggatcatatgtgtaacaattataaatgttaaggggatttcgctacaaatatctcttttttaacaattaaccacctaaatcatttttttggtgagaaaactacccaaaccccatttctgttagttatttaccctttccattcaaaagtctcaattaattgtcacggtggactgtctctgtgtacacaagagtatatgtgtcaaaattaaagtggtccatgtaattttaatttcaaatataataaaaataatttttttctttttttttctcttagcttgctctttcttctcgaaagatccttgtgcccccaacccttcttcttctgccattaccagatccttttctcttttgcagccgctgacctcaattttttttagccaagatgtctccatcagagccgagcctagataatgacaatatcagaccctcctctctctggatatctttccccctattctatcgccaaccttaactgtagtcagcccaaccattgtcacaatcggacactcctacgctgtcagacccgagcccagcgctatgccaccgtcaaacccccactctctagatattttctctctctcagatcgccagcacctccctccacaatcaagcccagcttcggtccaccgtcccctctagcacaaaccaccacctcctgcataatctgatgtctattttttgttttttattttttttttccagatgtctaaataaaatttggtagtgtaatatgaaattgtatttgttttttggattgatttgtgaagagaagatggggagagggagttgtatgattaatgataaaattagtgtttttaatatttttttaattat

SEQ ID NO: 101491 - DNA, 1370 bp, Cannabis sativa
tcactacagatgaatatttaagatattcaaactccactaaacatgcattgataattaattataataacaaaaagttagtgaacgtatatacctatagcaactcaaaatccgatcaacaccaaattcttctgaacctcaaaaattagctcacaacctataatataatgaagtacaacaaaattagaattttaattatttaattacttactagttataaaaaaagtaacaagttactagttactaaattatatagattaatttttaaaaaaattacatatacatacatatataataaattatatctcacactaacacaattttaaaaaatttatttctaaacatattaaatccctcctatctcattctcattcacaataaatatatatacatacatatatattacttagaatatatacaatacaattaaaattttttacataaacaatatatacacacaatacatatatataaatacatattcaataaaacacaaaatatataaatatatattatagatcaagttaataaatatttaccttataaccgcaatttgacgaccaattgcgacaaaaatctggccaccatgcacagacaacaacataatgttaataaaatggaaaagatcaaaaaaaaaaaattacaaaaacgaaagtaaagcaatgtacactaataaaataaatagaaatcatatttataccttaatggatgttgagattcaacgttttctccaccaaaatcggtggccggagttatactaccacatttttttaatgggttcggttacagtgatagaggggtaaaaaccaaacttttttagagtatagttttatgtatttaaaatagaagattttaaaagaaaaatggggtaaaatggtgtagaaatgagagagatatagtgatttttagtagtggttggcgagggtttcgtgggtttttttggttctgctatggtggctgtttatcgtgctgaaggaaggaagaagatgaattggggaagatgaagtctgaatgttgtatatatatactctatggcgtcggttattagaaaataacagacgccataggtgcacacgtgtcaataaagtgtgcacttattgcgtcggttattttctaataatcgatggcataagtgtaagaaatatactaaaaaattttcaacccccaaccgactataatggttataattaatttctatagctacggtttttaccaaaaaactgcctctaaatgtcaatttcgaacaaggcggttattatcacaccctttagcttcccttttaataaattggattgaaaaacacaacctctaaaggtccatattgtagtagtggaagttgcccaacgtcaacttgggtgccaaatacttggaaa

SEQ ID NO: 101492 - DNA, 1143 bp, Cannabis sativa
ggtatagtaagtgtttatattattagctattggattacctacctagactattatagtgtatgtggggaaaagtaatatagtgatgattatgataagaatatgttaatggcatatgcatattgataacgatatctgtttaaattctaaatgattgaaagttctggatcacaagtgcattagatcatgcagcagcggtctggccgtttgaaccgcaagctggggctcggggtaggtggtgaaggagagcatcctccacctccttaaaattaggaatgaatgttttctgccatgcaagagacatttaggcaacaagaggagataatttgagacctcagagagcaacatgctcgtcctgtacctatattggcacctcaggtagtgccacctaatatgtgggatcatatggaaccaatttatgagcagtttaggaaacaaaacccgcctgtggtccagacccactgaaggcagaacagtggatgagtatgattacttctttctttgactttatgcgggttgaggataatgatcgggtacgatgtgctatttacatgttacgtgatgatgttcggatatggtgggagagtttttctcaaggtcattatctgaataccatgacttggaatgtattttgagcaatattataatgattccattcgtgccgctcaagctgaagagtttgctcagttagtttagcgtagcatgactttgactgaatatgctaccaagtttgataggcttgtcaaaattactcctgatgaagtggtgactgaagctgcaagaaaagctaaagtttatcagaggcattgaagagtatatgctagcagtgttgttatggcagcaaaataattaggggttgtgaagacctatcctcagattatgaatttagctctcactactgaggggactgaaatcttgattcgtaaaaagagtaatcagaagaaggatgtgtggaagacatcatctggtactggaatgagtaggagttttaaccctaatgataaaaataggaaaccaaaggggccaccggttttgggtctaaacagaaggtttcaaggtaaccagggttttcgttgaggcagaaacgaagcttggccgtcttaccctgaatgtccaaagtgcaagaagcaccatttgggtgaatgt

SEQ ID NO: 101493 - DNA, 632 bp, Cannabis sativa
acttatcttttatctttctttgaaacttaaaattctcatgtgtttctcatggaattaggatgaactaaatttaaatcctactccttttaagataagatattctaaatttaaagaataaagaagaagagaacagatttttaatcttcggcttatcatttatctttttttctttttcaactttaaatttaccttaatcttaaatgtattagaaattattgtatctttaaatttgaattcctattcctattctcataaggaattcaaaattcattaagtaaaaggagaagggaaaagatgattttcttttccttatcacttatctttttctttcaaatataaaatttaaaagactctcaattcccataggataaagggatttagtttactataaataagagagctctcactcaatttttttcactttatcctttgctccccatgcctaagccttcttgagagctctatattttgatctttattagttattcaagtgctcttcattcactcaggtagaaaaaaattctttttttttcgctgatttttttcttgaaaatatgtttcttcttcttcttttgttgagcttgttctaaggattccaaaactcacaaaaaatcctcaaattctatatttaa

SEQ ID NO: 101494 - DNA, 704 bp, Cannabis sativa
aacgtcaacataaatttaatgtatgtagcattgctagtaaaaagtgcatgtaatttgcatgtttatctaacattactcttttaataatagtgatatactgacatgaaatatattgggatgtaagtttgatttgaaaaattatttgctcaacatttataattatatttgggtatataatagcattttaagatgcaaattcatacaacaaataatttatcattgatgtaatcatattaggaattttttcaatagcatatccttgttgcattgtaatcggtgaaagaattatattgctcattttttagcaaaacgagctttaaatttagatgaggctcagatgtaatgaccgagcttgcccactgatttagctacttaaatttgcttatcttttgtatcccaattttttagcttgatgtattttaatagaattcctccgtttcctttcaaaaaaaaaaattatcattaatgttaattaattaactaaatatttaaaaaatatatatataaatagcaatagtttaattaaaacgatataatgaacattaaaattactgactaatgttaaaagtgtaaaaagtatcaaatttatatatgctaaaatataacggtaaaacttatttgacactctactaaaaatgctctgaaatattatcatcttttacagtaaatttttttgagggtgcagatcggttattaaagtagtt

SEQ ID NO: 101495 - DNA, 809 bp, Cannabis sativa
  modified_base (522)..(527): a, c, t, g, unknown or other
tattttactcagatatgctatcatcttttctcctcgagcctcgtattctccgaatacatgatttaccacaacctatgaatcactatagatttcaatgtgcttgactttcatctcttgggctagtcttagtccagcgattagagcttcgtattcggccttgttgttagatgctttgaatccgaacttgactgcagcgtgtaggtgttgcccaccaggcatgacgagggaaatccctgcaccagatagttgatatgtagccgacccatccacatgtagtttccacgtctatttgtcttcattggacttggctgaggtgctggctcggggttgctttctggtatgctttctttttttgcctgcgcattctaccacaaagtttgccaaggctgggcctttgattactattcggggttggaaagtgatttcgtactggcccaactctaccgccctgttgcgtagtcgtccaaaagcatctggcttttgcagtatttgtcatagtggttggtcggtatatacccgaannnnnngagcttggaaataaggcctcaacttccttgttgctagaatgagggagtaggcaagtttttatatcaacggataccggccctcagcctcaatgagcgttttactgatgtaatagactgggtgttgtaagctattctcttctctaatcagcacgacactcacagcatgttccgtgacagctagtattttcccagctcctcgccgtccagaggttttgaaagtacgggagctttagcaagttgtgcctttagctcttggaaagctttttcacattcttctgtcca

SEQ ID NO: 101496 - DNA, 1294 bp, Cannabis sativa
caaatgccagaagccacaccgacatcaacaccatcgaaggtctcttttgtccatggatgaaccatggacgcaagcccaccacaccacagaccaccattcttacccacatagtagggatgttcacaaaaattaactaactgcctaactagaataaatcgcccaaaccaaactgaataaaccgataaaaaatacaactcgaataattttacgaaaaactcaaaccgcccgatgaatatattgagtgggttgaatattattctaacccgcccaaataatgaataaaccaatttatatattttttactaaaattatttataacataatatataaattacatttagtagttaaactattttacatttaataaagtttttattttatagtgtttattttgaaatttagaatttatagttgataattttgattgcatttgaaaattgaagttaaaatttagaatttacatatgagtatatatttttttattctattttttaaaaaatattgtttaatactttaatgtttattcaattcatatttattttttaacattaatttaaactataactattttaattttgaaaagcatatactatacatttattttttcaaatcaattatttgaacaccaaaaacttacaacaatgaaaaaaataaaaaataaagatcggtttaaacgggttaacccgaccaaaccgataaaaatcattgggcgggttacattttttttattttttttattggacgggttacaattagaaatttacaacccgacatttatattgggttagtaaaaatacactataactcgaccaaactgaccgatgtacacccctaccacgtagagcccccaccagcaaccattgcaaccccagatctggacaagcaaccacccaaaaaccaagaaatttgaaccaacctgatgagccaagaaacaaatcccatctcatgacctagcacccaagatcttgaaccatgactcgataaccagaggaacacgattcctaaacgggcacttgagtgatcgctgcatcctacaaccctcaacaactctgccacccacgcctaagagagagagacatcagaaaggaaaaaccttatcaaaatgaccatgacacataaatcaaaacccaacgagtcatgcccaacgccagatgaggctaacaagctgtggtcagattgaaagaagattgtagcgacaaaagggttagagagaaaccctagtagccaaagagaatccaaaataatcaagtgttgttttaataatagaattaaatttgtcaattatacttttatt

SEQ ID NO: 101497 - DNA, 824 bp, Cannabis sativa
aattctgttggtttcaaattcttattttttttaggttcaactagtttatgagacgtcaaggtgcaactgtcagattgcctattgatcttgaaatggagaagacttgcagacaaaacaaaagaatgaaaagattggaaaaagctacactagagattgaacacgaagtagatatggctgacaacgcaaacgtcagcaacaatggtaacattggaggtgctgtagaagactaggctaatggtcgcaaccacaatgactgtagcatgagggactatttgctaccaaatttgacaagggccagatcctgtataaggccaccagtcgttgatgctaataactttgagatcaagccggccatactgcaaatggtctaatcttcagtccagtttggggggctgccaactgaagacccaaagatgcatcttgctaactttgaagaactttgtcagacatttaaggtgaatggagttagtgacaacgccatcaggctaaggttgttccctctcttattaagggagcgagccaatagttggttggtatctttaccacccaattctatcaacacttaggaggaatttgtcctgaaattcctatccaagttctttcctcctgcaaagatttccaagttgagaggtgaaattaacaacttcatccaataggacaacgaatctctttacgaagcctgtgagaggttcaaggacttattgtggaagtgccataactatgggattgaaaagtggttgtgatacgaacgacaccaacagttgtgatgaaacctgacaccaaatgtggcagactctaagaattcttgaaatttggatgtggaa

SEQ ID NO: 101498 - DNA, 521 bp, Cannabis sativa
aaaacttgtctggggcgggttctgatttctacgcctgccaagcattatgaatgtcttgagctggaattgccgcgggcttgggaaccaacagacatttcaattccttaaagagttagttactcaaaagaaacccaattttgtgtttttatgtgaaacaaagtgcaataaaaaaagggctgagtgggtgggcaatcagttgggctttgaaggatctttttgtgtggaggcccaagacttgagtagtggattggctttgtattggaaagagaaagatgagggtgtcttgttgggcttctctaataatcatattgatgttagggtggataaggttggctgtacaagttggagattcaccgagttttatggagagccaaacagaaatcccaggaatcaatcgtggaaccttctctttactctgttcttgtcttcatctctcccgtggtgcttaattggtgatgttaacaatattcttagccaggaagacaaaaaaggtgggcaaccataccctgttggtttattgg

SEQ ID NO: 101499 - DNA, 726 bp, Cannabis sativa
gataggtatccagatacgaacctacactgggacctagacctggactgggatcaaaatgctgaacctagatctggaccgagatcctgaaccatacccaaactttgacccgcactcgggacccgaacttggacctggacccaaacttagacccagataatggtccagacctggacacaaacccggaaaaagactcgcacccgaactcaaacacccacaccaagaatgagacccaaagctagacccggaccaggacccaaactcgaacccagaccaggatcagaacaaaggacttagacccagaactaagtatagaatcacttcgggattggaacatgggactcggacccaacctagaccaaaacccatgatgcgaacccacacccggagcttgatctggacctagactgaaatccgaatccaaacccaaactcagaacaagactcgaactccaaccagaactcaaacctaaacgcaaactcagaatcgcaaatggaactagaaccaaactaggactaggactaggacctggacctaaacaaaaactcgaacccagatgaaaatccaaacagagaactaaacttgaatcgacactaggactcgaacacgaacctagaccaggacccaaacccacacaataactgggacctagcccgagaatcaggatagggacctgagaaagagaactaggacccggacttattacccgacccagacccgaacttgaac

SEQ ID NO: 101500 - DNA, 737 bp, Cannabis sativa
aattgtttttggaggagatttttgccaggtgtacctgtggtacaaaaaggaacgagacaggagcagataaattccatcttggtatattcatacctgttccctacattgactaaatttcgattaattcaaaatatgagagccaggctggatccgttgttttcagactacgtgttgttggtcggcaacggcatgccaccaaacacaatcaatgacataatcaaaattccaaatgaaatgcttgtaccgtatgatgaaaacatcaattccttaaatatcttgatagaaaatgttttccacaacatttagcaatatccaaaaaatgtgtctgccatgatgaactgtgcaatactaacaccaaagaaaagctttgtcaatgaaataaattcgttgttaattggacggttcccaggagaagtccacctatactatagtagggatgatgcggtagatagtactaagcaaatggtaatggaggacttcttaaacactctaactccgaatggactacccccacatgaattaaatctgaaaaagaattgtcccataatgctgcttagaaacattaatccttctgaaggtttatgcaatggaacacgtttaatatgtcgggcattcgaccaaaatgccatagatgttgaaattgtcgtgggacaccatatcggaaaaagagtgttcattccaaggataccattcctgccaaatgtggatgaaaatagtggttttccattcaaacgaac

SEQ ID NO: 101501 - DNA, 604 bp, Cannabis sativa
tacactatgtttggtaagaggggggagatgggtggatggagaggggtggagggagagtgatgaaaggaaagagtaaatcatttgtttggcaagaaagagagaaagagggagaggggagatagagggaaatattctccctccaaatctttaaaatttaatctctctaaattcaaaaggattgtagaaaaaaataaaatacattttaaaaattacaataactatccttaaaagaataataaattttattgttagaaggatgattttataattttactaatcaattttttcttcatccttcccacctcacacctaataccaaacaatacaaaggagattaacaatcatctccatcccttttactctccctcatctctaacctctccatccatcctactctccttccctcccaccaaacatagccttagtgccaattttaggctgacacttatatttttttatggaatcgataccaattttaccaagacataaagtatattcattgtattagttttaaagtgagacttttggatattggtattagttttgaaccgacacttataggtataaaatttatttttgtactatatgtcttgatttagaaccg

SEQ ID NO: 101502 - DNA, 551 bp, Cannabis sativa
tttttatgttaaatgggttttgagttatgtattgttagtgttagcttgttatgttaggtacttagcaaggctgagtgctgatgtattagttcaaggaacagtgatgattaggtcttttctggagtttatttaaggcttcatctgcttgacttgtgaacaaacctaagtagtctcataagaaacttaggtatttcatactttcgttttgcatattatgtatggggatgtatgctgaaattattatcgacttatcatggagtctctatgctttcctcacaattctcttattaagatggtgtgccaaccaatagctaacagataaagagtcacatcacattagaacaattaagcttttactggggttcctatggagatggagttgagtattacaaatgtagaaagttctctcggcaaggtggctttggatgagatcagtgatcaaaggaaacatgattaacatagttaaataaatatatttaataatttaaatatattataattatttacattttttaaaaaaacaaaagtagctaaatataatattgtatata

SEQ ID NO: 101503 - DNA, 744 bp, Cannabis sativa
  modified_base (48)..(48): a, c, t, g, unknown or other
tcactttcaatatttttttaaacccttttttttttcttaatcaatatnttggacttcgatcatgacccgaacccaaatcactccacggtcctggtgttgaacccggcctactgacttgaacccaaatccgactccgaacctagacccgacgtaaataaaataaaaaaataaaaaatgaaaatgaactttacaaaacacacttgtgttttttgtttttaaaattgaaaaacaaaaatggttaccgaacgcatttttatttttcaaaagcaaaatttttaaaaacaaaaattttgctttcattttgtgattaaaaaattagaaaacaaaaatgttaccaaacggcacctaaaaataacactatttaaagatatgtcatgtataatttattggtgaattgttatgattttatatgatgatgatgatgatggtgatgatgatgagtctaaatattagtagcttgttgattaatcagattgatttccatgtgagggtggttgctggaaggggggctgcattggagcaagcaagagagtcagaagtgacatggctaatacttgataagtaatattataattaagttataaatattaatttcattttaatttaaaagtttttctctgtacttcaattgagaaaagaataattaagttactttgagatgggttggttggcaatgcagggagatgaagagagaaaaaaaattcttcttggaaaggctcgattgtgacatatcagtaataaaac

SEQ ID NO: 101504 - DNA, 604 bp, Cannabis sativa
aactgttcacattgagtaaatggtacataaagaatcaagagataattaaaagggtaaaatgtattttttaccaactttgattatgaactaataattggagagcgaattacttatattgattatatcaatagattacaagtaaaaattctataaatataattctatcttgtcaaagagtgtaatttcatatttatagtggagtaataatggaattaataaactgaattattctattgatgagatcacaaataatcatgggtttatcggagcttcaaaatataggtccatggtccctgactcacctctatacaacactatacagagaaaagttttatttgaggattgaatttcgagtgagaattaatttctatgtaaaataaattcttaagggtaaaatagtattttgtgaaattattattttgattaattataattaaatttttttaactatttagttttattagataaaactatactaattagttaaatataacactattcttagataatattaaagagataagagaggactttgctcatttcttggaagccactaattgctgctctgaggatattgctcaaggtaattcctctaatcccccta

SEQ ID NO: 101505 - DNA, 701 bp, Cannabis sativa
ataggaggcctaaaccttagattatagtttgaaaccctagatatttgcatagtttgttagatatttacaaaagactaaaatgccattgaatctagatattattcggctattttgctgggcttttacgacccaatttacagcccatgagttgctgtccatgtgtagaggtgcacaggaaaccctgcaaaccacttcttggctgaccaggcccctatggagggtaggatggctggccatggtgcagtcccaaggttggccgaccatagggccaactcctatgagggagctagtctatcacctgatgcccttttgagtgtcggtgtctctgtttacttaggtgctgacttggccttcttattggtgagttgtactaccacgtggcactaattttttccacataagcgtgccacatcaaggagataaaattggggtaacgtttgcccctaagtccctgtgcgaacgtctttacagagaggactttaccaactatgttggtgcggcgggactgttgtagcccttgctgaataaaagttgatgcattttttagccttttgaagcactttgtcttgactgtctaatctcattgttgtagagaaatggctgctttagttgccttaatgatgtgtaggtgaggtaagtaaagaaaagggtcccacatgcattatataagtgacttttggggggggggggggacctttttt

SEQ ID NO: 101506 - DNA, 1000 bp, Cannabis sativa
  modified_base (742)..(748): a, c, t, g, unknown or other
agaaagctttccatgagttgaactttccaagggccagcttgaaataccattgctgggcggcttctgagaaggtagcaggaaaaattctgcaacatacgtgacctcataccccctgcaatccatttgcatcttgaaatacttgaggtgggaaagaggatcttctcttccagtgtacatcttccaggttggcattttaaacttgtggggtaatgccaggagattgatctcaggagagaaaggggttccacgtgcttggtccaactcgagatcgttgtttctctgtctggccatgccttggaacatattctttagttcgtccagttgtgcatgcacagctggactaacttgtatggcattttggccgatctgagtcacgtcagaatctttctgagcgggaatttgagcacgggttccaggctgcacgatcggcgtgccaagctgatcgtctactcctctccttctgtttagatcatttttgagatcatgagtctttcccaacctttcgaatcaagatacgcctagctgtcttagtgattgattggtttggttaacgtgctgaccaacaccgttaacctggttgaaattatcaggtatggcttctcccgatgaatttttagacaaggtctgcccacctactgcttggcccacaaggggaacctgtgaccggagatgtggcggctgaccatttatagtctgagaagtattcatcgctggatcttcgtctgtttcaccgaaggggatnnnnnnngggggttgctgcccaacagtttgatagtctttttgtatcagcatagtagcttgccgactatgattttaaatctctgtatgatgagccctcaacgcttccatctctttgtccctccactcgacaaacatgcgtctctgttcctcgaacccaagatttaccgccgcggggagttcctcctaatcatgatgtagggtgttggtatgaccttgcatgagtccaagagcagcgcggaggttttggatctcagtatca

SEQ ID NO: 101507 - DNA, 636 bp, Cannabis sativa
tatgtctggtttgaactttatgagtttatccttggtcttaagcctcttaagcatcgtagttagccatagaatgaaactgtgcttaggagagttaagtcgactccacacaatggtagtccaatgctctttagttacatcaggaacaagttttttatacccttgtgcaatttggtatttgatgcttgtagcttccctgtctcctctgtcaaacagttcattcaatctctcctttaaagtgacaaatttcctccaatgccagctaatgctttagcactgtagttccaccaattctctcatttcatatatacacacaatgtactcatttaaccaacaatttgtcctctttcttagcaacaacccacacatatttgagcatactttattccaatcagaaacctgtttaaaccccaacccctggtgattttggttgacagactctgctctaggtcacaacagcagccccactcaaatgatggctgttactccataaaaatcctctacagatggtctctatgtctctaacaatacttttagaataccattttttgactccaatagaaatgaatggcctggagcaaatatctagataatattgggtgcttagaaagggtgtatactgatgtatgtaccttatta

SEQ ID NO: 101508 - DNA, 578 bp, Cannabis sativa
  modified_base (492)..(510): a, c, t, g, unknown or other
ccaaccgaggatcttcccccctctgtaatcgatgaaaaaccaattgaatacgattaaaggtccatgggcttccatcaataacagcttgaatatcaatttcatggtagaactgaaaaagatatcgattagtatctaactcttttatgtaaacgcctcgtcccggttgccaaagagacgccatcatgtgtctcattgcatcaaagtcgatagttctgccagtgagaaatttcccaactaagcaccatctatcatcaaaagcttgttcttcttctgcattctctcctgttataaggactccctcctcttcctcctccaattggatctgttcatatctgtccaccaaatcaacaccctgctgactactggaagccattcgctcgatcaacacaccagtaaacaaaagacaaaaactacttttacatatgaactttcaaaaacatgtcagaagacaagacattttgcagcacatttataagaagagaattttaattnnnnnnnnnnnnnnnnnnntttttgtaaaaaaaaaaaaaattttattgtaaatattataattaaatggcttaattgttaaaataatt

SEQ ID NO: 101509 - DNA, 697 bp, Cannabis sativa
  modified_base (32)..(40): a, c, t, g, unknown or other
  modified_base (244)..(259): a, c, t, g, unknown or other
agtatacgtgcctcgcacgtagtttttgctannnnnnnnntatatatatatatataaagaaatgtgattgaatagttgtaagagtttggtgaataaaatttctaattatgttacatgtatcattggacatgatctaatagaaaatagaaacattagttttcaataaaatgaaaagttgggagaaatttttatcatcgtgaatgaatcatttagaagcacaatttgataataataataataatannnnnnnnnnnnnnnntaataataataataatagtttttgaaggcaaaaatattatatgagaagattacaacttaggcaatgaagatttttgtaattatagtttaggatctctttctacttgggctatatagaacattatttgttgattttttttaaataaataaaaaaaacgttcatacattaaacgaaactaaacctcacgatcattacaaaagagttttataggtataaaaaaaacatctaaacaaccataccagttgtgagaaaacgttcactttgctacattataggccaaaaaattaaatgtcttgatagtactaaaaaattaacaactattaaaaaaagcagttcttttaccatgattagataattttaaatctcccatctagactccaatccattgagagagttgataaccattctagagttgctctctacaattacaaatttgca

SEQ ID NO: 101510 - DNA, 509 bp, Cannabis sativa
attaggtttccaggtgattataggaaagttaaaataagaaaataatttgaattaggggtgttcattcaatcaatcttgcactattttgctcatagtgcatttcgattcatactaagtgcggatttcatattttagatccaatccaatctgcatattaactcaaatccaatctgcaaaagtggggattgaattggttactttttaatattaaattatttaatattcaataattttatttacataactaacaacaaaatatatcaaactattgttgttttatgttttaaacaataaattaaaataaataaaacaaaaaataataaattaaaaggaagaaaaaaaattatatgaataaagtaatgtttaattttattttagattatattcttttgtataaaaaaaataaaatatacatttgattttattaagttttaaaatatatttgtatcatacgatttttaaagtacaactttttgttgggttttgtgccctaaataaaaccctttaca

SEQ ID NO: 101511 - DNA, 745 bp, Cannabis sativa
tctcttagttgtgtagttgtgatctatttcgagtagtcaccctcttagttgtctctcatcgatgttgtaaccatattgttagtcgtgcctaaacctttctttatcttcattctttgaaaaaaaaatcgaaaccatgcacattttactttgttgtctcctccataaggtagatgacctatagtttgaaactttcaacttctcctttggtaatctatgatttgttgatgctttgcttatctcttagtattcaagataccttcataagctattacctccaacaattttagctgataattttctaacttcttatcttggattctattcggcacactactctcttttacatgatagcattgtcctcctcggactaatttctataacagactcattactaaattcttcacatacataattctttccgtctaacttaggagtgtgtaacttataaaaatatccatcaagatagtactttttccttagagatctattctttcatccttcttaataatcgagttttgtgaaataccctgtcccagtctagtatagcatcaactatcctaaaccattacctacttcttataggttgggcttcctttcataactagatgtggggactgtgtcttcaaccatttgtagacaggtgcaattctatgcgtcttacttagttggctattggtacatttcattatgtgcttcgagttgcactactagtgttggtgatctattgcgctgagcctgtgaaaac

SEQ ID NO: 101512 - DNA, 1023 bp, Cannabis sativa
  modified_base (873)..(874): a, c, t, g, unknown or other
agcaaaattttaattagtcacgttcttcattaacctcgttgattagcaacgagctgcacagtacattaaaaatcacgtcaacatgcctatgctagttagggtgttacaatagtcttaagcgagataatgataaaaactattgaactgatattggcgagacatgcgtctacctcggaaaacatagtcaaaaagaagatatttatttgttcgagtagaataaatacaatcacatacggtaacctcagattacatatagcgagacagtcatcttgcaatattaactcaaatgaagagacttaacgaggcgaactacttgccaacacttagtattttttccttactaagatggacaaggaggataactctggttaggcgagataccatcttccaagtcagcaatagctgtctaaaggataaaaacagatggtggttgggtagttattagatattatcgcacatgtgattaaatgaaacgtggggattgttcacgtttcatgaatagttatatttgaattgatcccaaaagaataactgtcaacctatactcctataaataagggcaaaccccacaagaaaagtactaaaaagttgagagataaatactatcattctgatattgtattttgtactcaaaaaatatcattaataaaaaaaactcgtggagtatgtagattttaactgtaaaaccacgtaaaaatatctagagttattgatttctaaattatttattattatttctgtaaagtatttattacataaaggctaattaattttggttaacaaaaatctgcgttaacaaaaggcaaaggagaaaatgaaatgcctttattgcaacaaaacaggccattggaaaccccagtgtcctaagttttnngcaaagaaacaaggtatttctaactttgttgtgaattcatgtattttagagaattattatccccttgggttattaattctagatctaccaatcatgtttatgttcaaaaaaagaagtttgaatttcaaatgtcatttgaataaaaaaaa

SEQ ID NO: 101513 - DNA, 567 bp, Cannabis sativa
aaaaaaaaaaaaaaactatctttagtgacaacataaattttttgtgactaaatatcttttagtagcaataaaaagttaggaatgactaaaacatagtattatataatttcatggccgacccaggcggtttgggaaccttggacaaaatattaaaattgggtctttttaaaaaaaaataaaattatcaatcaatacttcacaaatttagttttccaaaaaaatacttcataaattttaaaagaggcaagaattttaaaatggtgtgtattaagaccacaaagttttatcttctttttttttttttttgtaagtgcatatttgctcttataaacatttattatgtatactatacattataaaaaaaaatattatactatatataaattgatgataagaaaataactttttaatataggggtcttgtgcaatggccaataagctgctctatacttaggctgaccgtgtacacgttatcactaatttagttttagtcacaacaagtattataactaaaaacacatttaatcacaacaaattataattttgagactaatacatttatccacg

SEQ ID NO: 101514 - DNA, 1140 bp, Cannabis sativa
tgagttaaggcactttatataggagagtttaaacccttcttagagataaaataagtagatatttatatattaaattagtaaaatacaaaagactaaaaaaccccttcaaaataaatattttccatctactttcgtgggctgctaatgcccaattcgtagtctagcttgttgtccacatataatgttatgcaccaaagtcatgccaggccaagttctggccggccatgcacctgtaggatgcaggctggctggtcttatgctatccagaagcttgctggtctatcactcattgtctcgtttgagtgctgggacctattggctaggatgctgggtagatgacttgaccttcttcttggtgagttgtactgctacgtggcactgattttggctatgtgaatatgccacgtcaggtggatagaaatctaaacaacaaaaggagatggtgtagatgaagaatgagtgagaggcatttatttattattttatacaagaaaaggaaaaggaaaaaaattaggggcagtagctttgatggaagtcggatgtaatatccagtacaagtatattattttttggtatattattgtatgttatgatattttattgtggcattaaataagatatgaatattattggtattttctaagcaccattatattttgatattagagattctgatagttagattaaatattagtgaatttgaattgtattagaaatacaatttattagtgaatattggtatgaatagataatagattgttgtatatataataggattatatatatatgtatagtttgttaggattatatatgtacgtatagttaggattatatatatattagagtagatatttatttaaatttatcattttaatattttaaaaataataataaaaataagttgaattgaaaattagtcagatttttaattttaaatttaaacttattatacggttggtaatatatatgtatatacctgatatacgatatattttttcaaacccttgcagtgatatttatcatatcctcatcttctctgaaaagtatcaccctctttatttcaccaaatcgatagttctaaccttaagagcttcggagtcagcaatcaactactcgtatgtgatcattgttccgtgtctt

SEQ ID NO: 101515 - DNA, 899 bp, Cannabis sativa
  modified_base (428)..(428): a, c, t, g, unknown or other
  modified_base (846)..(848): a, c, t, g, unknown or other
ttttattttgaaatgtaatttattttataatgtttcaaatactatttggtatcctttataaattactttacaaatttattgaaaattttctataacttttagtaactggtaaaattggttagtttattaaattttagtaaaatttaaactttgaccattctttagttattctcatataacatatgtagttaattaaatataaaaaaaattaaaaagttacatatatttttgatcatctttattggtgaaggtaaaaaaatatatgcttcttatatattaaaatgatcattttgaagagtacatcacaatggtataattttttaagcctaaataattattaatatggccagaaaaaaaattttaaacttaaaaaaaaaaaaaattataatattataacataaaaagacaaaaaaggaaaaaaaaaaaanaaagaaagaaagaaagaaaatagctgtcaaataattggatccgtacctctgctctttaagaaaaacaaagcaaaataataaaaagacaaaaagaaattgtttgtgagaggaagaaggaccagcggtattttaatatgaaaatgggcggtattactattaaaatcaacgctattttgcttaattaaatatcccggcagaatttcataattaaaatgaaatttacgtcacttgatgtaaatttctcttcatttacaataaatattctattacattttcactcttacaaaacaaactacatttaattaactctaaaaataatacacattaaaaatattaactaaattatacttgttgaccgaggttttcggcaaccaataaaatattataagtttatagagctgtaagaaaattagagaannntttttacgtggttagggcgttaatgagccttagtccacgagtctatcttat

SEQ ID NO: 101516 - DNA, 545 bp, Cannabis sativa
atggtgtgtatgttttacctttattttggttctttcttcctttttaatacctgtttgctcataagcttgtcttgcagctccaaatgttgctcaggtcaatggggctacaaatgttatacagtccactggggcttcaaattttactcatgccaatgggtttccaactgttactcatttgactgggcctccaactgttactcatttcactagggctccaacttttacaaatgtcaatggggatccagctaagtctcattgtaaatggattccaactgttacacatgttgttcggtctcctaatgttactcatgatactgggccatttcgttcttctgctgctttgtatcaacctgcatataggccacattcatcatcagtggttgtaaatcccattaccggtgcttcatttcctccttggagatcaagttctgcaccaccagtcagtttaccacaactggaaacaggtttcaagcacttcttgctaaactttggaaactaaatttggcttttagtctatttgcatttgtttcttcatttctctgtat

SEQ ID NO: 101517 - DNA, 1137 bp, Cannabis sativa
tgttcttgaactattctaggtttaggacttgaaaatcacatttatgtttaaccataacatcttattgtctgactccgcttcaaatttaaccttacaatgttcatttcaactcgtccattagggttttagtgaaaattagatttcaattcaaagttttgaacttttggtattgaaaattgtcagtcaaacctggtcagtattgtcatcccaaattttgcactctgacgtggcatgatatgctggtgacacgtgaatttgattctccatacctggccaatagagatgtttcgagcagaacatcacatatacctgcacggacaaggtcctcccagccgagccgtggtcaatctgaacaacatatcaacgcttaacaatttcagcatttgcatcgtgaagcataagaataatccctataaatttgggatcgtatcacagggatatggctagctatccaaatcccataatcattgtattctaaatatgtgatatgtattcttaccaattataaatattgtaagaaaaaaagaaacctatcctcaagcatatagccctataaatagtgatccatcctcagtgtaaaaggggtcgagagaattaattgagagagatctaagaaagcatactcagagattttattgtcagagctttaaaagaggaatcaatatattctttgttcttaagtcaatacaaatcaaggggggtaggctattaccgaactgctcggggctaaacttctttaaaaaagcttatgttctatatttgtcttttcatattatatctgaattgtatcctttatcgcttattattaagagtcactatcgttgcctaaaagcgaggtcaacattttggtgctttcattgagagcaagagtcataaacttgctctttacttcaaatttaatcacaaacacgatggtgttacaaactggtagaggcatggtcgatcaggtagatccaccaatagtggatcccgcactgtcgaattttggaaacgcaagggtcccaccagccacaaatcttgaaaaactaatcacgcaaccaccaactgtgggtcatggtgtgacatcccttttggctagaatcacacctggtgtgcaggaaactgaaataccaatttagcagctaatctaggtattcc

SEQ ID NO: 101518 - DNA, 823 bp, Cannabis sativa
tatctataactttgtagttgttttggttttgtaattattaaaaatacatatataacaatcaaaattaaaggtcatcaactacgttgacatttaagaaagaaatagaacatctaattacaattacaattagtatttttataccaagttgtattgtatgttatatattttaagaaaaaataactccgacaatattagtattcatattgtggttattatatacattttataatattaaaataataaagattaaaatactgtaaaaatatctaaaataagtatttttaaaatgttttttttcaactactttgaatataaatatatatttatatatattattttttcattaaaagatgatatatatgtgtatactctaaaatataatactaaccataaatattaacaaatataattatatatttataagagtagcatagaatagtaacttatatgatatgaacttgatatttttgaaaaaagtattaaattgtggaaacataatattactattagtgattatcaactattttataaaaatagctagaagggaatatatctatattaatataataagttaattatttttagctatctctattactaatatatatagttaattattttattatatgacctgaagtgatcatttttattatttttaatatatatatatatattaataataataaatagacattatatttgaatagatcaatcattaaaaaaaattaagattagttcaaatttttgttgatattttaagttttatacattaaaaaaatataatatattttatttattatttattcgatataaaaattaatca

SEQ ID NO: 101519 - DNA, 631 bp, Cannabis sativa
attaaactctaggtgtactatttgtgttatatgtgaattatgcaatttttacaatttttgctcggcgacaacagaaaatgcgatggatagctagtttgatcacttgggtaagtctagaattttatttcttagtgggatgtgtattggagaaattaaaatatcaagggtgagcggagttatggattttgaccattttacccctagtcttgaaaatgcctaagttataagtttagggcattttagtaatttgccacatgtgggatttggtggctgcctagaaacttgacacttagcttttagtttttcaggcaaagattaatgtaattaatcttatatttcatttgaggaaaataaagaaaattaagaaagaaaagccaaaaaattgaagaacacactcttttccttctctctcttcgaaccagctaaaaccaaaggagtttttttgctgatttttgtgttttcagcaagaattgcaggaggttctaatcaaggtaagccctagacactctatgattatgtttttctcaaggtttttattgatttcaactagtaattttagagaataggggttgttggagtttgattaggttatggtttagtttttatgtccattttgagttgattctaagtt

SEQ ID NO: 101520 - DNA, 723 bp, Cannabis sativa
ctggtaatatcttttgtaatgaccatgaggtctaacttcagttttatttataaacgcatttttttaaaaaaataattttttattaaatttaaattttgatagtaagatattctaaattattgatcattattaataaatttaaaatgttatttattttttatgattgattgttaacataaattatttatgcgtacactcttttacacgtttatatcagtatatatttaataattataaaaaattatttcaaaatttataatattttttatttgtaattttattttattttaaaataataaattaggtgtactaatataaacgtgttacgtctataagagtgtacacatatacagtcatggtgataattaactacatgataccttaaatttgttaataatttaatagtttaaacgattattgttaaaatttaataaaattaagtttaagtaaaacaataattatgattatttacaggggcggaggcagtttataagatgggatggggttcatatatatatgtatagctaatttctttaactaagtgttataaatatatatatttggatatatataataaaatgagattatatatatacacgtatagtaacttattattatgatactttttgatgtgataaatatatatttatgcaggtatcattaagataaatattagtgtttttctattaaaatatataattaaatatttaatttattaaatta

SEQ ID NO: 101521 - DNA, 1306 bp, Cannabis sativa
  modified_base (888)..(899): a, c, t, g, unknown or other
tattcacaaattagtgacacttttgattaaatgtcactaaaatatatcaatagttacatttaaaagaaatgtcactaattaaaatatcacttattcttactatagttacatttttaacaaatgttattaaaatattattattgtgacatttttgaaaaaaatgccactaatttggattttttgtgtagtgagattataataggtctttccattgaaggtgctattaggatgtatcaattgtttgtggagtaatgaaagtactactggttcataataaaaaaaagaaacgctacaactgttatacccaaaattcggctatgtatcaaaagctaattagctcaatgaatatagtaattaaactgtatttaataatgtaatttagataactcattccaattaattaaagttaactgaaatattcaaactcgctgactacataggcatatgcgagataagaataataactattaattcatttatttaatgagacagtatgtccgcctcgggaaaaacatagtaataaaaatgtacaaaacaagacatcaagggtcttacgatccattgacccacatacacagggagcagttgggtagttattagatattatcccatgtgcaaataaaagaaacgtgggacatgtccacatatcatcatcaattataaatgaaccaatcccaataaaaaataactgccaacctatacacatataaatagggacagaatccatagaaaaagggacgacaaaaaaaaagagagaaaattctattattatgactgatatttagactcggtatttaaataaatacccctaacaatacggactcgtagagtaggtagattttaactacaaaatcacgtaaaatatctagtgtttattattattattannnnnnnnnnnnttattattattattattaaattccaaagtgaatttatcacaaaaaaggctatatatttggttaacgaaaatctgcgttaacagtttggtgtttttattgagagccttggtgataaaaactcaaaaaaaaaaaaaaaaaaaaaccctccttataaatacaaatacaaatccatatcaatggttgataacattccacacaaagataatcatccagaggaaacaatccattgtcctgacaaagaacttatgggatctcagagaaccaacccatttaaaacaccacgttcagggaggaacgatggtaattttaatactactggtgatcaaattacagaaagaaggagtgatgatacctatgatcctaccagatatgtcccactctaatagaattagaaaataggcaacttc

SEQ ID NO: 101522 - DNA, 520 bp, Cannabis sativa
tagaacaaagattataattagaatttagaacccaactttaaactatttaattataacaaaagcaaatcaacaatactttgtatatataataataaataatatatatatatataagtatataagaaaacatacccagaaactggttttgatgaaacaaataagttgactaagtgcccagaaagcttttgaggatctcctcaaaaagattgggataggttataaaggaaagtgagaaataaagtttaagaacagatcttaacttagaaaacttagaaggaagaatcgttataaatagagaagcaagctgagcataacttagctgaattatcaattatggcctcttaattaattaatatattttaattatttgccttattgctattattattatgatttggtgggaatattcatcaaataagtactaatcaaattaataaactaatattaacttgcatatgggaacctagctaggagatccatacaaaatatataaatataattttatttatatatagaatat

SEQ ID NO: 101523 - DNA, 940 bp, Cannabis sativa
gaatttcacaccatactccatttaccaccaccatattattagaaacataatttttaattaaattaaattaaatttaaacccttttgtgtctttaattaattaaaattaaataatcaaataattcgaattcaataatagaaatattttaaaatattctatggaacaattaattataaaatattaattttctaaaattaaaatatagttaggatttatattaaaacaacttttaaatatctaaactaactagacaattaaaatattaattttttaaaattaaaatacagttaggatttatattaaaacatcttttaaatatctagacgcatttagattagttgaaaaataatattttaataatgtttaaaaataggttattataaccacttataactatagttaaaattttaaaaattaatttagtttaaaaaataataatattttataaaataactaataatatatataattatatataataaaataatataataataaacttataataatttttcacaaaatattattttattatatttcaaaaatataacaagtaaccacttttcaaaataataaattttataactatataatatattatatatttatatacaatatataaataaattaaatacctaatatttataattttaaaaaatataatatatatatgtatatattataataataaaacaaataactatttaaaaaagatatttccactataacaaaaattgctttcaacaaaagcataaaagtctaatgaaaagataccataacactttatgagggcttaagaaaagcagttctattgtagatcaaacccttttacctaacacatttcatagttatacatatgtgttattatataattaacaataacacattgattgtcttattttaatgaataaataaatttttagctatgttatttatagtt

SEQ ID NO: 101524 - DNA, 543 bp, Cannabis sativa
tgccccaccatgccacacagaaaagcatgtcttccggttgcactctcccgggtgatgtttcttacaacgagggcactcagggtaagagtaaccctggcgtccacgtttgccttggttcctacggaaacgcttgctttgccctgaaccaccaggtgctggggtaactttcctcttttaatcagtggtggaatcaccaccatcgctaccatagataagagtaggaaaagtggggattccaccgacattcggagtcacgcggggctcttgaaggaatttcacagcaccctgagcccgcagggctttctcaaccattttcgcataggatgttgcttcattagtagtgatcaccaggtcatgcctgatcttcacattcaaactggccaagtacttttctttcttactaaagtcagttggcacgatacccacgacgagcttgtgcagacggtcaaactttatagtaaactcagtaaccgaaaccccctcggtttgcactaactcagtgaactctttccgcttagcactgcggacagcttcattataata

SEQ ID NO: 101525 - DNA, 656 bp, Cannabis sativa
  modified_base (401)..(401): a, c, t, g, unknown or other
  modified_base (610)..(611): a, c, t, g, unknown or other
atatagttttttcctcatattttatacatacacataaaaatcatcatatcttacatggtcactttatatatacgaaccatatattcttaatttttagatagttttgaattgctagcttggtacaatttgaaattaaaggaaattaaaaaatatagtttctaaatgtgattatgtgagtatattaaattactaatttgagatattaaaatataaaagagaaattatgttgtggaggcaattagtatgtgagatattatcagttaaaaatgtacggcaatgtttaaaactttcaggttgatgtgaatgtttaaaatatgtttgatgatacttttctttagtttgatagcttaattataacgtgcattgcacgtggttgctatctagtatataaatatatatanatatatatatatatataactcactaaagttcaagactgaccttgcttaattatcaattttttgaaaacttattttattaaaattgatttcagagcaccaattgaatttattttactaaatataaaggccttgcgttttttctttataattttatttagtatatataaaataaaggaataattactaaggcaccattttttgtaaaatanntacatttttacgtttaaagaatgtttttttatatttttatggttt

SEQ ID NO: 101526 - DNA, 1060 bp, Cannabis sativa
  modified_base (764)..(766): a, c, t, g, unknown or other
acaagtttgtaaccagtcttaggtttttcttatcttaaatgttttgtactatttttattcgaacttaatacaattgtatttgctttcatttttattcacaatgtaaacaactgcattttgatcaaatatacaacatttttgggtttctccattactcgtaatcttcttgtttaaagtacttagtagtctaccaaactttatgatttcgagcggttgtcaattctgccttgcaattgcagttataatctgccttaatcaaacttaaatatagttggattctatcactttgtataatttttaatttgctcgcatgaatagttttattatctgtccattttctaggtttaagtactttatcaaggtgtcgtgatacctcgttgagtactttcctagctcgcaagaacagttagtattcagttttatatgcgagttataacttttgatttttcctctcctgtcaaataggttatacatcaaaacttatagttgtgtgatcccttctttgtcaaaaaggtttgatcaaggtgttataatgattcgacccctttctcctcaaaaaggttttctcaggtagttataacggttcgactccactattgtcacagaggtttagttgagaacctttgaatttcaaaaaaaattttgcaatgacgggtttgcattatacaaggtatttccagatgaatttcggttagtcacacataaattccccttaagtaattttaaagaatgaaactttgtaattacttaatataaatgattcnnnttattcataactgaagtttaaagcttacatcagtaatgcaagttatatcatttatttattgatagtagggttgcaaatgttctacgttctagtagttttttatagtgagccatcaggtcgagccattttatagactctgactccaactactgcttcaatgacatatggaccctccaagttcgagttgaacaatcttgttgctacatctctcgtatttgcaaagactcgtcttaacaccaagtctccaacattaaatagtcttttcttgagtcttttgttgaagtatcttgtgac

SEQ ID NO: 101527 - DNA, 605 bp, Cannabis sativa
tttaaagagaattaattgctgaaggatattttatcactatagaaatatgatatgatgtattattataggtgtaatttatatgagattcacatattttaataaagaaatattttagtgtagtgttgagtacattaattaagatacctaatagtaattaatgatgattcaaaatccttgatcactaatgtatattacttttgattgctgaaatttagtattgaatttcaggtattattttattctaaattataaaatatgtaaaaccagatattattaaattataatgtaataacatatatgtatacgttgttctataccctacaagactagaatatataattaggaatatatatggataattatgtaccttctgcactttatcaaaatccttgtttattgtttttaggaagtgatcagatggattttggagagatggacaaggaaagccactcatagtgaaaaactgtacaatacataatattaaatcaatttataattagtacaaatattattactcctttatgtattgtaattaataatttaaatacgttaataaaaaattgtgtccatataagaagataaaaatacctcattagctgcactag

SEQ ID NO: 101528 - DNA, 891 bp, Cannabis sativa
tttttttttttttttttgtgatcatttgttgtttttagcttggaaaaatcataaaattacccaatagtatagcaaagtatatttttttcttcctaattagtattattacacacacttttgttgtatagttctataatatatatatatttaattttattcaataatatatgctcttatgtttcactacttattggtgttatattataataactgatattatatataatttggtattaacacttatcctatgatatgaaatttttttattattataaatgatatgcaatttgatactttatgatattatatggaattttataataattggtattcaaaaaagataaccgtattaatttaattttttaagaaaaaattctacttataattagtatctagttaactaataattgttatttaaaaataattattaattagtatctaaatgtttagtttagctactgattgttacatatctaatcacaatcttttttttaacataatgtaacgtttgtattaattataggttgggaatagtattatcaaaattatatataaggaaagttgtggctgttaataagttgtatacaataatatattttgtaagtgggtatattatttttttttttggcgctttttcatttttacatttcaaaacagctttttttgtttacatttttacgaaattctacatagaaatccctattgcaactaacgctgcaacctaatttgtaacaaaaaaatcgtagaaacccatattgcaacaattttagaaacccgaaccgtaaatttgaaagaaaaaaaataatatatagggtaattctgcgggaaatttgaaaaaaaaaagttaaaaaaatagtatacggggtaaacacttcttaaaagctattatat

SEQ ID NO: 101529 - DNA, 551 bp, Cannabis sativa
tcaaataactccctcatttgacggctgccgtacatcacggattacaatctatgaaagtacaataacgagacaaaatcatattccatatatatatatgtaaaaagataccttaatttaccaccactcatattataattatataacagtatatacaatatacagctacatttatcaaaaatatctagttctcagtcctagctccatttatatacattatgaaacaagagtagctagctatataggagcgccataattttattgttttatttgtatacatagaatagtgctgaaaaacatcacctttttatttgtatattatttgtgtaaattatagtatgtgtattttattaatttaaattaaaatatagggagtctaccattataaagaaagttactttgtagtgacaattattatcttttaattgtattatatatagttatcataaatgtttttttttaataatgattaaattttattaaactaaatcatccaaaactaaggaagcaatgacaaaaggtagagagttcctactaaaaatacggtcagcctc

SEQ ID NO: 101530 - DNA, 749 bp, Cannabis sativa
ggtacactataattgagtgctcaagttatgatgttgaaacaatgcttactattatatcttctaagcggtaaatgaaatagaatataagtgtttttaaagttaattgtaatgttccaatttttttatcaaacgatctaggaattagatagctgatttttaagctcatttttctaattctagtcatggtcgtgtctttaatgagaaaggtatctcaattgaattataaattattattttaattgattctcatatataaaatttcatgatttgttaaaaaaaaaaagtagttcaaaattattgttttgttagttacacacaaaactcttgttaccacatgaaaaaaaaaaaaaaggaaatgataacgtatatttttttatcattttttttctatgtttacgttaattattttactatttcatttatatataatttttttgattaattttaaatttaagtataaattttattttcatattttacaatttcttcataaatcactttcttcttacttttttttttttgttttttttctgcaatgaattcttgttttgtccaccgcaggcccgaatttaggcataagcagactagacctgtgcctaagatccacctagcccaaggacccaaaaaaaattctttttaaaattacacaattttttattgattttgaaaaataccgtatttttatttctaaataagggcccagaaatattcttttgctatggcccacaagatttcttggccaaccctgg

SEQ ID NO: 101531 - DNA, 818 bp, Cannabis sativa
aacagggctttacctttaatttgtaccaccacctttccttgatttcatgttaagaatcatagaaaatcaatgacaaaaacctgatctcctttggttttcttagggttgaactcaaggtgagagagaaaggatacacttagctttatctctaatttccccccttaatgaataattaagaattattttttattcctatttcttaaaatcagcttgattattctactaaaaccactaaagacaaaattcacttcttaagaaaaatggccaattttccccttgtttcccacttaagtaatcttaaagcctaagagtaaaataagtctattaccataatctcgcctaatctcgatatttccaatattcaatatacttagcccggccactagatgaaatgttctaaaccttactcatatgacacaattggctaaactgttgcatttctattgttactaaaaaaaattataaacatattaaattgcacatatattatgtataatacacttagaattcaataaatgtaaccctaacacctattttttgaaaatagggcctatttaataaataatcacatttaatcatataatataatcaattgatgctaattaccttactaatctttattctaagtatacggtcattacaatatttgtacatgaaggtacatattaccaaagactttgaggataattgttggaactaggggtgagcataaaatcgaaaaactgaaaaaatcgttcaaaccgacctacggaacaccgttggaaccgaaaccgacgaaaccgaaaaccgaaaaaaccactaacggtttaaaccgttat

SEQ ID NO: 101532 - DNA, 562 bp, Cannabis sativa
  modified_base (179)..(191): a, c, t, g, unknown or other
  modified_base (290)..(293): a, c, t, g, unknown or other
  modified_base (369)..(373): a, c, t, g, unknown or other
tttagaataaaacaaatattgcagaaattagaaattgtactttatatgatggtcatctgacctgagtactttccaattttgtccgaacctttgagcgtggtccgcccagcaggccattcacttaaaaagtaaatgttcttttagtacataatgtggtcacccgacctggtactttattnnnnnnnnnnnnntaaatgttccccattccaataccgtggtactagaaaaagctgcattttttcatcatacttacccaatttgtatgctcctgattcgagaacttcgaccannnnatatggtccttcccaatttggtctgattacaccttccgtactgtctttagtgtttagaaatactcttcttaggacnnnnnctcccacaaagaatttccgagccttcacttgcttgttgacatatcgagctactttttgttgatgggccatcaactttaagtttgctgtggttcgtttctcttcgatttcgtcaagtgattcggcaagtagtacgtgattttcctgatggctgtactgttggaaattaatttaccaggatctagatttac

SEQ ID NO: 101533 - DNA, 666 bp, Cannabis sativa
aaaaaattatctaagaatacatattgagaaacatcgttgtaagagctctatgaaaaggaatcattacattctttgttcttaagtcaataaaaattaaggggagtaggctactaccgcactacttggggtggaacctctataaaaactttgtgtctttatctatttcaacatattgcatctatattatactacttgtcacttacaattaagactcactgtcgttggccaaaagcgaggtcaacattttggtgctttcattaagagggtgaaatcaagctcgctctttacttcaaatctaatcataaacgcaaggatggtacagaatcgtagaggcgtagttgatccagcaaatctactggcaggggatcctacactgcagaatccagggaatgctagggttccaccaactacgaatcctgaacaaccgtctactttaggtcaaggagtgacgactcctttgagtggaatcgcgcctggtgtgcaagagattggaaataccagttccgcagccaattaggacattcccaacactgaagttctgcccgcaacaaatgttcgaacaaccattagagatgacagcgagatcgagaacctccgtgctgctcttggagtcatgcaaggtcataccaacaccttccatcatgattaggaggaactccgtgctgc

SEQ ID NO: 101534 - DNA, 636 bp, Cannabis sativa
ttatttaaatcactattatgttttgaaatttcaatgattatcactacattaaatattattaattttaaaattatgatattaaaaaaaactaaaaactaaaataaaattaaaagtcaggtaacatctatctagtatatatatataatatttaattgataggtgttacttcatcatttatgacatttaacttgatattaatggtatatattattatttttttactacttttataagtggttaataattattgcatttaaatataagtggttatccatattttttttcatttatataaatagacattagattagtttataaagataaattggtttggttatctaattgtgaattcttgtaaataagtctaaaacagaaagaataacattatgtacttttcaactcaacaattaaaattattattttttttttctcctctcacaaaaatcttcactatattaatatcatgtttactacacaatattcaaaatcaaaataaagtaataaaaaaatgtaacagaataaataaaaaataatacgattcaatatttgtaatatgttatttatcaaattaattagaaataaaatgatagtgtttattttgtttactttattatgaaacataatcagaatgtttaa

SEQ ID NO: 101535 - DNA, 722 bp, Cannabis sativa
  modified_base (646)..(647): a, c, t, g, unknown or other
atggtccttcccagttaggtccgaatacacctaccatactgtctttggtgtttaaaaatactcttcttaggaccataactcccacaaagaatttcccagctttaacttgtttgttgaaataccaagctacttttgacttatgggctatcaattttaggtttgttgcggtgcgtctttcttcaatttcatcaattgattctgcaaggagtacatgattagcctcttggccatatgttaatcttctttgggattgttgttcgagttctatgggcagcatagcttcgtatccatatgccatggcaaatggagtctgtctggttgatgttctcttggttgtacggtaagaccataggtcttcaggatgttcctctggctaattcctttagagtcctcaagtctcttctttagggtgtccttcaatgtcttgttgactgcttcaacttgaccatttgcttggggatgcgccactacagagaaacttttgatgattccatgattcgcacagaaatcagtgaaggatttactgcaaaattgttttacagcatgttccgtgacggcttggtatatcctaagttcttctccgtccagaggttttgagagcagatgaggttttgcgagttgcttttttagctcctgaaaagctttnncacattcctctgtccactcaaattacttatttcctcgcagaacgttgaagaacagaacacacttgtctgttgatt

SEQ ID NO: 101536 - DNA, 623 bp, Cannabis sativa
aactaaagattaattttacgtaaacgtccatctagtcccggaatattttagagtatatttggtatttttgttttcaaaaaagtattttaaaaaatgagaacaaaaaattatttttgaagtttttcaaaacacaagtcacgttagtgttttttaaaaacaatattaactaaaagttaattgatttttaaaatagaaaataacattttgttatttttaaaatttttattttttataattttattttttgaaaactatttttaaaaaataaagccaaagaagttcaattattttcaaaaactaattttttatttttaaaaataacaaataattttttagttatgatgtcaaacatgcacttaattttacagaatataatccgagagatcagagcaaaattaacaatacataatttctaagccagaactatgttaattattaattacgtaagcagaggaaattaattgaagaacatataatttcaattgatgtaatccacagtatacatcttcattgagatttttttaaaaaaaaaaaaaaacaaaaaagaaaaagaaagaaagaaatacacgattatggatcttattataaaattaaacgacttttataattaaaaaaaaaaaaaa

SEQ ID NO: 101537 - DNA, 641 bp, Cannabis sativa
ttcaaacaaaacaactaactaatataaaaaccaataacaacgacccaaattccaatgattaatgctcaatatgcttcttacccaaatgcccgtgaattcacagtcttcaaagaagcgatgaacataacctgcagcaacagcaagtaaagtttttacattcaatatcatttcaattttcacaacatattcaaaattacaggaaaacatgaaaccatcaattttcacactttggacgatattgcagaaccacccattttttcgttaatattacaacgtaaatatatgtataattgactaaattagttcaaaatgactggaactactgaaaatacgacagggcagccaatttcgaaagaaaaaacacgagtttcgaacctgtaatatataaatagagcagaagaggagcagcagagggtgggagtcggagtgggttcggagtcttcgggatttcccacttctcagttcgatttcgatttaggtatttctataaattgaaagaataggaaattaggaatgaaattactctcctcaaattttgttatataccaaattgtctcctttaaatttttcttaaatttgtaagacgttaaaaatctctaacatgttaaaattagtggaataataatgtatgtcaaagcaat

SEQ ID NO: 101538 - DNA, 911 bp, Cannabis sativa
tgacagaattgaattgggtactaaaaaatactaacagaagtgaacattgtgcacttttgccactaaaaaaaaagtttgggtacttagtcatacaaatatgaaactttgggtacttatgccactattttccctttaaaaatctacaaatagaatataattacatgttcaaataatggcaattttatcaaattgaagcattctcattacctttcctagttatgtaaataaaataatatgtaactgatttttttttccgctcagtttagtaaataacgtaataaaatattgtttctgattattttatattttaaaccaattcatttctcccattgattattctgattccagatacagtctagtaaacgcgccattgatataccgcatttaacctgttgtcatcaccatatcttatctgttgtttcattatatctcattttttatcatcactgtatcttacccaaattttaaactttgatataacatatgtgtattataatatcaactttcaaattttgatattttcttatatatattttttttaatgatattatgagtaattattttaataaactttcatatttttgtattaaaaaaaaataatatatattgtaaaattttaattttataagaatttcctaattatttttagtttcaaaatatatatatcatcaaatatattaatgtaaattttataagtggttaaaatatatttctaaaagaatatatgtttgtataaaatccattaattataatgagaaaataaatataattgtatttctaaacaaaattgattttatatggtatgttatagatattttttaatcaaattatttaatttttaattttttacaatcatttaatcgaatgatgtaaatattaataaacttagacatgttactatattgtgggaa

SEQ ID NO: 101539 - DNA, 824 bp, Cannabis sativa
  modified_base (27)..(32): a, c, t, g, unknown or other
ccaagaatttcagttatataggcacannnnnnatagaatagatatataaatatataacaaaactattaaatttaatgaaatatataccatataaactttcaacgcataaaaaaattgtacatatattgtattatgtaacttttttttttagaaataataagtattattacatttgagatccaatgtataatgtatgtagaatgtaatttttttttattattattaaatttatgtaagattaaaaagaatcaggttcacaggcagatttagactcgacccaaaactcggtcacttgaaaaattgaacccgaaacccgcccaaaaggtgtatcaggttgaacccgacccgcccaaattgaacatgtttcttaaaaattttgggttggtcgagtcgggtccgagcatgttggttgggtctaggtcaaactcaataaaaatgttcagccctaataagaaggagagaagaaaggggaggagacatggataaagaccctctcctttcaaatacaaaaatttcagtcctcaaaaagtgggggagtccaataaaaagacaatttttttaataaaatatctcttctaccctttaagaataatatataaatgtaataaaaatgataaaattataattttaacattaattttactccttatcctaataaacttacatctaataccaaacaacacaaaagaaaacaactgttctctccattcctccaactccctatcaattctttttttttttttttttaatttaaacgtttatatattacataacctaggactcgaacccaggacctccaacacacacgcaccctcctatggcca

SEQ ID NO: 101540 - DNA, 3747 bp, Cannabis sativa
  modified_base (927)..(948): a, c, t, g, unknown or other
  modified_base (2437)..(2444): a, c, t, g, unknown or other
  modified_base (3610)..(3612): a, c, t, g, unknown or other
cctagtaacatgattggatccatctaaatcaatgtgtgcctgtgcctatatgtttgttttgggcctaaatgcatatagggagcccatttaattttgataattaacatggactgggttgctaaaagaaaaatatcacatttgatagtttttatttaggtctaattagtattgggcttattcaattcataacaattatttaattaaggttaaattcatctccttttgggccttgtgtgaaagttagggggccattagtagtgggtacgacatactaaatccaaccctccctcacatgaataaccctaattttgaagacccattcaccttatttgaataattgtattaggttaattacattagtttaacctaataaaattaattatatatgaaattatttttttatcacaattattttaaaattaatttaagaaaaagacacttagtttaatgaaatatattcaagataaattatatgtatttttctgtatttaattaaataaagaagctataactaattagatttttctagatacttaattatttgaattttcttagaaatatatttaagttgaaaattattttatttcaaatagattttagatcaacttaaattagatttttttttttaaattaataattaagtagatttttctaggaaattaattattcatataatctttaaaaatatttttaagttgaaaattgttaattttagatcaacttaaatagggatattttttttcaaattaaggtgattagttcaacatacttaatttgttatttaattaaattttaaaaattattgaagttaaaaatttagttattttacaacaacttaaattagatattttaaagtacttattttattatattttatataatttcaagattatatatttataaattttgaaaattaaattaaagttnnnnnnnnnnnnnnnnnnnnnntttagaccaacttaaattaagttaattttattattaaaatatatgattaaaataagtgattaattaaaaatacattattttgaataatgagctttaatcaaagagacattcgatctccattgttggttctacacagttcttgttttagtgagattcatccctaatatatgtacgttcattaataatttaacgtcgtagaatcttgaaagataagtattattgtaagtgttttattcttagtaatgtccaccctaatactggctgctaagagtagggcttaccaagtttgaaacaatggtaaaagctcatgaaataggaatgaccttgactctcgcctaaatgggacaacgtcggattatcttttcgatcgaaaaaaggttggcagaattattttcattttagatgagctaactactctattcaatgaatgatatctttgactctcgcctaaaaaagatattttatcaacttgttggaaaccttggaaaataattaaatatgttttattttggtatttttgcaaacatgtttccttcctatttattttctaaatttgtgtatgaatttatttgaaccaagtaatttatttctgcttaatgatatttaattattacatgcctttgcaaatgaactctatagtgtgaaaatgtttcatggtaaaagcatcttatcacacttactcatgatgaaccttaaattcccgaaagcaaatctgttgggaattgatttatcaaaagagcaatgggttcaatttattctcaacaaccttccacctgagtacaatggatttgttgtatcttatatgatcaataattttaactcatccgacttagataagctggacgctgaatggcgtgcttatgaacggactttgccacttgcaaggagggcttcctctagcattacagataaggccaaaaggaaagcttatgacattgaggatgattcctccaataatgctgcttcttcgagttcaattttgagagctagaatcgaaattgaaccaacaattgaaataattaaagaacaaatgagcatacgtattcctctatgttctcactgtggagagaagggacatttgaaagctagatgtcccaaacttctgaaccattggaacgaaggtaacacttttatttttgaatcatgtgttttagagaatgacaaatgcattttgattattgattctggatctactaaccatgttttcttttcattgttgctgcttagaacatgaaattacttaaatccaggggagttgaagctcaaagttgggaatggggaattagtatcagtccaagctaagggaaaagctcgcctcaagtttcaaaataattttttgcttttagacaatcatttgtttattcttaattttagtagaaacttaattagtgtttcatgtttacaaatacaattttatcaattgaattttttgagctctatttctactatttcttgtaaaggcattcaattatgtgttgctcacatggannnnnnnntttatgttttaagaccgaatataccaattgcactcaataaaaaactttttaatattgataaacctagaaaccataaaaggaaagagattgataataatgatgaaacatatctatggtatttacgaatttgtcatataggctatgatagacttcacaggttaaccaacggtggttctttgaaaaatatcaccttgggcgaattaccagtttgtgaatcttgcctagaaggtaaaatgactaagcgttctttctctgtaaagggagagcgtgccaaagaacccttaggtttagtacattcagatgtttgtggacttctaaatgtaaaagctagaggaggttatgagtactttgtcacttttattgataaattactctagatatagtagtttctttacctaatgtaaaagaaatctaaaacgtttgagaagtttcaggaatttcatgttttggctcaaaactaattaggtaaaacattaaagatcttgtgatctgataggggtggagagtatatggatatgcagttcaaagatcatttaattaaagttggaattgaatcgcaatatactgcccgtggcactccacagcaaaatggagttgtagagagaagaaatcgtacaattttataaatggttaggtctttgttgagctattcaactctgtcaatgtccttctagggatatgctattcagatggccaatgacattctaaatgtcgtttcatctaaatcagaccctaaaacacccgtcgaactatagaatggtcgtatacctagtttacgctattatcaaatttgggggtaccctgctcatgtcttaagaaagaaagaagggaaactataagcgcgaattgaagtttacatgtttttcaaaaattctaaggagactagggtggactattttatagtgacaaggataataaagtgtttgtttctccaaatgccacattccttgaagaagactatattaagaacttcaagccgcaaaagtaaagtagtgttagaggaaattctttaagaaataaatccaactaatgttccatcatcttctactcaagtagaggatcaccccactccacgcttgaaccaatgcaagttgatacaaccgagaaatttaccactgatgttcttattcaaaaggtcacggatcctcgtcgtagtgggagggttnnnacaaaactagcttgttatggcttgcatggtgaatattgtcattggtgacggtattgatgacgatccattaacctataaataggcaatggaaagtccagaacaaaaacaatggtcagccgacatggatttagaaat

SEQ ID NO: 101541 - DNA, 746 bp, Cannabis sativa
agcatttgcccgaacaagcacggacggagcatcgtcatccgacgaatcttcctactcctccaggatggctttcccctttccttctatagtggtggatggccgagcaggaagaccgggctctctgatctggattgtatgttcaataggcctttgcccagtcgggagagtctccttccttttgagcggcctctcctactataaatattctacgactcatcctcctgctcagaatattcttaagcatattgtttggctccagcttctccctttaacttagcctcaagcttaagttgaataagctctttctcctgctcaaaatattcatgagcatactgcttggctccagctcctcccttcaacttagcctcacgcttcagttgaatgagctccttttcttgctcggctccctaagcccggccagcagtggactttttcttccttcccttcataggctgaggtataaaattttttggataaagtttgtattccacaaagtttgcctccgagttcaacagagtgatattccgagcagcatccggtagttggacaatcctctgagctctatccctaagagacagtgtaaggggtggacggtaatatattgggatgtgttgaaaccgagtataagtgttgtccatgccttccacgaaataatactcgtcaacaaaacccccgagcttgctaatgaccttgtccacagtgctcgtcaaccacttgaaattttgctgagagaagtagaagtaccc

SEQ ID NO: 101542 - DNA, 544 bp, Cannabis sativa
tgaggtgatttattgcacactcttatcttataaaataagtttgtaaaattatacaaaataaaaatgagtgttatatattaaggtgatttattatttactcttataaaataagattgtaaaattatacaaaacaaaaatgagttttatatattggattgaggtttaaataaataactgaaataataagtggtatgatatggtttagtccattataaaagaacagttttataactatattttgttactaataactcttaaattatcataaaatattttaatataatttgaaatcaaatttaaaaataaaccaactacaactatctaaatttgaaaaaagaaaattaatttttttaattaaaataagaaaaaacaaacaaataataggaattgaaactaaaaatcaaatagaaatgactaaaatcttagaatatttagttttttttttttattctaacaaaaaaaattaaactaaatgtcaaaagaaagaaaaagaaaactatgcatattgaagaagaataagctatgcattgttctaacaaattaa

SEQ ID NO: 101543 - DNA, 1491 bp, Cannabis sativa
  modified_base (637)..(637): a, c, t, g, unknown or other
aacagttgaatgaatctgaacaacaaatagcaaggcatccatctcgctataagaagacatacacatggtaccttcactaatcagcttcagacatctttcatcgagattcactgctccgtcgagtcagctctctcagatagaagctgacattcaaataatgttgactgctgaagttcaccttgtcaccaagaactacaattttcagatggagcgttatgccttcaatagcataaacgacagtttttacattatcaacctcagaaagacatgggaaaagctccagcttgctgtcagggttattgttgctatcccaacgaggtgacccagcgagatacactttgcaacgtatctaaacccacatcaacattgacctagtaaaagcagataaatcacagctgtgtgatttccaaataataacaacatttattttacgtgggacgtaatcaaatcccataattttagggggaatatttttctgggatattaatctgattgtaattaaatgcctccctatgtaactataaataggggcaggatacactaaaaaagggacaaaaaatctttgagagggaaatcatagttttgtatcaaaaaaatctaataagatagactcatggactatgcagaattttaactncaaaaccacgtaaaaaacttggtgtgatctttgcattattcttcttactttttatctattattatttctatgaaaattaatcaggaaatattctttaatatagttaacgaaaatttgcgttaacagtttggtgctttcattgagagcccacatgaaaaaagctcaaaaaaaccctcctgaccaaaagaaaaacctttctccatggctgataacggagaaaatgttaatacctaaatggacaactcaccgtcttggaaaagagccaataggctcacggaggcctcctaactcacgagctacatagaccactcattccagaaggacccaacctgaagggggccaaaataaacggtccacacgttcaaggaggactcaacatgaaattggccaaaaccctgaagttgaagaacccaatcttgggagttctcaacctatggaatatgaaaaggatggtgcctatgatcccacaatatatgtgccaattgttgagttggaaaatttccgtatcaggcactgccaggaagaggcaaaccgagaaaatgctgtgttggaacgagaggcagtcacagccagggcggcataggagaacaatacataagaccacgaggcagacctcgcgactcacgaaccaggaggcaggagacagctgagcagaatccttagaacgctaaggaagaaagaacaacttggggaaactgagactccccctgagaatgaacaaccaaatgatcaatcggagccttcacagaaatgagaacaaaaggcgaccaagaaccagggaataggaaatccctcctgagaacgagggaaatcatgactcaaacttggataggtgggttgccatcgagacatat

SEQ ID NO: 101544 - DNA, 633 bp, Cannabis sativa
atatatatttatatatatttatagggttgtgtgaggtcctgtatgttaatcaaatcaagataaattcgaaatcacagaacattaaagttaatcaaaatttcagagatgaccttcaataataacaaatccatcagattatagaattatgccccaattcagggaactgaattgtaaataataataataataataaagtaaaaatctaatcaaactcaaaagggctgggcagcagtatgaagtagagacgtcaatgagaacagaaaccaaaaatgaaaatagagggcaaaagaataaaagtgttactatttcattcactagggaataggaaggaaaaaaagtgtccattgaacacttttcgccaagtccactccagtacatgctctaaatgaaatactaaacacaaaaagggctgtgggttgcacacaagggtgaggtgaggctgaggtgagatgagaacactgccataactcattcaatccaataaacccttttcttcaagtgcagctaattctgaaaaattattatatggttcttttttgcttacatctccttgttgtcttcttcagctccaactcttttcagctctttcaactttctgtagcccttgtcagttccaaatatcctgagagttca

SEQ ID NO: 101545 - DNA, 628 bp, Cannabis sativa
taccgaaggagcccattcacaactctgagcacccaggttggcattccaactagggcaccaattttttttcactgagtgatgcccatggaaatttgataaaactagaatcgttggagtacttttctccaaaaatagattgaacatcaacaagaccaattttggaaatgtcgcccaggttgacatatcttaacctacggcactccgtgacttctttctagataagtttcctagacatttcctttattttttgtccaagaggaaaatacaaattctcttgggaaacaaacaaagtcatctaaagaccagatgaaaagctgcgcacccagggtgaaaactccgcagtcaataagcagacaagttgacataacaacacttctagttgatttgtcaacccaattgtgattctattatgtgaagtatcctcatttttctcccaaaacaagacatgagacttggaataggagaaatatcatctaagcatcacaaggtgcaagcatacaagcacattgagcgcccaggttgatatttggcctacggctcaatgttcagtccttcaaacattaatttttctctaggcatcagtcttatttttccccaaaataagatttcaacgattttgaaagtcaat

SEQ ID NO: 101546 - DNA, 668 bp, Cannabis sativa
atggcaatcaatgtcttcccagaccccgtctctagatacacaactgtattttgcttcattccactctccaatgcttctagttggtaactgcaaacgattgcccattgttcataagagaaatcattagttatatagttacaggaaaagaacaatccaaacttgttcacagtgctcgttagttccgtttctatctccgtatcaacatcctcaacaagcaaacaaattgacatttcaattctctgatcaaccaaacaaacactaaacataaacataaacacccccaccttctcgcaaatggcagaacatcagcggatatctcttgggatcgttcaatctccatgttaacttgctccacaacgttttgctctgcaacattaacaatcacgtaacaaaatcaaaaatgggtttttcaaacaaaaaaaaaacacaagttttagtaagaaaaaaaaacccacatttgttttggactaataaaacccagaaaaggaaatcagaatgagattgaaggccgatcaacacaacaatacacaaagaactttaaaacccaaatggcaatgaagggtccgaatattaaaaaaacgatagctttgtttgaagaaagaaaatggaagcggttgataacggggtattataattgaattcaaaacttgttggggaagttgtataaa

SEQ ID NO: 101547 - DNA, 1108 bp, Cannabis sativa
  modified_base (32)..(60): a, c, t, g, unknown or other
tttagaaagttcttatttaggatgttaataannnnnnnnnnnnnnnnnnnnnnnnnnnnngtaaaataatatccaacaggttgttcaattattgactgaggagggaaattagttgctgacattgagaagagagatcagcagtggtatgaggtccatccaagtcaaatttaaggttgttagaagaggcattgttggccttagctttgcctttttcttgcttcttcttgtctccataaccgggtggaaagccgtggagaaagtaacacttatcgactaagtgtccaggtttgccacaatttgaacacaagggccgtggtttcttggcccttgatggattcgaaggaccagcagcagccgcaagaggaattgggtcagcggaaccaagagatctttggcgttcctcttgaataatcattgcgaaaacgcgagagagattaggtattggttcaatgagcagaatttgggctcgaaccgaagcaaaggattcgttcaaaccagtcaagaactgaagtacttgattttggttgtaacaatccaagaacactttcattgcaccacaagtgcaagtagtaatcggctgaaactctttgagttcatcccatagggatttcagctttgtaaagtaggcagaaaccgattgatcaccctgttgaagtcgggtaatttgggtctgcaattgaaaaatccgagggccattgccttcattgaaacgctcagcaagatcgttccacatttcagtggctaaatcaaagtacataatactttgtgcaatctcaggcgaaacagagttaaccaaccaagacatgaccatattgttacatcttaaccaagaattgagagaaatgttaccaggttctgggcgaggaagagatccattgatgaatgcgatcttgttcttggcagcaagcgccatagtgataccgcgtttccagggttggtaatttgggccattgagaactgtggaaacgagcaccaagcaaggatgatccccattgctgaggtagaaagggcttgagtgatcatcggcaacagattgagaggtgaggcattggttggtgttgtcatctgcaatggtggaacgaggttggggaaaaggctctgcaatctg

SEQ ID NO: 101548 - DNA, 998 bp, Cannabis sativa
ataatgatgcaagttggcattgttcttccttatgaggaattggatccccctcttcaagttttgacactcgttggtgtcatggctaaaatcattatgaaactgatagaacttcgacatggccctcttgctcatatcccttttgataggagaggacttcttatatgggatagtagcctgagtggccttttaaattatctcaagttattctgttaagaggatgaagcaggtgtacttctcctccttctccttctggtttaatggtttatgaaaagtattgtacttctcctttttgccattgttctgtccaaaactattatttttgcacttgcctctagcgttcttgccactagagttctggtcggcactgttagggctagcctacgcatttggcaagtcttggggctatacagcaccctcaaattgcttgttgttgacttgccctatctgggcttgtctgacggcttcctctagctttataaagttgtctgctcgtttcaggaactcctccatgttatttgttgagatcctttggatatctttccagaagtcactcaattcaaggatgtttccaagtatgaccgtataatgacttttttttatcaggcctttgactttggtggcctcagccataagcctttggatataatccttcaaaggttcgccttgtcgttgtttgacctcaacaaggtcttctagctgcgatggtatcagtcttgaagacaagaattgagtgtagaattgtcaagaaaattcattccaagaatcgaatcttcctagagctagcttgaagtaccattgctgagctatttctgacaaagtttttgagaagatccaacaccgtacatcactattaactttttggagtttagtctacatctcgaagtacttaatgtgtgctagaggaacttctcgcgtggtatgcatttttgatactgacatcttaaactttggtaagggcaaggcactgatgtatgacaagaatgatgatcctccttacc

SEQ ID NO: 101549 - DNA, 514 bp, Cannabis sativa
  modified_base (54)..(56): a, c, t, g, unknown or other
  modified_base (387)..(418): a, c, t, g, unknown or other
tatttgtaaagtatattctgttaaaccaaaaaatgtcgttagatagacactttnnntatataaagatatatttatataaaggaatattttaaggagtttaggtggaaatttatttcaagtttctttcatattttttattttttaaatttttgtcaataatttaattttttaattatttttcagctagaaatttattatatgctattattaatagagtaacttacatacatattaattttattattaatagaatgacttaagactacataataattatatgaaactaattggtattctttaatacaaaatatttaatctatttaaaattttaatattagtatgtctataaaaattccatattcaattgtaataataataataataatnnnnnnnnnnnnnnnnnnnnnnnnnnnnnnnntaataataataatatgttataaaataaattttacttttcatatatctaaaataaataaaaataactattcatataccatattaaattctaataata

SEQ ID NO: 101550 - DNA, 783 bp, Cannabis sativa
tatacacgacagtgtaaagagcaattgcattgcatgtgaatcgtgattattattattgttggttttcgaatcacaccttgtttggttctgattctctgaaaatgaaattcaccacttctttacactaatataatttaacaacgaattttggctattaggggtgtccgatctaatctaattataacccactactaaatattgaatatttaattgtgatcgcatcgaattagatgttatttttaaatattcaattaaatcggattggatgtcagatcgaattagtgggaacttgtaaatgatgtaaaactttattcatgacaactttattagggtggctaagccttttgtgccacaaatttacaagattttgactcatagtacaatgttttgttagatcctcatttacaaactctacaacattagcaacaacactcttatgagcggaggagtgaggcacttggacagggaattgggagggatgaagctgggtacaatccttccttaacagtaccttgatatgtacattcactggtgttggataaattcccatactaactgtctcataaataagttacaaggaaaaataaaataagaccttttacaagcctcaacagaccattataactcttggagtactcgattctgttttcataggcttagatcttttatctctttacaataaagaagtaaataacaatatctcaagactctaactaactttcagcaagacaaggaaaaacaataacggttttctaactatttctcagctcaaaaaaaaaaaaa

SEQ ID NO: 101551 - DNA, 1094 bp, Cannabis sativa
taattttacataaaaatattgcatgaaatataatttaatataatactatacaatacaatacagtgtgccaaacgagccaaatatttatgtaatatcttaactgtataccacatttatttatttgtatagtaataggcatataaatttattcaggctcatctagttacaagtacagaaacatatcaataattaacttaaaaataaacaaaataaaacaaagacgactaaatattcacaatatttatttaggctcatctagttacttagttttatgtttaatatcattaaataatattataattattgtttgttatagtaaatatttaaaatattatatataatttaattaaataaataataatattttttttcaaaataaatataaataatattatttaaaagaagactaaatataacttataaaaataaactaaatataacttaaaaaaataaactaaatataaaatctgagaaaataaacataataataatttacaaaaattaaatgcttatataaagtatattcaattatttacctttttttctataaatataaatagtatttttttaataatatatataatatttttagataatattacgtgatgagcctagtattgttagttttatggcaatttaagtaaatgaagttaagaaataaatctacgtttattagaatgcatttattcattatacattttctctactgtattgaaatggactaataaagtaagaaaatttaaagtttgattaaacaattccatatcatcctatacataaaataatattcactctaataaactaattcattcgaaacaacattaagattataaatcaaacgcacctttgctggcaccaatgaggaagaactcattgggggtgatgggactataaaacaaatcaaccacagaatgcgaatggccatggcaaacaagtggaacgaatccttcttattcatatcgctcaaaactccaaatcagattaaaacccaaaaaataaaaccaaaacaactaatccttcttctgatctatattccaagggcaacgaaaaaaatcctaaaaccaacacacagaaagttttaatttttactctcc

SEQ ID NO: 101552 - DNA, 1004 bp, Cannabis sativa
  modified_base (46)..(47): a, c, t, g, unknown or other
  modified_base (928)..(935): a, c, t, g, unknown or other
ttctgccattactacaatcagaaccccaaaatccctaaaaccaccnntgaaaccaaaaaaaaaaaaaaagaagaagagagagaaacctcgttgcctctcttctcttctcttggcgatgaaagctaggaagaagaagaagatgaggaacccgaatcttcatcttcattgagcagcttgtctttaccttcagtcactctcaaaacattgttggttttttttttaattaatattattacattctctctttcccttcaagctttctctctctacataaataaaaaacccatacaaacagttgatacctttacgaaaatgtatttatacctttacaagaatctatttatacaatcaaataaggcaccccaaacaattctaatcttcaataactgtcagcataaacataaaaaatagacataatttcatgaacatataagaaaacagagagccataaaagaatgttgagcttctgatcaaacacagaagacacaatctccattggcctctctctctcagcccttttcgagacattgcagactaatccactaacctcaaaccccaaatttttccaacccatcaagcaactattgagttcctcgacattctgagaacaggtatgaactttcgctctgagtcccaacaattcctccacgatagcgtgcctaaaagaatacccaattccatatctccgtctaaatatttttctttttcttttcatataaaaaacaagtgtttgagttcgtattgtacccgatcccacgagttccaccggtgacgagagcttggttatcgcggtggtcatcgccagaaaacggtgcgttttgaggggttgagaggtggggagagttgtgggcggctaaatggtgcatggtgagaatggcagaagaagaagaaggggttctgattcgagaagaaagaaaaagaaaaagannnnnnnnaaaaaaaaagaaaaaaaaagatttttttttaatttttataaattgtttttcttttatttttttaaatat

SEQ ID NO: 101553 - DNA, 660 bp, Cannabis sativa
ctatctttttgtgtgtttccaagttttaaaagaatactgtaacgatttcaaaaggttatcagtatgaataattcttgtatcccactactctatcaatcgggcttctatactatgcttgtgtctgaaaccatagtcaattttactgtaggagaggaatctccaacagatggatcagcttacatatttgggaaaagtattcgcgccaatccaaaggcagctcgtcagcaggtatgttgtgatatattttttctttggtgctcaaaatatttttaactgttgaaagctgattgtttttgttattcattttcagattgggttttgcccacagtttgatgctttgctagaatttttaactgtccaagagcatcttgagctttatgcaaaaataaaaggagtgtcagattatcgtatagatgatgtatgttttcatctcaaatttatgttctttcgtgttgttgctacaaaattgttaaactagatattgtgttcagtctcaacgtttctatctagttaacttaggtttctcatcatttttattgcctggctatacatttgtaaagtgtggctgctttctgttagaaacaccgcaagaaatttgattattaaaattcctttaagctgttaagtttttttaccgtgcatatttagtctagaattgat

SEQ ID NO: 101554 - DNA, 547 bp, Cannabis sativa
ttctctatatttttctttatatcatttaaatattatatctttacatatattttactaattaaaacaaaaacaaatatgaaaatgagtaaaaagaataataaaaaattaattaattgaatgaatgaatgaaagagaaagaaaaaatataaaatatgttttacctcttcactattcatgatcagctaaatgtagaagaattttctagagtttggaatgaggtataataactaatggtttaaagcatttgttggagctcaattttaagctttttagctatttttcttaagcttttgtctaaaataactcatttgttatgagtgctctaaattttatttttatcttcatcctttattgaaacaagatagctaaagaagcatatttatctctttcctttttacttaaaatcttgtctcatgacatgagaattactttatgttggtagatataacctaaaacatgagctaaaaagagaacaaaataaacaaaggttcacaaaagaatctatataatacaataagttcatataatggcaaatctcatctcaaaa

SEQ ID NO: 101555 - DNA, 602 bp, Cannabis sativa
aaaaaaaataaaatattaaccccatgattactggtacgttgcccctgtgtagcagttggagtagtcaactatttttgctccaatgcattagctactcttcctagtagctatacctctgacaaaaatagatgggcaactagaataaaggcagcattggagctgctcttaatggatgctaccattggagatgctatgtggataagaaaaaaaattaaaaaatatatattttaagatgatctgtgcactttacaactataagagttgctcccatttaagatgctctaatgtggcacccaaacactccaatggctagtatctttcaaggatcctgccacatcatcaagcaatttctaagcaccaccaaaagagatggtcttaggcatctcacacatgtatcattttataattaattagcaatttaaaatgcattaataataacaacattttatctcttacagtgattagccttttagagcatctctattggtaacattttttaaaaatgttattttattttattttttttcaatgttatttttgatagtttttattttaaaatattctaatagtaaatatttttaaaaattattaaaataatatta

SEQ ID NO: 101556 - DNA, 529 bp, Cannabis sativa
tttataaatatgaacatatgaacatgatttattgttattgttgttacaataaaaagaattactcttttagtagtctacgtttaaacaaaataaaaatcatttaaaagatatttaaaatttaaaaaataatttaaaataaattacatttattttcttctctagatccatgacctagtcactgttctttctttctttctgccactatcactaggggtattcataaaatatccgatccgatctaattcgcaacgtgtggatattcgtacttgtgcggattggattagattagaagatttaaaattcgtacttgtgtagattggatattgaatgatatgtaaaaataaccgatctaatttaatttaaacatatttatatataattttttaaaaaattatatatataatcaatattttaatgtaaaaaaaataataatttaagaatctaatataaatatattttaaaatttaatagattaaatttatattctattattatatataatataataggaaaaatataatttaaaaca

SEQ ID NO: 101557 - DNA, 610 bp, Cannabis sativa
gttgtgaatcatgtcctaggtgaatacacaacttgaggtgagaaaatggtggcctacttgagcaaaatcaaagacttgctaagtcagctcaaaggctacagaattaggtagatccccagagaggagaatgttacagtagatgcacttgcccatctaacaagtaacaccattgcaaacaaagcaaactctgataccatacagttcctaaaggaatcaagcattattatccaagaagaagttgacaagtccaacatggatgacaactatcgcagcttacctcctgacttgagccttgttagaagacaaaaatgaagcgagaaaattgagaagaaaagctactaggtacttagtcctagacgggataatgtacaaatggagcttttccatgcctctcttaaggtgtgtcaccaaagccgaagctaaacgactaacggtataattgcatgaaggcttttgcgacaaccatgccatggggtaaagcctatctaagaagatataatgataggggtacttttggccaatgatgactgaagactcgatggactatgtcagataatgtgacaagtgccagagattttaaaaaatatcaagagctccacccaacgagctc

SEQ ID NO: 101558 - DNA, 592 bp, Cannabis sativa
taatctcaagatgggaaatctttaagggagtcatctcagaaagcgtacgagtgaagacaaagtatagctgctagaaagattagtattaggatgcagaattggtagtcgttccagagattatcaaggggaatgaatgtgttttaagtaaagatttacaaggcattaggatgaggatgttataattgaatatctattagcaacaaatatttagcttgttaataagttaaatcagtacatcagtttaggagatcccatatgaggaatataaagacgtaattatgaattatatactgtaggatcttatgcttttgactgagttaatatgttgtctatcagtgtagacgattatacgataaatgaggatattgagttcatacgaatgaatagtctaatcttgtgaaatcctaaagttgatatctttgactatgatgttaagaattaaagaaggttattgagaaccatggagattgaagtaaaaaatagtataatattttattcctgaaggatgggtaacctaagaagatcaatggaatattagaaacatgttgtgggcatagttgataaaggttaaattatcttagaataatctctt

SEQ ID NO: 101559 - DNA, 629 bp, Cannabis sativa
agaaaatatttgacaaccagtaatagaaagaaaaccaggcaggcccccaaatttcggaatgtattaatttaaaaggcttagaagcccgagatacaaaattgggaaaacttaacttatgagatttgcctaattaacaagaagtacaaaatgttagacaatctcttcttggaaaagaataattacaagtacatgaaacatgagaagtaacatctagtgaagggtgacccaactgagaatgccacagatcaagaaaggtcttggaggagtagaggagacaaggacatgcaagggttgatggctcgggttaagtagaaactttataaatgccttgatcaagaagtcctttgagaagaatttgatgactcacctggagtaggatgaaattccacaaatgcattattatccaaacaaagctgagaaacactaagaagatttttagaaagactaggtgaatgataaacacgacagagtttaattgaagaagatggcaaatatgtagagcccacatgagagatagaagcaaacttactattgcctatagtaatttggtcattaccatgatatagtgctgcagacttcaaaagattaagatcgggtgtgaagttgtgtgaagcgcttgagtccatgta

SEQ ID NO: 101560 - DNA, 502 bp, Cannabis sativa
  modified_base (116)..(122): a, c, t, g, unknown or other
tttaatgggtcggcccatagtatttttgtaattttttttatccttttttgtatttttttgttttttccctaataataatctattaaagaaataaatattattaatttaaaattgannnnnnngtttaaatatattaaaaaataatattttattttaaaattggggtttgaaaattgtgaaaatttgaaattgggaaaaaatcccatgaaaatcggatttttgggtgcacacaccctggttgcccatgaaacaggctgcaagcaacccattccgcgcgcgggagagggatactgcagggtccataggtgggatttcacggcacttgcagcatgcatgtgggcggatgcagcgtcaagcgtgtctgaaacacggccgtgacacaacttcagacaagcatccgtgtccccatacgcgcgcgtcttgtctgagtgcctggtgcacacgagcacccactcgacaccattgaaccccggttttcaaactttcataactttctcaattt

SEQ ID NO: 101561 - DNA, 633 bp, Cannabis sativa
ggcgccaatggatttcatctctaacgagcgcttcagccaggttcttcttgcagtgtctatatgagatatattatgaggagattttgtttccaattccctgagagcggaagaggcctcatggatttgctgcttgagatccttgaaatgagttttattccatcgcatcagcctacagctggtgtttttggtcttacggtggaagttgatcatggagtggggatgtagtcttttcatccaggcttccttgactacccagcagcatctaggatccctattccacatgttttcatacttgaataatcggcctttgcacatcactccaccgtttgtgtcaaataaaataggtctatgatccaaaaccgaggatgagaggtgatttacaatggcagccgagaatagcattcgccaatccgtggaggcaaggcctcggtcaagtctggcccgtttgagagacccagcacctggggagtgagaattgcccctacaccaagtgtaacccggaccaacgaaccccaaatcaattaggcctgtgcgattcaccattcttctaaagtcaaacgcatagcgggaggcgttaccgctgttagcgtagttgatacattctgaatcttgcaaggtgccatttaaatcgcc

SEQ ID NO: 101562 - DNA, 516 bp, Cannabis sativa
  modified_base (117)..(143): a, c, t, g, unknown or other
tttcttatcaggctcttaatgaaaacatcaaactattaacgtaaatttttgttaaccaattaataagccttaaagtaataaataaattctaaaatttaataaataataataataatnnnnnnnnnnnnnnnnnnnnnnnnnnnaataataataataaatgacaagaaaatttttaacgtgattttaaagttaattcttcatagtctacaaatctattttattttggaatttaataagtcatacacaaaataccaagaaaatattggaataatacatacattaacaagaaattcaacccaaatttattagaaacctcactcatggcagaggtttaccatattaacaatcaagaaacacaacaatatttagggttaattgtgacaaaattatcaatagtttcactttgcttgtacttaaccctcaaaattcaaatttaggcgacaaaactctcatgttttgttagcaatttaacattttcgtccattttaggtgttaagtgccatattagattgtcca

SEQ ID NO: 101563 - DNA, 799 bp, Cannabis sativa
gagagagagagagagaacagtcattgctttgcattgcactgcaatttgcagcacagcggtatcagtgaggagagagagagagagaaagaagggcaaagcaaagtctgtcgtacgacagagaatattgtcagaggaaaacacgcataaatataagaccgcgaaaaagtgggtttgatttcattttgttcgtttaacatatcaaattacatatttatccttcttctatttccttaatctctgatttttttatttcttgtcttcttattagtactaggtgaggtgtacttaccttacctatgtcatgtagttcatcgtacctgtgtaacataattattggactatgccctaatttaacataatttttttaaaacaaattgagtttcatgctctttacactatgtttgggtaaaaggggagagattggatttatgaattttattgtttggcaagagaagttgagtaagcggaaggaagaaaagagatgcatggaatacaagaaaaagattaaaaaaaaaacatataaaaagatattactacatgttataaaaagagtgcaatctgatgataagtggacacgcagatttagttttgaatgaaaaaagataacgtgccaatatagtggccctcatagagagccaacttcgcacgacttaaacttgcgagaaaatgatcgagataagaatctagtcgcatactatgattggtgttacatgcgtgctaaaatggcacgttacaagctaagtgatgcccacaagttggccaagttgtaacgccccaatgctaaggcacgctacagtgc

SEQ ID NO: 101564 - DNA, 729 bp, Cannabis sativa
aagtcagccgcacctattctcctcgcttaatattcaaatttcaaacttcttcttctctcttctaaacgtaaattactgtcagtgcttcaaggattggggtttctttattcttttctattcttcctttcttcttttaacaaaaatattgttaattgattgtcctgtgtgcgaactcaatgtagaaaatcattcacatctcttttttgagtattatttttcaattgtgaaactttttgatttttgttacatatatataatcattttaaatttacaacaagtcagtgtcaaacaaatatttggggaaaccacggtgagaacatagcagattataaggcaaactttcagtggaagagaccgcatacaaagaaagttatttattttattttatttgtaaactattgagaagatgattgtttctttgttttatttatgatttatgagttgtgtgaatgaattggtgcttgtgcaaatgacgaaaggttgtcttggtctgcataattttttgtaaataaaattggtttacttatgaattgaatatatgtccgttaaaattaacttttttttttggtatattttttgttaatttttttggtatattctgttaagtgtatgcacaacaaaaacattagataagcattttatatattaggtaagatatgaaaaaactcctaataaatatttacttcatttcggtgtttagtctaaggattttgtggcaatgtttagtct

SEQ ID NO: 101565 - DNA, 555 bp, Cannabis sativa
  modified_base (52)..(64): a, c, t, g, unknown or other
  modified_base (518)..(529): a, c, t, g, unknown or other
aaaatcaaaaaaatcataaaaatgttcaaaattctgtaaaaccgtatttttnnnnnnnnnnnnnatttgtgaaattaaccctttactttttcagagagggcgttaagcatttctttgagaatatgcaactatagtacatatgggagtttttttgatttaagcgtttatatattataccagcataacctgggactcgaacccaggacctccaacatacacgcaccccctatggccactgagctagcctacatatgggagttttataaagtgttaatatcacttaaaataataataataatgaataaagtgtttctactattttttttattttatattttgattaattcctgtatttttgtatgtattgcaaaaaattaaattttatttattaaaattaatcttacattgctaatatataaaatgataatactatatataagaatgagctattcttctcattttcatttttttttgggataagttgaaaaatgcatcttttattaatcaattaatcaaannnnnnnnnnnntttatatttatttgaaacatacctct

SEQ ID NO: 101566 - DNA, 686 bp, Cannabis sativa
tatatgaaagacaacaaaccgaaaagtgaaattgtattagaggaaatgctcatccataccttagagacattgctgcttactttgggatgtgtccgacataaatcacccaaaaaattatcaagtacctttcagtgatgtatttttttatagggagctaggatggcctcaacctactccttatgagatcataaactatattcatctgaagtctactccgaagcagaataggatagggtacttctacttcagtcaggttggccactagtggttgggtgataccaataatgcagctatgttaaaagtttgtaggtatgccaagaagtactttattgcttagggaatttaaaggattggatactacgagttccaacacggtgcgttcttcaaacggtctatccccacattgcaaatgagggatagggcaaaccatattctgtcactcttactggagaagaaaaatctacttcggttgacctatggggccagtttccaaaggtatggtttgtaccctcctactcctggagttccaagagccctagctgtagagggagcttgcactggagatggacaagttcctgacttgtacgatgacgtacctttgtctcgtataacttagaatattaagaggaaagagaaggccctccactgatggttggccagcaggggtccaatttgtgatgctactc

SEQ ID NO: 101567 - DNA, 916 bp, Cannabis sativa
  modified_base (98)..(103): a, c, t, g, unknown or other
ccaaatcaaattttcagaatgttctgcactacgatataatcgtttcagtcgcggaatcaaaggcatgtaccacatcactttttgggggataagtttcnnnnnntccatactcttgtttactttatggggagataaaccacaagttgggcaataatccatgtctgcatatttccttacgatataaaatgctatcgtacggacatgcatgaattttttcatacttcaatcctatggaatttaaagttttttttcacttcatatgtagatttcagaaagcagttgtcaaatggtaagatatctttaaaagcaactaaaaatttagtaaaacatttattgctcactcctttttctactttgatgttgtaatactttatcattgttggtaatcttagttttttacaatcatcgaacaagagtttatctgcttcacttagaaaatgattgaattttttaggatcattaagaaattcctcctgtgctttgttaagtaagtccaatggatgatcatcgaaaccattaccctccatatcatctaccctcgctttcctaatgaatatggatcattagctaaatgttcaccattccaatacgaagtagtattacttttattgaaatctcgtaaatacacatggtccttaatcattgtaatatttcctttagatccattacaacaatctacacataaacaatgaatacgttcaggactttttagaattctttaaggaaaactctaaaaatacatcgaaccctacttgaaatcgcagtgtgtctctctcctcatgcatccatgattaatccataacaaataccctaacaaaaaaaaattaatatttagtaactaattataactagttactacttacacaatgtaactaactaggtttctcacaattaattcatattaatttatatatta

SEQ ID NO: 101568 - DNA, 510 bp, Cannabis sativa
taactgattttgtgtgtaaatgtaataaacatatttatcaggaacagaaggcagagacgttagagcagcagacagggtggagcttcgatcgctagagtaaacgaagcaagaggacgacggtgaggctaaggaggactcacgagcaatcttctttaaggattgggcataattggttttgaccattgatgattgagaaccctagaaatttttccctcaactgaaaaacattaaacctctaggtaaaataaagaaggagagaagaagataatgttgattgtgggtaaagaagggattgggtatttagatatttatagcaaagaataaaaatcaaaacccttaaaaacaaaatataaagaatactaaaagtgaaaacatcgttaaacttctctttctgagctagtcattttcgattgtccattgctaagaccacgagtccagagggagacaggggaggactggccaataattgctcacatccgaaatataactgtaaatgacaagaaaatatag

SEQ ID NO: 101569 - DNA, 1266 bp, Cannabis sativa
gatggtgatgttggtgaatggcggttgacgggattgtatggcgaacctaatcgaagcttgcgcaagagaacttgggagttgttaaaggtgcttcgagataagtcaaggctcccttggtgtatcatcggggaccttaacaatgtaacttctcaagaagataaaagaggaggtaacccttacccaaattggttaattgatggttttaatgaggctttgggtgagtgtggtctttgtgatatggatctttatggctattcgtatacttgggaaaggcatcgtggcacggacgattgggttgaggtgcgtattgatagagctttggcaaatcaatcttggttggatttatttcccacggctaagttgtataacttggaagcaaccatttcggaccactgtccacttcatcttgtgactcgtaatgcgactacggtggcttcaaaccgcaagttcaggtttgaaaattcatggctcaaagaaccactttgtttcaagattattgaagaaagttggtctcttctacctgatcttgaagtgttggaaaagattaaaaattgtggagatacgcttctagcttggggaaaggattataccggcaatttttcacaacgtatcaaggaatgcaagaagaatattagaagatggaagaagggtagggactcgacttcggtggaacattataaacaagctgtgtctcaactcaacaatgttcttcttcaaaaggaaattttttggaaacaaagaagtaaacaactttggctccgagagggtgatagcaattcgaaatatttccacgctactgcaactactaggaggcgtagaaactcaatccaaaaaatgaagaactcggctggttgttggcttgactggcagaatggccttgatactcttgtaagtgattatttttcacatctttttacgcctactgctgtagattttgttgagattttgcactgtactccagccacggtcacctttgcacagaatgaaatgttagttgagccggttttggatgatgaggttcgtcgcgctctctttcaaatgcatccggataaatctccggggcctgatgggatgactcctgggttctatcaaaattgttggagtactgttggtagtgatgttattaagtttgtcaaagatttctttatccaaggatctttgcctagcgaagtaaatcacactaatattgtgcttatcccgaagaagaagcaacccgaggtgatgactgatgttcggccaatctccttatgtaatgttttgtataaa

SEQ ID NO: 101570 - DNA, 917 bp, Cannabis sativa
ataaaacaatttaatatttaatttaatatttgatatatatatttttttgaatagaaagatgcaattttgttaactcaaatcattcaaaagaattcaaaaaatcatcacgtaaacgttgaaatcgtagagtctgaataggtacaatcattaattaaccacgatattttagctaaatgatgagtaaaacgattagcagatcgtttgacaaaaatcaaaaaaatattattcaaactaaaaagaatctgactgtactctgaaatgcagaacccaaaaatataagctatatctaacgaactttggatagcttggattgggaccaaactgttagactccaccaccacatcatgcggtcttatttctttcaaccacctcaacacttttttaaccccaatagctttagcaggaacaggaccagtcacccccatccggctgtctgagccatactaagttgaccataagagtttcgcgtcacctaaccatacccatacttattctgattgctaaagatagctgcatcgacattgattttaattatattaccaaccggtacaatccagtactcgtgcccttcactgtcttgtaaagaaaataaagaggaaccaaaatttttatcttaagcacaactccattgatcaaaactacccttagccaacaaaatcacagtcttattcttaccattccataccttgtcattgcacacagaccacaacgcccaacaaagcataataactctatgtttcatcccaaaatcccaacactgaaatctatcatgaagccatcccccaaaagagttgtcaccaatctctatcactgaaatacctgtcatctgctagcaagcaaaagaaaacgaacaccccacaagataatgaaaaatagactctccaactcgtaaccaccttggacacgacaacaaggga

SEQ ID NO: 101571 - DNA, 1055 bp, Cannabis sativa
  modified_base (605)..(606): a, c, t, g, unknown or other
tataccatgtaaatttccttttatttattggttattatatatttcaattttcaacaacattcaaatcagaaagaaataatgataataataataataatttagaaacttgtcgatcccatatataagaatcttcatttgttctctttcaagtgtcagagattgtataaggagaagaggaggtggtcataactcataataataatgttagtttttatatttatagggatgtttttaagtcaattaattattgaggtagcactttagtatttgcggcataaatacttaagtttaatttttcagttgcaaataaatacttaagtttaatttttggcggtaataatacctaaaataaatacaatataaataaactacgtgtcatttcttattggtctagaactctgtaagtacctaaccgttaaatgtattaagctattatattcacgtgtcattttcttattggtatatttaaactaattttttttaaaataataaaaatttaatgacatggaccaatcagggatcgccatgtggcaatttatttaactaggtatctacagaaaatttatgtatttatttgcaactggaagttaaacttaagtatttannccgcaaattactcaaaaaaaattatacagccttgaaatgtgtgtgtaatgttctctctcttccttacaaaaataaagactcttacttaaatatatgtaaaagttgtattatatttgacaaaaaaaataattttatgataaacttatacacccaaatttatctatatatagggcatcgggcatcttgtacaataatttatgtggtagaataagggccaaatataatatagtttctttcaataaataatttttgttcttcatttctaatcaaacaaggattttttatttaaaaaaaaaaatgaagatacgagaagagaggctcgaaatttttgcaaggtggatgtgacttgtgtcaacacaacacagatgatggtgaggaaaagaagttgacactgacatgggttatgggtttggaggcatcagtcgatcccaactcgaccaatatcaatt

SEQ ID NO: 101572 - DNA, 796 bp, Cannabis sativa
aaaagattgtgtttcatagtgtatcaaactaatctcattgtaacacatcaattaatttgagcattttaaagaaaaaaaaaagttgtatagatggttaattttttaataaatgaaaaattaattgacatgtcaaacttagattggtttaacacagtatgacacacaactttttattaggagatcttgattctctctattcttcccttctctctctcgttctcgaactcaccttaaggactcgacccacaacccaccactcacaatctcaattctttctctccacgaccacaaacccaatgactcactaacgcatatccaacgacttctccatcaaccacggtttcttcattgacaattttgtcaaaggaataaattatgtgattaatgtttgttatctgtgagtagatgttagatttagggtcaaaaacggccggatctgagttttgggcaaaaaattactttttctgccaagcccgatggtggtctaatggttgctcggtgccttcctgttgttaaaatgagtaaagattgaagacgaaggtccgatggtggcccgatgatatcgttcgatgatagtgcgatggtggtctgatggtagcccgatgccttcctattgttaaaatgattaaaagttgtaaacgaaagtctgatggtggtccgatagtggcccaatgatatggtctgatgatggcccgatgtcttccaagcgagcttaataaatggagcttaacatctctaaatgtagaatggtggcctgatgttaccattttttatgtacgaaaacatataaaaatta

SEQ ID NO: 101573 - DNA, 1230 bp, Cannabis sativa
gaccatttagtggcttgggatgagttatgcaaaccaaggagtgagggtggtttagcaattggaaggctagagctgaggaacaaagggctgctgatgaaatggttatggagatatcctttagaaccaaactccctgtggcacaaagtaatcaaaagtcactatggtaaagcatataacttctgggatactaaatggggggttcaagcatctccaagagggtcgtggaaagatatttcagattattatggggaatacaaccgattggtgaagttcaaagtaggaaacggagcaaatatacgtttctgggaggatgtatggattgggggatcctcattgaaggagcaattcctggacgttgtagtgatctctaaggctaagaatgcaagtatttaggagattattgccgatgagggcgaggtgggaaactgtgtggcaagctgggacttcaaattcagaaaaaactttatggacagggaaatcccgagtctgacacaactgttacaaaggttggaacatgttagagtactcaacatccttgatgatagccgtctgtggatttcggatcccagtgggatcttctcctctaaatcagcgttctactggttttattcgtccatgcagtctggcgaggtgttttggacaaagactctatggaaaagcagaggacctttctaaagttaaggtgttcgggtggttggtgtctctagataaattatacgtacatgacagattgcaaaaaaagcgcccatttgtatgcttgtcaccggggtggtgtgtttgttgtaagtcaagtggggaagatgtggcacatttgtttttaaggtgtcgccttgcgtgtaatctctggacaaagctgtttaacgaatttgagactcaatgggttatgccttgtgtggtttctcaaatgatagtgagcaaggtgggggcagtaaaagaagcacatgtttattgagaacgacagtcttgacagttctatgggtggtttggttagaacgtaataatagaatttttgaaggtccggagagctcaacaaaggccctatgggataaaattaaattttggactgcttcttgggtgtacaagactaagctctttgaaaatatttctttcacagatttaatgagagaatggagagtgttgttgtaagattttcgcttatgcattatagtctcttcctctgttaagtttccagttctttaggtgtatcctaggggagtgctcgctgtaatc

SEQ ID NO: 101574 - DNA, 717 bp, Cannabis sativa
gaataattttttaaagtaatcacaggccaccttaccatatgccggttccctgtaacccaattaagcctctcatccaccagccctttaattgtattctttgcctttctattactagccttccgatgaaaaaacttgttattcttatccccttccttcagccatatcgctctactcctttggttccaaaatttctcttctttatcaagcaagatattttgtttatgctccaattcctgaagctgttgccaatcttctacctcggttctgctggtcagttgggatattttttccttgtattcattcaattgttttgtcatctcattcttcttaattttattccatcgttgaagagcagccccacatttcccaagccggttctttacctctttagtatgcttaatcggctcattcattagccaaaccgactgtacaatctcagtgcactcttcatcatccacccaagcactctcaaaatggaatctagatctccatctagccatgtgttgcatcctagaagaggggtccttttccgtaaggagaagagggcaatggtccgagttaatacaatcaagatgttttactatcgcctgggaaaatttttcaaaccaatccgagttgccacaaacctgatcaagtctttcaaaaataaggttctgttttctcccattacaccaagtgtaatcacttccctcgaaacccacatcccttagttgacat

SEQ ID NO: 101575 - DNA, 562 bp, Cannabis sativa
ttgtatactctgatcgactcattggcagtgttaatctctgatcattttgttattgttttaaatgctaatgtgctaaatactaataagattgagaaattttttgttggtgggttttctttgaatgatcttgttaattttccttgcattaatcatttgctgatacactgtttaaattgttctgaattctgtgttatctaatcttctcataatttgcttaacccatcttcatgcttagagggaattttcttctaatagttcgatacttaattctttataatcaccactattgctgcctaggatttttacttcttataacttctttggtagttgtttattaggctatttttatgctgtaccatgatcaaattcaaattccccatgttttgattctatcaggttgaatctgaaaaccactgtacaaatcaattgcggttactaattgatcaaataagtatgcaacaagaacgtattgtttctttagaaggtatggtgtttttcttatacactattatctaatgggaaaacggattgtaatacccttcacacttcatcaacacttagg

SEQ ID NO: 101576 - DNA, 616 bp, Cannabis sativa
gctgaagcaaaagcttcccaccagaaagttaagggtatgtttgcttgagcaagtaaagtaagaccaatatcaaccacatgcctatgttttctttcaattttaccttgttgttgatgagtatgagggcatgagtttctttgaataatacctaaatgtctgtacaggttatacaaaggttcatattccttaccaagatcggattgaacagatttaatgcgtgtgtgaaattgtctctcaacaagggtattgaattgagaaaagatgttgcttacttcagacttttgtttcataggaaatatccaaataaacttggtaaagtcatccataaaactaacataatatcgaaaaccatcactagaaggataaaaagatggaccccaaacatctgtgaggactaattgaaacggttggacagttttattggcagtagctttgaagctaaattggtgaagtttgccaatttggcaagcattacaaaaagaaagttgtttacatttaaaattgggaacaacttgagacaagactttagtgagaattggttgagagggatgaccaagtcggcagtgccatatgttggcagtttgagacttgtcttgaacaggattgctagtggtgg

SEQ ID NO: 101577 - DNA, 1725 bp, Cannabis sativa
  modified_base (723)..(736): a, c, t, g, unknown or other
catggccaaaatgacattctaacgtaggcgctcgggacaccaaagcattctagacatgtcagggctgctgggtatgctactacttaaaaaatattgtttcattagttatataaaataaattatagctaactttatttattgatttgcaagttccttcccaaggcttctaaattatttggcaggatgaaaaggaaagtttttgatgttgtggcttagaaacagagggagattgagaaattaaaagctgaaatcaaatctcttaaatagaagaaaaatattgctgaacaagagcaaaatgaggatgaggatgaggaagaaggacaggtggctcatctggcgtatgttccacaataatatgctcatgaggagggtccagaaaattatggtcaggagtttgtttccctaaatgagccacctctcatgtacaatttcactgaacagagggcagctaatcagctagtattttttttactcagataatatcgacaacatagtggcatgagcttatatgtacgaacatgagggtgaaatcacagttcatactaagccctacgatgattcacatgcccgtgttctcattttagaaatgctacaagaggatgctgaaacccaatctcaattgagggttacaaatacgttaaggaagtagcaaacatgttccctccttggcctaaatacctcattgtaacacccgaggtaatggtttgttataaattaattatnnnnnnnnnnnnnngtttgaatatcttaaatattcaatcatagtgaagtaggttctgcgaatacatgtgctgcggtcggatggatgaaatcaattgttttatctgttttatttgttattaggcatgtttaaaatttttgggggcgttcaattacaactgttatggtgtcaaaaattcgaaagaattaggatcaaatttgatatattatatggtattttgtcaagggtccattagctcaaccaccatcaagatgtgatgtgtcaaaaggaaaaggtcccatgcattatcgaaaaggcagtggtgatcaagcaaatctattattcacactagagaccatggcactaattcccaagtcacttaaatggatggttgaagaatttttaagagtcaaagataaacgtgatataatcccgatttgggtgccccgtggattcatagcaccttgtacccagatcacattatctggagaagatttatagcaggtggcattgtgtgacttcgtcggcaactagggaacgctttttggaatgatgtatactcttctttaatctaattaatattatgtataaaattatgctaaaattattataaaacactaatatttaacaacatctgtgagagcttaaatgatttgagatgaattttcaagttttatgacctagagcttctcgcaatgaatggtatcaacgattcagagaaggaagagtcttttgagaatgcatcacaaggattggatcattggttatcatcgatgaataaccaacaccaaatgttttttatcccttgaaatatctggtaaacactatttaattttttagtgctcattgttttctatattataacttgaaattatttttatactatcttacatacatcccaatataatatttttgtgcgcattggaagctaaaaatcgttgcgcaggaaaaaattatccatttagaccctatacgtggccacaagttccctcacaaattactgcaatgttggaaaggtaataatt

SEQ ID NO: 101578 - DNA, 1159 bp, Cannabis sativa
agcactagtattatcatagaaaatagttaaagttttcaaatctaacccataatctgccaccatttgtttcatccataacaattgggtacaacaactactcgctgcaatatactcagcctttgcagtggatagagagattaaattttgcttcttgctgtgccatgaaatacaattgtttctaagataggaactattggaaacaattttaccgggatctagatttactaagaagtatgtttattaacatcctaaatatgaatttctaaaacaataaaacttaaacacatataaagtttgagaaaccttacattgattgcagtggaatataatgactcattccactcagatctctcacccttattcctttttgtcgcagagtattatcaagatctgagcttgattctccttcagttgtttagattcttcaaagtcttacacactatgattgaggactaacctgctatgggagggcatgcactcaatcactaaggctaaaaatatttgcatacattagacttccaactggtgaagcataaggaggataagtgggaaactattccttagatagacagatacaagatctagaaggcgtcactgcccctttagtatgagtcattgagaatctccccaacaccttatcaatgtaagctacttgcgagagagaaagtgatctgttcttccagtttctgatgatttgaataccaagaacataagttgcttcacccaaatctttcattttaaattgagtgtcaagccattccttgatgtcagacattttcttgatattgttatcaatgatcaaaatgtcatcaacataaaggaccaggaatactaccactttataatccttgagttggtaaacacaaggttcatcatcgttttggtgaaagtcgtaggttttgattatttcctcaaaccttttgttccaagaatgagaagcttgcttaagtccataaatggacctattgagtttgaaaactttctcttcttgtcctggaagatgataaccttttggttgctccacattgatggtttctttaagaattccattaactaaagctgtgttgacatcgatttgccaaatttcataatcgaaagcaaaagctatggagagattctgatggatttgagcattacgaccggactaaaagtatcctca

SEQ ID NO: 101579 - DNA, 815 bp, Cannabis sativa
ataatcattatcatatcttgtaatttagtattaataaataaagataatcaatcttcacatgtagcatttgtatattgtaatatttgtatattaatagaatctcatttgtataataatgattcgcacttttcatgaatatgcctataccatttatataattgaacaattataatccattttcataagctaaaagaaataattaaaacaaactatcaaataagaattaatcttgactagtgtaataaattattttattacctaacgatttaaaatatttagctaccaaatttgactcacaaaattgaatagctaatactttctattaataaataaaaaattgaatttgctaccaaattatggtagcacacaaaattaatagaaaaaaacattaaatcattttgctactaataaatattttttgctgccaaaaatttaatagtaaataatgtacatttgctactaaaatatttggtagctgaacacttttagcgaccgggattcagctacgaacaagctaccaaaaattttggcagggtaaagttttttcgctaccaaaaagatattattggctaccaaaagttttgtaggtaaaacacatttttcttgcacaaattccacctagttactttaaattaaaagaatggcaaggatgaagaaagaatgcagtcatcattggttggttttccaaaaatctcaatatgctaacttttgatattgatcaagttcaagcaatgcttgaacttgtttaaggttaagaccttagtcccaacatcagcaggattatcttcagcactgaccttctctaaatcaaccag

SEQ ID NO: 101580 - DNA, 991 bp, Cannabis sativa
  modified_base (687)..(688): a, c, t, g, unknown or other
tcgcagatagaccagttcgacctacactcgacgcgactcgcaaagagacagctgaagttctcgggagccttcctgtacaagatcgtgattggaaattattgtgtatgactgccaagctgcgagaacacaagctgattccagaggacgtaagtcttcagagagagccagtgtacaaggaaccatctgagaaacaacaagagcagatagacaaacgcctctccaagaaaacctctcgaccaacatcaggtaacatatcgcatgttataaactagtgccttgaaatttatttatatttatcttttatttgtcctcgcagagatgactttcttgaagtccgcactcgtcctcaaccgtaagcccaaaagtggaacagcaacgacatcgcccgtcgctactcaaaagaggaagagcgacgttataaccactcctgccccggattcctccaagaagctggctaagatcacgtaagacaaggggaagaaagtcatgatcgagccaactatccaagcccgcaattttctgacaatgcaggagaagttcgttggcgaggagttcatatccaaggcggagaggatcccttctgaagagcttgttccatgctctgtggagtttgctttgcaatcgatgactctgttcatgaaagtcgttgtcgctggttctaaggaagctgaactactgaagaggcannatgcctagctccaggagagcataaagaaactaaaacaggacgcgggtgataaggacagggagttcgaagaccttcgcaagtctaaggagcaggtcgagctcgaggccaagaactcctagatgaagatcaaggagatgtctcgcaacttggagatcgagaaggagaatgggaagaagcagtacgactaggcagtttctaactacatttacaccactctttccaaaattccagatttcgacttttcaatccttggagcagaagccgctgaaatggctgaggttttcgcgtcatgtcgcccacaca

SEQ ID NO: 101581 - DNA, 556 bp, Cannabis sativa
gtggaacagattatacctaatagaatttgaaaatctacacttccctcgtggactagagttgaagactcctcttttggaataagttcagacatagaaaaccgtagcgccgcacaatatagtctggtttctcctgagttttgttcatctcctcctggttaggatgtggcggacctctatctgggcttggttggagtcttggtcaagaaggcttgctattgatctatgtgtgtgtctattttccttgggtcctcgtctcgcatttcgtcgatctgggttgggttctatttttgttagttcatactgttgggagagttggatcttacctttggggtggtcaactagatgtctggggatttttttggtctggtctgattgtccggttgtctgacggtctagacctctattgcggtcagtcatggcagtcttggtgtttcttcgtccttttgtctatgttcggaggtgatgctatgcaattctaatcagatttgttgaggtgctctttggaaatggaggtggagttgttgggttttatgcttaaaataaaactcatttcaat

SEQ ID NO: 101582 - DNA, 567 bp, Cannabis sativa
atttttcacaaagatctagaactacgtttgacttgttttttataaaagaatacgcaagcaacttagtttttaagactaagtgcagttgccaaaaccacaaaatggtacaaaatacaaatctcaaaattccattctattaaaggttattcacctagaatttttttaaaattttcaaaaaaaaaatgtaaacaatacatactagaattcttatattcaagtcttaaaatacctctctaaactacaagtggcttgatctttcagaaaaaaaaaaaaataagcagctcaatatattaaaattacaattggaattgaaagatatttcctttaaacaaaaaaaattgtaattaagaaactattcttataatcttagatgtatcgaaattaaataaataaaatatttttcacaaagatctagggagaccaaaattacatttgacttgattcctataaaaatatgagtaaatactatttgggaccctgtgttttgtaaaagttactgattggaccctctgttttgttaaatgaccaaatggaccctatattttctaaaatagtaaaaataaaacc

SEQ ID NO: 101583 - DNA, 617 bp, Cannabis sativa
  modified_base (48)..(65): a, c, t, g, unknown or other
  modified_base (237)..(241): a, c, t, g, unknown or other
atcgttttagaaagttcttatttatgatgttaataaacatacttgtgnnnnnnnnnnnnnnnnnngtaaaataatttccaacactctgatcgtggaagctttccaatcgtggaagcactttcttgggcagcaagggttcgaaaattcccaacttttaagcccccaaaactatctcccaacctaaccaaaagctaccaaactttccagaatagcaatttggggtaatctaaacataannnnnaactcaaaagcatctaaaataacatacaatgaaattcaccatggttgagcaaagattgagttctcaaaacctaaacttcctcaaatttgctacagctgctactacttctaaacacaaggtatgaacaactaaaatcaagctttaaaatagtctctaacacaatacaatctcaaataaactaagcccctaaattctcaaaatcacaaaaaagaaccaagcttaaaactttaaagacaacaaggaataaagtatctagggcttacctttggtcttaacttaaggtttctcctcaaatccttgctgaaaatgacttcaatatgaaagcctaaccttggttcttctagggacaaaggtgaaggagagagagagagagaga

SEQ ID NO: 101584 - DNA, 611 bp, Cannabis sativa
gaattgtgccaaatgggatttttacgagcccagcctattgtaatctagtgcaagtatgatatcaaactcttattaaacttgaaaatttttacataacaatacatcaaaaaattatattttctataaataaaactttaaaaaccgtataaatattaaaaattccttacagccctatttttataattttttattattatttttatatatttttgaaataataccttttttttcctttataaccactttgcacaataattttattttgacatttgcttgttgaaaattctcacttgataaacacaacacctcatgcctaaccatacttcagattgatgataccagctgtccgttgtgtggtaggggtgaggaaactatggaacacttgtttcttacctgcgatgtggcgatgcacttatggaggtcttctccctgggggatcttccctgtgtgtgacaccggtgttcgtgtttgggattgggtgaagttcatttggagccttaatagctggggtctccgagtggacgatgtcttcctttatgcctcgtttgtagtggacaacatatggaggatgcgcaacgacgtcataaacaataattgcactcctaatgttc

SEQ ID NO: 101585 - DNA, 772 bp, Cannabis sativa
aatgttctctctctctttgtcgctcctctctgtagatcatcgacagagaggcttgctttggggtttgtagagttgaccggagtctgggttgcagaggcggtgggcggggagatcgggatttactgggcttgagtttggtttcgattaatgttctgctggttaattttattttctgttctttgattagtctatgttgttttttcatttgctcaattagtttttagatttgtgtttttccagatttgtgtttttattggtttttggtatagacctaatatgtttgtacatattggacctgtaatttctttgtaaaatattttatgttgacttatacttaacaattttttttaattttaccaatgtatagattaacttgtaaaaatataaattataatttttttaatttgttgtacaatttattaaactaagaataaattataaagatgatttttaaaaaattgcactcctatttcagcttttaatatcaaaattaaaaaaaaaattataacaatcacctaaatatggtttttagatataacttagaaaaatagtattattaaaatataacatttgtaaaatatagtgtattgttttggtttagaatgaataaaaaaatataaaaatatgatattgcttcctaattaaaaaaaaaaattactaattttttaaaaatacaattataaaaattattttgagaaaattatattactttttctagaaaaatatttagtatagtggcacgtcatgtgtgtggctgttaccttttcagttt

SEQ ID NO: 101586 - DNA, 891 bp, Cannabis sativa
  modified_base (739)..(740): a, c, t, g, unknown or other
ttgcagcgctagttgcaataagggtttctatgtagaatttcgtaaaaatgtaaaaaaaaaaaaacaaactattttgaagtaagcccctattataattaaagaacttaactgttaaaaaaaaatataatagacttaaatataaaaataaattattaatattaattgctaaaaatggtcatatttaatattcaaactaaaaattaattattttaagaaattagttaattataattaatttaattaattaatttttacttgtcggtaatctgctatcacaggtcaacaaaaatataactatcatggttacaataaaatataacatgctatcttgattcttgcctacctaacgtggcatgttcacgtggctgacatcaatgccgtgtgggagtacaactcgccaacaagaaggccaagccatctactcagtacttcaaccaacaatgggtccgagtacttaggagggacgatgaaatgacgaaccagccacctcaaggggattgggtggccacccctagtcggccctatggccatcataggtcggccaacttccaaatgtggccggtcagcatgcactctgacatggccagccaacttttttcctggtaggtttttgtgtgcaactttcatccatggacaacaagtcaagcaatgaattaggccttaacagcccacgaaaatagagagaaaatattagcaatttccctatttttgagggacaatttagtcatttgaactttannaatttattatgtaaataatagctttatttacctattttaaaggaattttagggatgtaagctctacgttataaagagcattagtcaaaccttaactctcaaatacttattccttatgtcttaagctctcagttctaactctcaagctctaa

SEQ ID NO: 101587 - DNA, 504 bp, Cannabis sativa
gggcataaaacccaacaagattgtcatgtggacacagtgtacacgtaatataattttattggtccatgtaaatatagatattttttaaattaataaataaataaatattaaaaaataaaaatatttctttaaataattaatttttaaaaaaattaaaataaccaaaatcttaaaaaatatttttttcctattcttttttttttcttttctttttttttttttcattttctcgatacccttcttctctctctctctctggaatggatgcaagtactaggtgcgatcgccattgtcgaggaccaccgagccgtcgctattaccgaggaccacaaagctagcaccgttgttgaggaccaccaaccctgtgcagtcaccgagaactacctcatacaactgatcaatctcaatcaccgcatagaaccaccgagaaccaccacatagaatcgatcgatctcttagctggttatccctaattttctctcttagccctgatcgatctcagcc

SEQ ID NO: 101588 - DNA, 1839 bp, Cannabis sativa
  modified_base (103)..(106): a, c, t, g, unknown or other
  modified_base (450)..(450): a, c, t, g, unknown or other
  modified_base (851)..(861): a, c, t, g, unknown or other
tagcccgagcaggatgcctcgctagaatacttgaagcaaaccgatcagttatccgtgtagaaggatgaacacttagctaattcagctttcgcattatgagtcnnnnacgaaatcccaataactcggggatcagattacagggatatggcatacacacgatcccacgatcaatgtattctgcgtcaatcccacaatctttgtactcagcattaatcccacgatcttttctgtttatatccattgtaacgagaagggaaagacttcttctccaagtttactgccctataaatagtgatacatgttcactgggcaaagggtcgcaaacagtttagtcgagaccttaccctaaatatattatctaagaattcttattcagagatactgttgtaagagctatattaaaggaatctttctccttattcttgagtcaatacaaataacgaggattangctattaccgaactgctcgggactgaacctctataaaattcttgtgtctttatatttgttttactatatatcgattattataaataacttatcgcttactaaataagactcattgtcgttggctaaaaacgaggttaacattttggtgctttcattgagagaaggatcaagaatcgctcttcattcaaaatctaaccacaaatacgatggtggtgcagactcgtaggggtcagggggatccagccaatccacagacggtggatcctgcatcgtagaacccaggaaatgcaagggttccaccagctgttaatcctggacagccggcaaacgtgagtcacagtgtaacgactgctatagatgaaatcacgcctagtgtgtaagagactgggaataacagttcnnnnnnnnnnnagggcattcataacacagccgttccgcccggtaccaacgttcaaaccaccattggagatgatactgagttacaaaatctccgtgacgctcttaggttcatgcagggtcataacaataccctacatcatgatcaggaagaactccacgctgcattcactactacaaattacactatttacgtcggtcaacgctactgttcatagcgttgaccgacgtaaatagtacctaaataattgatccgtctgtttataaatgacgctaataatatataatttacgtctttttataactgatgatgaaaacaaaactgacgaaataaagcaaaaaaaaatttaaaaccttgcttttttattttgcgtctgttgttaacagtcgaccatggtatttgcgagtttttgaaaacgacgcaaaacaaaaaatgtgaggcagcatcaataaaatccctaaacccaatcaaatgggtactgttcacacttccctaaccctctcctcttcgcaatttctctggcaaaaccagcgaccactcgagcccctttcaccctgttcaaaactggccatgcaagaccctttcctcctcttcttaatcgggcagtgacccaaccccgacctcctcctctcttcttcgtcttctaattaatcgagaggtggcccaacccgactcctcctctattctccgtcttttgatttcttagaaggtatgatttcttaatcaactaattggttcagccgtttatagaggttatttaagagatatagatatggtgttagtaattttacatgttttaaagcttttgtatcaaattaataacatagagatatttcatttcttacccatttcgttccctccatcttcgattttagcttagctccagcggagcttttttccatcatcaaccatccaatctgatctcaccaccagatttcttgacccctaaaaccaataacgcctaagctcttccgctctcttgtggccatttc

SEQ ID NO: 101589 - DNA, 1059 bp, Cannabis sativa
tttggaccgattgagcctttcgagcttacctgaaaagttttgtccttagtttacccaaagttgagctttagcctgtttcaaaattctcaccacttaagagattgaaaaaaattgttatgcgaagtgcctttactataaaaaaagaagaaaaaaaaacacaaagtaataaatgtgataaattcttcttgaaaaaaatgtgaacaatgaggtaggcacataaaagaggaaaatttaatctcttaccagtttctttgggataaaagtatggataattgtgggtgcttgttcggtataacttttcttatggtataatgtagcctaaatgacttctcatctacccgttttacctgagccatgatattgtaaccgaaaaagaccttttgattccgagaaagaattgttaaccttagtggagagaggtatgtcattcaagcttattgaacatgggttggtggaatgtcggagagtgtagaacggttgtgatatgagtgtcaaaagaggtgttttgtgtctatatgaattgcttacttctaacctgtgcatccaagttaattcttagagttattgagttgaaattcaggttattgaattgcttgaagttgtgcatgtggtagtggtagttcaaccattggaatgttcagttatctaatgcatcgttttatttctgttttagttttagttttagctttactcgagggcgagtaaagattcagtttgggggaatttgctaggctatttctagcctatgttctggatcgttattatgtttgcttttcgatgttttaggacagaattacgcttgtgtttctatgttttcaggtttctcgaagctatagaagccccagtttacaaaagtgcaataaaagacgagtggagccaagaaaaacgcaaagttgatgcttggaccacttgtggccgcggcgagcctgaccatggtcgcggccataactcgagaacaagagaccaattttgagggattcagtagctacggtgagaggtgtcaccggcgtggccacatcatcagccgccgcagcgaaggaagccatggccgaggcgaga

SEQ ID NO: 101590 - DNA, 993 bp, Cannabis sativa
tcattaattctgttgatgcattatttggtggtttttgctctattgcgatattcttcttgtcattcataaatacttcagttgattcttgctcttttgctatcataatattctcttgtactaatttttctctttttgtgtttagttcttcattcttattatttgtaaacgtcttcttttcttttgatttcattttataaatcttgcacaatatctaagtacatcgctgcaaaaaaataaattaaaattaagttagactttactattatgtacactaaatattaaaagtgaaatactaatgatcattaagggtatttgttagtacctgtgtgtcattggattcgagcaaatgatactcagtcatcttccatagagttagttttttatctggctccataaaatccaaagttcttttaaaacctatctcgaccttttgttgattcaagatcgacttctttgttgcattgacgtgccaagttccattttttgcttttcgattcaatcttttattattctttgttgtgaaaaataaatcttttttataataaaaataccactcattttcagtcatcggcgagtatcgatctgtaaaattattgagagcagaaacataatgtgagtaataaaactaaagaaaaaactaataataataaaaagaaaatattgttatattgaattcttacgagtgagttcttgaggatgaaagtcatatatatttacatccaaaatgtgattggattgaagtagatgagggttgaagtttttgttgtatacataaaatccaacaatttcttcatcattaggaagaaatctaatcccatgtagaaaattattaaacaccatagttattgaaatactagcaagctgtaatgttaatagaaaaacgtaatatatgtcaatatatttaaatatatacgtacatgtatatatatgaagaaaaagaaattaaaagaaaaaaaaaacctgtaaattattgttgagaataatgagttgaaa

SEQ ID NO: 101591 - DNA, 805 bp, Cannabis sativa
ggggtcacaattatatatataaaatgtttgttgggtcatcaaataaataaatcaaatttatgtggtctattttggaataaattttatgacttaagggcatgattgtcatgatcttaatatgtaaataccataaggacaatttctacttttatgaggggccaaatagaaatattcaataaatattactaacagttttgtatgttggtaatataacaggtaatggtccccatttgtatcgtatctttttactcttgtatctcatcaccaagagaaaaagtcagagaaagattttgatagaaattggaagatcataccaatcaaaggtcgattttatggacactggtacgcttccgctaatttataatgctattatttaattctcatgaattaagagcatcaagagcatgtggtactcctaacatgtggtatcaagagcatctctaaattaattcttgagaatttatgttagtattgatctttcataaaagtattcatgccgaatatatatgtatttgcttggttgtaattattgattactgtgtatatatatgtgtgtgctgttggaaattttctatttctctcctgattcaatggttacttacagcatatgcatatgcataattctgtgtagaattaaatttgtgagcgatatattcttttgagaatatatataaatataggcgaacgattttgtgcccaggagtgtgaatcacggattgaaatccgttgtacggcaggtaggtcccacgttagaatagtttttttttcaattatttaatttagttggcaaccggttattctaggt

SEQ ID NO: 101592 - DNA, 696 bp, Cannabis sativa
ccgaagtctttgacaagtcttctcccgaagacccttttttgtttaatcatattcttcaacctattctaagaacagtataagaacattaaataaagactaaaatttaggtgaacactctatcttttcacaaaagaaactctctccaatgaaaatatgaaaaataaaattagaataggtgaaaaacatttgagtgctctctaggccctatttatagaacataaaaactctagagacaatcacaaacacattttcaaagctaaacaaaactttttttaaaaatccctaatttgcagcatgaaattcgtattttatagagacaatcaggtccaaataggaaacttctcaaatacgaccaagatcatgatttggtcttcaatacttgcaaaattaagattatttgattttctatacatatagcaaaactgaaattaacatttagaaaaaagaaaagtcaatttttacaaaaaataggtaactttccataaagagaaatccttctcttgtatgacaagtttcctaaacaaaaaagaaccgttgtaaatagaagttaattaaaaggaaaagagtaatcaaagccataaaattaacacaagaaaataccataattcacaaataaattaaataatattttgacaactaaattgccaaaaaaaaaaacctaacacttctttcttattcttgtgatttgttcatatt

SEQ ID NO: 101593 - DNA, 627 bp, Cannabis sativa
ctttcttgttcaggccagctttttttgaaagcacattaacataaatacatatgaggtggcctaattagatgatgacatgtgtcatcctaatcacttcttaacgaaagttaaaagacagattaatagatgatcaattattaaagcggttaaaagtaaatagtaaatgaggacatgtgtcatcatcatatacatctttttggctatatcatttttaaaagagcacatatgctcctcccttcaattttccctttattcttttgcaacattatttatccataagaaatatatgtaaatgtctcttctatatagtgtctataaattattcaatccaataacaatcaactgatctaattataactgactgccaaatattagatatccaattataataagatttgattggatgttatttttgaatatccaattggatcggattgaatattgaatgtggttttagaaacactttggtaaaagttagttaggttctgtttgagttgtcaattagtttgttatttcttgagtcagagtcggttgtaagttagttgctctgcaacctgaaagagcatgtaaatgttcttgagtacaacaaacatcagatttgttgaaagacaactcttcattgattta

SEQ ID NO: 101594 - DNA, 693 bp, Cannabis sativa
ttttttttttcatttataaccatctattacaataatattacacacatacaatcacatgcgtatataaacatttatacagcctaaaccttttttattactaaaataccacttcctcctcaagtcggggtcgcacagaaaaaacaatgccaccaccaaaaaactccattaatgtttcctttgtatgccacacataaattttaattttttctttgagtttgaggaatcactgctataaaaatggatttaagtgactcactacaagtgacactaaattttttaagtaactcttcactacgcatcactaatgtgggtgattaaaaaaatagtatatagtgacccttcagcgcgggactacaaatattttagaatctctatatgtgtcactgtatatgtttaaagcaacccatattaagcatcattgtatctatttttttagttattttcctgataaagtattttttaattattttttgataataaatgttttaattattttcgaattagtacactcaaaaaatttgaaaataacaaaattaaaattctttttatttatacatggctacagaaaaaaaaatactccaacctaaaaaaatatttccaataataattacaaattattttattactataacaatgaataaacaaatcaatataaatttaaaaaattacaagtaaaagaaaacattaatttaa

SEQ ID NO: 101595 - DNA, 655 bp, Cannabis sativa
acaagaattgtattgttattaatttgttggcttaatgctaattaatttgtgaatgttgccacacttctctaagaagatccttttatttggtttaaaactatgaaaaccctactatggctctcaaaggtttttcttattatattacaccattactctttcttatcatgttgttcttttcttcttctgattctttatttcaaagaattattttacaaaatacataaaaataacaaaaaatattacaatacagtaatatagaattttaaatatttttacgatttttataattttatttataaaaaatacagctttttatattatatttttattaattgtattatttatatagaatactataaaaatatatataaaaaattattaaaaaaatgtacaattttttcacaaaaagtaatacttcatataattattattttttttttttttcaaatgggtaattcaaaataactttgggtcaactgtgttgaaatcaaatatgtttggaataataccaaaataccttttattttgactaaataacacagttctcgatgaccactatttgtttagggaaatttcattttttgcccttaataaaacccccaatatcaaaatttagatcctccactaatttgtacaaattaattccattgattac

SEQ ID NO: 101596 - DNA, 708 bp, Cannabis sativa
taataataataaaaaaagttatatacaaataagaaggaattaattcaaaaaatactgagatataaattaaaatagaaccgtttttaacaaaatgagtaaaaaaacaaacacacaataattctaattaaaaataagagagaatcggttctaaaaatactgagacataaattaacaaaatgagtaaaatcgtacaacacacaataactcaaaaatcaattataatgaaaaaaatatatattataaatcataccatatcataaaaactaatacatttcttaaaaaatcctttcaaaataagacttttgtctttagttcaattttcaaatatgttggctagaaaatataaaacataaaaactcacttttttaatgtgttgaatctttggccaatcttcttactccaaccaacatatcttcaatctctaaaacatcattgtaatattatatagcagtcacattatatgaaatgtcttcttaaattaaaactaatcatattacataaaaccaaaactcacattctaagttctaacataattttcaaagaagtgaaaaacaagaaaggagaaacatatcaattatgacaaatgctaataaatactattagtatttactacattgtttcgtatcaatacttttaaaatatattactaactaattataaaacaccacttataaataacatagaccataacaatactctatcaattag

SEQ ID NO: 101597 - DNA, 1545 bp, Cannabis sativa
tattttatattctgcctgttctgttttgtcactacaaaactgttttatattttcatatatataattgacatttgcaaaaacacgttttttcatagtgtatttttatttgctaatggtcccaacagtatcaagcagttagcaattgtgtccataaactttatattttcttacaattaaactcaaacgatggttagcaaagaagattttcccattatttttaccttgaaattaaaaaattaagatgctaagaggctgcttagtttcataacttaagagtatcttcaataaaagggtaaataagtagtgaaaagttaaaatatagttcatttaacaaaaagtgtgctccaatggaatgtaagtttagcgcatagaaaattttgtgccaaatttgacacaacatttgatatgatgtaaaatttacaccacaataaatgcactattttttcatttacatttatatcatttttattattttattagtacatttaactaattatgaaacattttatattatttttttattgccttacatattaaaataataataaattgattataaagttattagattttattttttaaataaaatattaattagatattaaattttacattaaaattttgcaattgtgtattggagcacaaagcaaaaatttggtgtaaaaaatagcacaatttttacatctttcattggagattgtctaaaaattcatttctatttttttaaaatctgaatagtttttaaaaactaatagaggttgtttgactaattttttaaaaaattaagctttaaaaaactaaaaaacagaaaacatcaaaatattgtttttaatttttaaaaatatttttttttttcgtcgaacatattatattttacattttgctcacatattcagatcctaaatccagaactaaacccgaactcagattgaatggattcatgtcatggtatgatgttaaaatattgaattttttagtaagaaaaatctaaaaatagttttaaaaaatttgtgtcaaataccattaaatttttaaagtgacaaaaaactattttttattatcacttttaaaaactgaaaactgaaaacacaaccaaacagtctctaaaattctcttttgagtttattttatattagagaataaaaattagagatagtacaaaaattaaaattcatatgattgaatggtatgaagtaagaaggtaggttctcaacatttgtgtcaggaaccctttgattgatttatgtataataatgatgagatcattttaggctgcgctagtttgtcaacgaatcaatgtgaatcaaattttttgatcatcagctttatctttgaatagattaacaaaaattgaacttcacaagacaagtcttcccaacattataaatgttttcattgccaagttggcatttgctgcttggccgacaaattattattattattattattattattattattatatacatacatatcaatgggaataattgatagctaacatagcatagcgtagtataacatagtaacagtgacatttaaaagtca

SEQ ID NO: 101598 - DNA, 678 bp, Cannabis sativa
ttttttgttttgtcttttctgtatgttgtagtttggactgaatgttgtgtgggcctgttttgttggattagtgggccttgtacaaatcagaaatttatgttttttttgttcagctgggccctgtagctaattgctataagtctgcctttcttcccccccgtcatcactgaccatttcaccttcctcctttactgtctgcattgttttgtatcttcatcctttactgtctggggaagcgtgtgcattggttctacagaagtgtttgggtcatcgtcgtctcactctctgctcttcccagttgtcaggtatgtcgtctaaacgcttcactcgttcatcactctcctctccgtccatctcccctgttccacctgtgttgtctgtcccacctgggtcctcctcacccaagtcgtcctctgagtctccacctgttccccttaagaacttaggtccgtcgtcgagtaaacgaaaatctgttcagggggctaaagagtctgagtccaaaaaatgtaagggctttgtcactgagtctgaaccttctcttggtttgcccttctattcccatgacaaacttcttcgttttcaagagaatgtttgttctcgtcctctgtggcctgagtatagggttaagttgaagcatttttctagggttcgtgacattgttcagtctcgaaagtggga

SEQ ID NO: 101599 - DNA, 1479 bp, Cannabis sativa
  modified_base (771)..(774): a, c, t, g, unknown or other
tattaaacaaaattagagagtgataaacaaaatctcaaattgatatttgagactgaacatacacaaataaaaaattaaaaaaaaaatcaaaattgaaaaagaagcttaagaagctgaagatgatggagatgaaaagagcaagaactaatggtaactacaattgaaaaaaaaaaacatggaccaatctttcaaataaatgaagaaaaaaaaaaaaagcttaagaagaagaagaaaattttgaagatgatggagaagatcaccatcttctcatcaaccaaacactactgctcccataaatgtgtcaccatcacataagggtgttcataaaataatccatccaattcaatctgcacgatccaattcaattcaattcaatctgcaaaatgcagatatctgcacttgtgcggattagattgaattggaaaattcaaatccgcacttgtgcggattggatgttgattgacctgtaaaagtaaccgatccaatccgatccacacatttttataaaaaaaaacttaaaaattttatatacaattaacattttaatttaaaaaaaatagtaatttaaaaaatttaatacatacaatacaaatatatttaaaaatttaataaatcaaatatatattctatttttatatataattctatattacatataatttaaaataaaattaaatatttctttgtacgtacattttttttcttcctttgaatttattatttattatttgttattttatttatattattttattgttggagacataaaannnnaataatttattttattttgttggtagttatgtgataaaaaaaaatatatatttttaataaatattaaaaagtaaccaatccaaaataactgatccagtccacaattttacggattggattgaatttgagttattgtgtggattgaattgaatccaaaatatgaaatccgcacttagtgcggatcaaatgcactataagtaaaatagtgtgaattggattggatgaatacccctaccatcacattctcccccacatcctgttgttcatgtcccaacagtgacaaatttaccaacttcacctgttaccgttgacaattattccctcacaatccccacaaacaaaactaccttcatcctccactaccataaacagttctgaggaacacaatcccaatattgcaatacaacatgaagttgctgctattccaaatacaacatccactattctttctcttgacaaagaaccaggatccaccataataggtaataggaaatatggtatgtgcaccagatcacaatctggcatcttcaagccaaagtcatatatatggctgttagaatttattttaccaggatctatatttactaacatgtatgtttgattattaactataatctaacaccctaaatatgaatttcctaataccgtaaaataaaaacataagagattaagaaatccttacattgatggcagcaaaataataat

SEQ ID NO: 101600 - DNA, 1276 bp, Cannabis sativa
  modified_base (424)..(428): a, c, t, g, unknown or other
aatttttcaaattgttttcatgcataaatagtacctctatagcattatataaatgtattagagtaaatgtattcaaaaaaaaaacacaaaaatgaaaacaaaatattttgaataaaacctaccgggaactaaaaatttcacatatatattcatatacaatgtttatctaatttataacatgataaataaatagaatagaacattctaatcaattatacatacaataaaatcatagaactattgcaaaatatatataaatacatatacaaatatgtatatatatgtatgaaaataataatttttaatggaaatattataactcacgaataaagacaattctaataataaaatgtatcaaaataattagaaattaaaaaattcaatatcggatcaatcatgaacatagaatatatatatatatatnnnnntctattctatataaagtatacctatataacagaatttttggtttataaaaaatttatgggtgactttttatttatattaaaaataaaataatttattattaaaaataaaatgttttatgagaaattcatgagtgactttttatttatattataaaaataaaatgatttattattagaaataaaatggtttaggagaaattcatgtatcactttttatttatatataataaaataaatctcattaaataaaaaaaatacgattgacactttaggtgatgattttggcatatacatgtgtatgatcatggaacattagtgttttagctagtttaattgacattttacaaaaacaaaaggatctattgaagtcgaataatttttagtttatttttggattaatttgagaacaatttggcgttagataatcaagatttcttaaaattaatatattgcattcagtatacttttaatttgcaacaccattatttacattaattaatgtaaactgtattatttatttattgcatacattaaaaataatttcaaacaataattaataatattttttttcaattatttattgtattatttgtaaataaaataaaaaatacctaacataaaactaagtatatggcacgtaatttttttctagtatatatatatatatatttatacattggaaactcaaattactcaaaataaagataaagattgttctataccaattattagacttattatataaaaaaaaaataataaagcatatacgtacatcgatatgaattgggaataatatgcaacaaaagaaatcgtaatacttttagttattgattctttgagcttcaatt

SEQ ID NO: 101601 - DNA, 676 bp, Cannabis sativa
tttatcttctccttttactgctgaggaagtttattctgcattaaaatcgatgtctgaagatagcagtcccggggttgatcgaatgtctgttatgttttacaccaactattggcatattgtggggtctcttatcactagttcagtgttggatgttatgaataatggtggagatccttcttccttcaataggactcttatcacccttattccaaaagtgaaaaagccatcaagaatcactcagtataggccgatcagtttgtgcaatgttttgtacgaacttgtgtccaaaacaattgtgcttcggcttcaaccatacctggctgtggtcatctctgaattccaaagtgtttttctctctcaacggcttattacggataatatccttgtggcatttgaggttcttcattctctaaaaacaaggaaacgaggtagtcaaggctatgcaactatgaaacttgatatgagcaaggcatttgatagggttgaatggcattttttggagcaagttatgttaaaaatgggattcggttcttcaatggttaagttgattcttcgatgtctgagatcagtttcatactctttcttgttgaatggatctgtacaaggctcagttactcctcatcgtggtatcaggcaaggagatcctctgtcaccttatttgtttctaatctgctct

SEQ ID NO: 101602 - DNA, 522 bp, Cannabis sativa
  modified_base (196)..(199): a, c, t, g, unknown or other
actgcccttcaacaaaggcagacagggatagctttgcaaccaaaccaacatcaggatttggtttggactttattttccattctcgacgaggtttgcgtacatgtgacttatttggttcagggaaactatttggtcgattgatcattgctttcaagtaatttggcaatttgtagcacttgggacgaatgtgacctcnnnnattgcagaaatgacatgtaggaatgaaattgtcattctgtggcagattttctacatcagtcctccttccttcaaacttgagtttagtgggtccagtggacttgtctcttcgcagatgagtctgattcgttaatggtagttgggatgtcatgtaactcatcttccttctttgttgaatcgacatttgagggaagagaattctcaacagacaggtcattgccttatttatatagcatcttatagcctaaggaggttcgatcaccatatggcttctggagctgtagagtttgattgatagctgctgtgcctgggggaatgaattgt

SEQ ID NO: 101603 - DNA, 704 bp, Cannabis sativa
ttgaaaacaaaaaacaaaaaataataccaaacatgctcttaatctttcacctataaacttcatccaaaccaagcatgcaatactcaaaaataactttaattttagaattaaaaacaaaaaaaaaataaaaattgagggaagactaccttaagtatttcctcagcttggataacaattttccctaaagaattaactccaatcactactaaattcaagcttttcttcacaaatttgaacaaagcttcaaggtaatattgagagagagggggttggttttagagagaaagaaatagatcagaatatgttttgtttcaatcaacacttaaaaaagaaatatttaattcaattactttgtaaaataggtcaattgactactttgccctcaaggcatcaaattcacacaaatgacaactaagggcaattttatccttccaagttattacacataaatttagatattttcaaataaatcatgttataacacaatcacaaattttggaccccgaactcgattcgagctaaaaatacctggttgtgactaaatcatgccaacttgtcataggtaaagacaatataaatataatatataataatatagtatattagcacaataaatattaaaattataattttacccttcccgaatcaaaattataaaaatgcccttagctcataaataaggtcttaaatgcaataattctcaa

SEQ ID NO: 101604 - DNA, 505 bp, Cannabis sativa
taaattacataaaaatcttgtctcatttacttttaaaatccactttctttaacttaatcttttcttgattcaattttcagtaaacaatatatataattcttacaataactttagctaactatttgaatgtctaatgttttatagcaatatctcattattattaattatttaggtttctacttttttttttttttgataattaagtcttttatttaaacaaagcaaactagtagccgcaaaagggggccacttcccttagaaaaccagagttcttaactttagagatccttgcccaacgagctaaggcataagcacactcattctcctgcctaggaatataagtaactttaacatccaccaaggacttacacagataaaggtaaaagttaaaaagagggtaggtactccaaccataaggaagctctctagactcaaaagctagagcaacatatttggaatcagtctcaatccaaaccttagggatcttccttgaaattgccatctg

SEQ ID NO: 101605 - DNA, 532 bp, Cannabis sativa
actgcgatgaaaagagagatgatgttgatgtcgttgccgttggatatgggagtaaccataagaggaaagaaatccaaccaaaagtaagcatcttgaacgatcagcagaagcaaacgaggccggtaactgtggaggtcctttctagcgatctcgcgacggagtatggtggtcggaccaattgggggagaggtcggtgtagtggtcgacgctgggtcttgggtagaagccgtcggcgattggggctgcgtctgagggtgaggaaggcgtgattgtcgtcagaagggaagagtagaagcccaacccaagtaattttgcaaaacaaaatgtaattttgcttagtttttaatattaatgtatttttgaaaataaattagattataaatataaaagtgaaaactctcaaaaaagattacccttttgtccaaaaaaaaaggtgtatttatatattttgaatttatataaatctttttttgaatttatttgatttttggaaatttaaatacttgcccaatacgaaagtaaaatcatatat

SEQ ID NO: 101606 - DNA, 519 bp, Cannabis sativa
ccttcatagacatttgtgtcagatttagagtgatgagacttagcacttatttccacgctagaatttggattgaagacaattatatctgcatcagatccagcaagaattgctcccttccttggatatatattaaagattctagcactgaaaaaaaatggaatatggaggttattcatgtaatagacagtttctacaaggatttatgatgtgaacatgtactgttttatttggaaaaacaaaactgaatatttagagaatacattatcaaaggaagaagagtaataccattctgtgctcgttactcgaacataatcggtaacagaaatttgaccagattcctgatggatatgcaaacataagagaaaaacccatttctaaaacagtgattttagaaagtataaaatatttaaagaaataatctattggagctcaccaccattgtgtcccagacaatatgcatccgctcctcaatacctatgtcaaatcacacatcaacaagaaaattaaaatttttagcca

SEQ ID NO: 101607 - DNA, 907 bp, Cannabis sativa
gtcaatgagagactcctcgagtttaaacctcgcctgagctaaactcaggcgagatgatgcgaatatgaccaagtctaatcccattcgcgaggcttgcattatgtaggaccaaggagcagatttaactcgcatataccacgatatatgcgagtatcctctagatcctcctgcgaaaacatagagatcgattctctataaagagagctggtcccgatgacccaacaacctcgataaaccaatatagactcgcatgtcctggttctattagctcgttatacgatgtccgtaaatgcgactttgcaagaacgcagacatcttaggctcaactaagtattaggtgtattctaagtccacgagcttatgcaagaatatgaacaaccaactcgcacattagaagtcgcatacgttgttgtatttagtgaatagaaactgttctttatttattaatatttacgtttagcttaattattgtcaatcaatgtacaaacggattgacaatgaatgcaatccttgtgtaaatgatcggacacttgctttgtatataaagtagtgatccaccgtgaaatgggacacctacagaatccttgcaatagtggactaagcaaaccttgatctggctgaaccactataccccctcgtgttctttgtatttccagtttttgttaagtatttgtgttcccagttcgagtactcgccgttctaggttgaatactcgcacttgttcatcatattattattactattattgttgttattattcatttttggtgttgtgaaattacttcaacaacatttcgcgccgtttgtggaaacgagaagtactttcttgctaacttagagaatcataatggctggaaaccaagcaaacgggggtcttaacaacgaatccatcaatatcggaatgatg

SEQ ID NO: 101608 - DNA, 533 bp, Cannabis sativa
aagacaagataaccagaaatgaaaagagaaaacaatcatcctgcatttctctccctggaaatcttcttccagcagctagcagcattctttccctcttcattgcctctctttttgttctttctactcctccattttcactcagcagcagacagcctccttcatattcatctttactcatcactgagtcaatacctgagcgcttgaagctgcagtgagcagagcggctaccgtccttttctttttatatattatgagtttgataaaaagatatttttttatataaattgtaattattgcatgtaaagtaataaatgtgtggggaggttcgatagtcttggaggggcgtaaaatgttgcactcaagagtatcaaagaaattaaacaatatatgtctgactagctcataaaagataacatgagatggtggactatggttcttattttgggagagtagcactggtagtggcgcttcacttgagggcatgagttattcttgcgcgggggtaataaaccaagcggtctttcctctaggag

SEQ ID NO: 101609 - DNA, 603 bp, Cannabis sativa
catcagccttatcttttgcctccttcttagcagcttcaagctccgccttgtgggtcttcttcacctcccagcttatttgattaggcgagtgttctctgacttggcgttgttccattccttggtcacagcctcacgctggcctatcaagttttgaatctggctctctatgtacttctttttttccaggccccgtcgttgggcgacggaggagatgaaagtttgttgaacaccaacagacaaaaatgcatgagtattttgatggatgttaataaaggaagtaagaagataagggtagaggaatttaccgagaggccataagctacactcctttcaagcatctcctcaaggtccccattattgattaagtcccattcatgggggaggagggccttgaaatgacgccaacaagctgcaccaaattctgcagtgtactccaggccagtatttcaagcctcgagaggcagagtttcgagggcttggctcgaagaggcagaagcttgagtcattttgggaataggctcgtaggtatgggcgggggccggaggatgggtcggagcctgagtctcaatttcaaggatctcgagattaatagattgggaggct

SEQ ID NO: 101610 - DNA, 853 bp, Cannabis sativa
atttatgatggatttggtctacatgatccaacttggtgaaaatgaccaatgtgaaaggttctattgaaaatcatatatacttttttcatttttattttcttattttctgcaattacttacaaaagttagtaaagtaaataatgtcaacatatatgagtagaaattgaagaaatttggattctttgttcaaatgccaggcacatgttatttttctatctatatttgtagaaaatatcatttataataaagataaaagattttagatgtagaacttagtgtggttgggatggagcagataccctttgtttccttattgtaatttgtgtgttccattcatcctattattaggattttctatgaggcttatattaagtgcctccctttcatcacactatttatttcttttgttgtttgtgtgtgtttgtgtgatggtatactttcttctatattgatttcaaattcattatttcttcatatcaattaattactccaccagaatcagcattactgtatcaagtcattttctcacttgaaatgggaactactaatcctatatcaaaatctctaagcctaaatataaatcaatttctactttttatttttcttttgctcacttacagctcttactttatggtctttctacacacttaattaatattatgaaaaattttattatgtttttcaagtgttcatcctgcttgtcaagctatattagacaattatatttctctttggctttcgatttattttatacaaaccttgatttgtgcactcctatctttgtattttgaatatggtataaactaattgagctctgtattttttttaatttatattttaggtggacaagcta

SEQ ID NO: 101611 - DNA, 500 bp, Cannabis sativa
attcaatcccgccgctgagatgcttagttgactcttcaaccttaataggaagatagttttgcgaattctccccggaactggaagatcatttcgagattttcgaacatattcgagggttcaatgtgactattgtaacatttggtttttttagttggatctcgatcttttgtactgttgtttttgacgtgttggtaatgaagttttggttgggtgctggttttgcacccaccagttataaaaaaaaaatgtacttgtcataagtttatagacacaattatagtttaattatcaaatacattgacatatagtttaattttataatataaatcgttcaaataatcataccacttaatttatcaaaatctaaaaataaaaattcaaaccttaaaattaaaattaacgtttgcgtttcacctagtatatatataaacatatatatattttattaaaaaaatgtaatttacgtgagttgttgcctaaaattaaaaataaaaaattaa

SEQ ID NO: 101612 - DNA, 508 bp, Cannabis sativa
gctattgatttgatagtcggttttgctgaagagaaaaattaaattaagggataaacaaaacgactttgaaggatattgaaagggcaagaagcatttaattgggttgaaaaaaccctctgatctgagatttgggatattatcttcgtcagagtaataaatgacccaattaatgcaagaaacgaaaggttgacaaaagaggaagagggatctatgcccatcaccaccacataactcatatgggtggaccggagacccatttcaggtaccaatcggagacgggagaacatacctcctgaagagtttagagagagccatctttaatttggaattgtttaaagtttgggtatatataaaatataagcttaatattatatgtgttgattataaatttatctctctattaaccacacgtcgggacaagttacacctgtatagtgggcgtgaccaaatcattaccctaatattatatgatatatatatgtttacattgtgaaaactagttttggga

SEQ ID NO: 101613 - DNA, 627 bp, Cannabis sativa
tccattaaagccaacctttgagactggttcatcttcctaaaaatctgattctgacgatataaaaatgttaaaagctaagttggcattagttatttccagtcaggaatcgttggctgaagattttgtttcgttgaggtgttttgttgatcttaacttcaagtctttattgaatgttgttcaagatattctgaaaaaagttactgtcaattatgaccgaccttctattgaggtatatcttttcaaagttttggttgtttttttttcaattcattgttatagttggtttctttcatgttttatttcagttgcattactgtttttaaacaggtaaagacatctgatgatattgatgaacctgattctgatgatgctgatgatattgatgaacctgattctgatgatgctaatgatattgatgatggtgatgatgacaaaggcttaccagattcagagcatattaaaactgagtctgctaatggtgatgagtcgggtgaagatcgttgtgatggttctgctgatgataatcagtgtgatgataaggttggtgttgatgcttctgctgttggggaggttcaaggtgatgttgttgcaagtagtgaagatgataagtccaaggatgttgataat

SEQ ID NO: 101614 - DNA, 812 bp, Cannabis sativa
gacttgggacccgaacttgagacagtacccaaacccggacctggatccgaacctgggacccaaacccgaacttagggcccaaacctgagacccagacccagacccggacccggacccaaactcgagacctggacccgggacttaggacccaaacctaaacctagaccgtagacccaaaccttgacccggacccaaacccaaaacccgaacctagacccgagacccagatccggacccgagacccaaacttgaatccaaactcagagcaagacctggatatgagaccccagacctgaacccagaccccgactcgagacttgagacccaaacttgaacctagacccaaacttgagacccggacacgaacctagacccaaactcgggacccaagacccaaacctggtcctggatccaaacctaaacccagacccaggacccagactcagacccgaaccctagacccagacccaacccgaacccgtagttggtgttggggacctaaacccgacctgcagttggtgttggggactcgaacgagcctgaaacccgagacgcggaccgaaaccctaacttgaacctagacttggatccaaacaagacacggatctggaccggacctaaatccggacctgacccgacctgtagttggtgttggggacccagacctaacccgtagttggtgttggggatccgaaattgacctgtagttagtgtagggaacccaaaccagacccagacccaggacccagactcagacctatacctggaccctacccgtagttgggttggggtcgagtttattgaaaatatat

SEQ ID NO: 101615 - DNA, 703 bp, Cannabis sativa
  modified_base (443)..(458): a, c, t, g, unknown or other
gtctttcctaaatagagagaagagaaaagagaaaagggaacaaagagaagagagattgttggaacaaaactaaaggttagttttctattatagcagggtataattggacaaaaaatagtagtagcataatccccaatgtgtttaatagatggtatattagagcatcttcaatggtagcatcctttaagaatgctaaaaatttacacataatttaaaaatataatattttattttatctctcttctatattatttttggcactccaacttctaaaaacactccaatgtataacattctttaaaaatgctataattataatctcacacattataatttaatatatatcctaatttttacctacaatagctttttagcttcaattttttattaaaaaataatgaatagcatcaatgctacaacatagcatccatgcaaatttttannnnnnnnnnnnnnnntcttcaatggtatagcatctcaatattttgccacataatatgtccacctcaccaagcatcctctaaagttttaccattggagatgctcttaagagatcattatttttgggtaaaatttgtcaaaatagacttttgacaaattaaaattagcaaaataactttttttttcttttttttattacttttattttacacttaactcatttaaaaaattaatttaatattaaacaaaattaattaaaacc

SEQ ID NO: 101616 - DNA, 628 bp, Cannabis sativa
gtttattatttagttataagaattagaaagaaagaaagaaaaatctcaccagacaacagcagcgagtggagtcgagccattctccgacgactgaaagcgaagcgaacagcgacctgaaactgaaagaaatcaaattaaaagaaatccaaaagaaagaaagaaaaaggttagtaaaaatccaaagaactggctactaatcgggtggaaagctttagatgagtacagattgaaagcaaaatccccatagattcggaaaaaaaaaagatcaattatcaaattgatacgttcgtacacccatgtagattaacagtaaagaatctcaccagcactgagtggagtcgagcccgacgactgaaagcgaagtgaagagttattcagccacctgaaactgaaagcaatgggaagttctgaaatttctaagagagagctctctctcatatacacatatatgtacatacacggcaaattttatctttcattgatttcaaaaaaaaaaaaaatgggtaaatgatgttttccaaaattttatgtataaaataatgcacacctctttctgatttgagcaagaaaaagagacaaagaatgaaattgagaagaaaagctgcgtttggaacgtcgtattaggtcg

SEQ ID NO: 101617 - DNA, 1015 bp, Cannabis sativa
  modified_base (779)..(779): a, c, t, g, unknown or other
attttattcatatgtttagaaacatagatggcactctcaggtgccttgctctacatggtggaagaattgagtataatgaaacaagagtattgagacatgtatgcaatcactttttgaagcttagagttttgattattggtcatcagcctatggattacatttctactttgaagttgcctaaagaaattgggaatctgatccatctaaggttattaagtattcgcaaatggtggattgaaaagattccatcttcttttggcaatttaagatgcctgcagactttgagagtaaggaccaagaagagtgatataataataccaagttcaatgtgcaagctggagcaactgaggcatctatattttttcacttttgtgattggcataaattctagtaatttcttgaggtcaactaagtctagaaatttacaaacattggtaggtattagtaccaaggatcttctacctagtgatcttctacagttggagagtctcaagaaattaagaattcacgtggatggaaattttgagacattcttacacaatccccaaactctcacattcactcgtctattatcgttacaagtgacgaattctcgtcttgtgggcaaaaggatagatattgttcctttgatattaagttgtcctcacatttataagctcacagtagagttgcctataataagattaccacaagtcaaccaattctccccaaatctcatcaagctaacgttgattaatctccaacttaaggatgatccaatgccaacattagaaaagctnccaaaattaagagtccttagaattgactatgatagctttatgggggatgagatggtgtgctcaagaggaggtttccctcgacttgaatctcttgagctttgtgggttacttgacttgaaagagtggaaagtggaggagagtgcattgcctacacttgcctatttaagtattaacaattgcaggggattgaggagagttccagatggagtaagaaacattgttacactcaatgagat

SEQ ID NO: 101618 - DNA, 899 bp, Cannabis sativa
cttccaaaggtcaccgaggacttcaaagccccccagtattgcggacaactttccatcttcagttacccgtgaaactttggttgcctctgtcatgaatctgctgatgtatgctcggagaggcttgcctggtctttgcttgacttcgaccaggtctcttagatgcaactgaagttggcgagaggaggagaatggtgcatggaattccgaggacaaagcttaccatgagttaaactttctaggggcaagcttgaaataccattgctggggggcttccgagagggtggcaggaaaaattttgcaacatgtgtcacctcgtactccctgcagatccatttgcatctcgaaatacttgaggtgggaaagaggatcttctcttccagtgtacagtttccaagttggcattttaaacttgtggggtaatgccaagagattgatctcgggagagaagggagtcccacgtgctcggtccagcttgagatcattatttctctgtccggccattccttggaacatactctttacttcatcgagctgtgcacttgctcggcattttggtcgatttgaatcacgtcagtaactttctgagcgggaatttaagcacgggcttcgagctgtacgatcgtcgtgacaatctgatcgtctactcctcttcttttgttcagatcgctccttaggtcatgagtcgtccccaacctatggaatacagaattgcctggctatctcagtgattgatttgcttggttgactggtagaatggcaccgttagcctggttgaaactatctggtatgacttctcctgatgaattactagacaaggtctgcactcctacagctaggcccacaagcgaaacttgtgaccggggatttggcggctcaccatttatagtctgggaagtatt

SEQ ID NO: 101619 - DNA, 710 bp, Cannabis sativa
aggctctcatgaattggttgagtttggagttattcgaacacaataggttgttaaaaatatactaagccaaaagagatgaaggcaaaagacataacattaacatgggttgaacaattgtaaggtttttgggataccattgttgattcgtcctattaagttgtaaaaagtttgtttacaatatatacttatatacttccactgctcattcaaaaaaaaattataaatgtactctaattaaataatttttatttttaataaaaatatatatctttaattatactagttttttttaattcttttcttctaatttatattcttaaagatatgcttatcaaataaaaataaattatatttgaaatattataataaaaaaattatgtaaaactttattaaaaataaaaaaaaaattgtacatgatttaaaaaaattataaaaataaatattaaaattaacaaaaaataatataaaaaaatttaaaaaaaatagtaagagtattttttaaaaaattatcttaagtttaacttttttaaatattaaagtgtatttattattttgtgaaatgtaaatataattttctcatttataattgtaagatattctatttaccataattatatataaaggaaaatatgttttgaagaaggactattgttgttcttataatagtgtcatatttggctcctataaagaagcaacaatgtaaaagcagt

SEQ ID NO: 101620 - DNA, 541 bp, Cannabis sativa
atcgcaacgcgcaacgcgaccgcgacatgtcacatgtcgcaatcgcaaaggtagtactaggcataggcaccacaccactgatgcctaatagcaatgctcatatcaaattatgtttttaacttttttaagacttttcaaattgttaaaaaagattgaatacttttatataatttaattcaattttactaaaccagacaactatctttgtataaagttgtctttcaaaaccttttaatattgctctctcaactttcatctaccttgggcttctatcgattagatgaaaattcttgaatgtaataatctcaataattttttttttggagtttttaaacgtctaaaaatctcaaatgacataatttaatagcatatcaaaattcaagaaacaaatatattaattaatattattttgttgtttttcttaatctcaggaaggaatagtactaactaccaataaagagaccttagcataatattatggcatgtagtgtgtgctgtgtttatagcttagctccaccaaaacatgaccattaaccaatac

SEQ ID NO: 101621 - DNA, 1016 bp, Cannabis sativa
agtaaatcggataatgtttattacatgaaaattgaaaataacgttgataaagcaaaatcatcaaaaataagtcaatcaagccgtttacaataataatataaaaaaaattctagcatcaactccaactaaaaattaaataagccaccagctaagaagcatcgtgtaaagcgatttacaataaatgatagcacttttaatagtatccatttgataaatcaaaatcagtcgcttaattcccaaatcgtttgataaaaaaaataaaataaaatcaatgaaaagattacaacatcacaaaactttaagaacatctatattttgtttctccatcgctcaaaagacacattagtagaaactgttgcaacaagttcaacctcataatttgagcactcaaccaatgtataagatacatagctggagagccatcgaagaacaaaggagaaacaacaactaaacaaaacaaaataacaatttaatggagagccattgaagaacaaaggataaacaacaacgaaacaaaacaaaataaaaccatgtcacatagacaatattaaaacccttaatggcaagtcacacaaataagactaaaatactcaaaagcatgtcacacaaacaagactaaaacagttaaaaacatattacagagacaagactaatcgcagtagcaaaaatcgaatgacagtagcaaaatacaactttaaccaagctacacctatgcccaaagaaggctagcgggcctgttcgaagaaaaaaggcgacttgcaatatctataaatttaggaacgagaaaccctaattttttttgttttaaaataaaatatcatgtattcatttatgagagaaacaaattaattattgtttataaagctaattaattaaatccacactataaattgaaaatatataatatgttgtaaatagaaatttaacatatattttttttttcgacgtggtgaacagagtcatacatgattaacaaagtcgcaaaccacaatcggcctcctcgaaccaggatagct

SEQ ID NO: 101622 - DNA, 656 bp, Cannabis sativa
aattcacacttcttgaatttagcatacaacttatgctcctggagacgttgcaataccatgggaagatgttttccatgtgcctcttctgaatcggaaaagatcagaatgtcatcaatgaagacaattacaaaatcatctaaaaagtccttgaacactcggttcattaagtccatgaatgctgccgaagcatttgttaatccgaagggcatcaccaagaattcatagtgtccataccgggtacgaaaagctatcttggaaatatcctcctctcgaatcctcaactggtgataaccggatcgaagatcgatcttagagaatatgctctttccctgcaattgatcaaacatatcatctatccttggcaaatgatacttattcgttaccgtcaatttatttaactccaagtattcaatacacatctgtaaggtttcgtcctttttctttacaaacaaaactagtgcaccccaaggtgaagtactcggtctaataaattttaagtccaacattccgtataattgaaccttcaactctttcagctctgcaggtgccatccgatatggatctttagatacaggctctaccctcggtatcagatcaatttcgaaatcaatctcccgctttggtgctaaccccagtagttcctctagaaagacatc

SEQ ID NO: 101623 - DNA, 813 bp, Cannabis sativa
gcaatcaatgtaaggttttcataaacactatgtgtttatttcattgttagtaaatctagatcctggtaaaatattcccaacatatccattgccccgtctcttcacatactgcttgaagtggccccaaccgatgagactttctatctcgtctttcaactgacgacattcgtctgttatgtgcccaatttccttatggtatttgcaatacctagtaggatctattttgtgcctcgcatgcctcatgggctcgggcttgctgaaggcaaacttgtgctcatgcacgaggtaaatattttcccgagtttaattaagctcggtataaacagtataaactgacacgtacgtattgtgcttcttttgtttctttttatcctttgacaattccttagaatcgtcctttctctttgagctagaggcccctgagttatcaactctagttgagacagtacttgttgaaacattgctgggtttgcctcccgagcctgttttcaacaaattcatctcttttcgagcttcctctttttggatgaacacccgagccctttcattgaactcagtgatgttcttcacttgacgaccctttaagtcatcccacagttcgcccccagttgttgatggatcagtagtgatccccacctgtagggcagtaagttgtgtactatcatctatatttctaactcttgtagcagccatgctaaaatgacttaagtacaccttaagcatctcgcctggctgttactttatattggttagtgagaacgcctcgggtcatctatccgttgctgactggaattgttttttgaagtccttgga

SEQ ID NO: 101624 - DNA, 602 bp, Cannabis sativa
aaaaacccattctgttcgggcgggacatgtctaacccggtacactttcgggcgggttcacgggttggtttttttatagtcaccgggttttgggttgaacccgaaaccgcccgccaacccggtcactttttattttgtatttttattacatatataatatattaaaaaaaatccctaaaatctaattatttcatttttattacatagataatatattaaaaataacaatatataatatattatatatagtttggaacttgacttttgtattttaaatttgaaattaatgtattttttattttattttaatctaaataatatagattatggtgttataagtttataagttatatgcttaatttaatatatagaaaaaactacataaaatttatttttttttttaaaaaaaaaaaaaattaacgagttgacagagtcaacccgttgactcggccaacccgaacccgcagacccgcgagcccaaaacctgcgaacctgaaccatttcatgggttgggtccgggtgcaattttttgaacccgaaacccgcgaacctgaaaccgatcaacccaccaaatgttcagctctaattgaaaccttcgtctat

SEQ ID NO: 101625 - DNA, 1040 bp, Cannabis sativa
  modified_base (732)..(735): a, c, t, g, unknown or other
ttttgagataaggaaaataaataacatgtataattttaattaattagagagtagccacaacatctctgattaaataaaattatatattattcatttaatgtaactttaatctttaagtgtgataaattcaactcaaactagcatctgaaaaatgatttggaatgagaatgaattaagaacattcctttacttctagaagcctaatgtatacttaaaagtctgaataagactttgcattgcatttgtttcaagatcgttaagtagtatcagaataaataaagttaagaccactttattttccatacaaagtgatgtggtgtctttaagatactaaaaattatattcatacatattttgttaaatgaattgaccatctgaaaatatagttaactaattagattctaacgtacttcactagttataatgattcacgtagatcaatatttgattacgtccttaagattgccagtaagttgtattgtagagaatcttgattgttatttctactttaaaagtcaaatttatttattgtttttgaggatacatctcgtatggtgtattatagagtttcatagtaggcctagagttcagaattaagtttcattaggccattaaaaaaattttgcgacaaatttagctacaatatttatggctaataactataagagtattgttcgaagctagcatattgacattatgtatttagccatgaaaaggcgtgataagtggtcnnnnatcacacaaactgaattgggtgatcgcatatccttgactaaaggcatgccgcaacacaaattcaaggatcataaagtaaatatgggattcagttaacccagatgcagtttttgtttgtacaaataaatttattattaatgaaactcttatttttattattttctcatatttatgtgcatcttaattttacatttgagaaaattttagaggaccagaataaatataaagtttagagtctattcgcttaagtacattgccacataaagtacattattatatattaaattgttggaatatttatttta

SEQ ID NO: 101626 - DNA, 616 bp, Cannabis sativa
agtccaaagaggggactgggcagccaaaattgattgtttgatactgacattgttttgttttgttttgttttcatgccttgatgaagttgagtttggctcgtgacggctatagagggtctttagatgctttccaggagtgtgtgaaggtcttggaggcatctcttaccgcaaaagacaaggccaatgccgagctagaggtccttctagtagagaagcagaggatggtcattggattggagattatgtttagtgataggaacactaagaacaccaaccaagctgctctcatctttaggttgcagactgatcttgaggaacacaagaagaagttacaggaggctcttgatggccagtaggccattaaggaatactacctagatttgtcctctgaacatacttatgagtttcgcatgcacactcctaaagtcaagttgccatacattgacaatccagtctttgtggagagagcactagctcgcgatttactagggtacgactacttaccacatacactttgtaccgctactgtacaagtgttggtagggtttattttgtaccccgagttccagtaagtgttgtaccacacacactttgtacatgtctgtactaatgctgg

SEQ ID NO: 101627 - DNA, 658 bp, Cannabis sativa
tctggcttttggaaacaactttggcaattgaaattgcctccgaaagttcttaatttcttatggcgagtctcaactaattgtttacccactcagtttcagcttagaactagacatgtacatatcaacaccagctgccccttttgcaatgctgctccggaaacatcgctgcacgtcctggtacgttgccgatttgctcaggagtgctgggagttgtctcgggttcctgctgttgctgctgcagcgatgacttttgctgcatggttcgaagagggcttggacaaatggacgatggctgagaggttagaagcttcgatgttatgttggtctgtttggaagcataggaacgacctggtttggaattccacaatgccgactgttagtgatgttgtcacattatctaaactcaactttattgattggtataatgcccaaaaaaataaccaacctactcatgaagataatggttcgcttgatggtaatttggagcattggacccctccccaatttcctacaataaaagttaatgttgatggtgcaatattcacatatgaaaggcgctttggaattggtttagtggcgagaacatctactggtttagtcatacaagccaaaagaatgagcaaagtgggtatcatgaagccacatgtagttgaggcta

SEQ ID NO: 101628 - DNA, 609 bp, Cannabis sativa
aagttagacagttaagttggttaggatttagttagttaaattctattgtgttagttggtccaaatacacttttactggtctaaatataaagaccatttattattcattagctgagttgagttgagactgtttgttattgtaaagggtctaagttttgtataactcatgtccctcgagtgagccatttcagtaggagcaagactttagttctatttatgaattctatccctgtaaatcaccaactctaagcttcatctttaatcattaaaggcaaagcctcaaggtagttcctcccaaggagtagatccaagctttttgcttgtgatcgaaccttgtaattcatgtgtttgcatactttattttaccattcttgtccgtgcattgtcagtttgatttctctttattattctttgatttctaattgtttgttatgttcttggatggtgaatgattcaccacaaaaatgtattagaagaattaattatttattttaatgttgaaagtttttgtgattttctttgttcataattttttattttgaattaggctcataatgagacaacattaagaagccttgtgtccactacccataaacacatctagtgcttt

SEQ ID NO: 101629 - DNA, 531 bp, Cannabis sativa
atgtttcatataattcctgaaaaagaaatataaacaaaaatatattattagtattagtattattagtaagcactgcaccattttttttttaacatatataataattgattatataaaattttattattcaaaattatataatatatttgtcagaagtactgtaatatacaaggtcatatatgagatataatttctttagtaatactttccccaactacataataaaacatatttttatataaatatatatttataaaacatacttataaacttgttgaagaacttcttcgatctccacagtgaaagactcagccaaccctaacctttcgatgaggttgataatgcaaagctttataagatctttatcgttgggatatgtggtgggaactacatatatcattaataaacatttaatttattgaaaataattgtttatgaaaaaaaaaaagaaattatttttttattatttacttgtcgtaacattattattgtttgtgaatgtttcagctagggtttgcaaataatgcaagc

SEQ ID NO: 101630 - DNA, 626 bp, Cannabis sativa
tatatataagaatggaatatacatttgttctattaagttttgtaatatatttgtaatatatgtattagattttgaaattactattttctttagagaaatttgtggcaaaagtcccttaaaaattcacattgatgcagattagtccccaacttctaaaaatagcagtaatagtacctaagttggactttcgtgtttgtccgttcataccctatcatttagagtgactaacggtacacatgtacgcctcttatttaatctcctttttattttattttatctctttcttttcataaatgaaaataaaatataaaacaaattactaattgagaaaaataaaatattaaccaaattacaaataaaaaaataaaacctaaaactagaaaattaaaatggtaaaaaaggtaaaaaaaatttgaaatcagaaaaccccaacaccccgaatccctaatccctaatctctagcctaatcgaaacccaaatccttcgacaattgattcagaaaaaaatcacaaagatccaaccccattcaacgattcaaaacgcacatcactttgttgaatcgtgacctaaatccttggagcttgaagtcgactgcttgggaggtactcagaaatcgaaaggacgat

SEQ ID NO: 101631 - DNA, 701 bp, Cannabis sativa
  modified_base (355)..(365): a, c, t, g, unknown or other
acaaacttatccaagaaaagtctaaagactctattcataagatccataaatgcagcaggtgcattcgttaacccaaatggcattaacaaaaattcaaagtgtctataacgtatccagaaagcagtctagggatatctccttccctaatcgtcaattgatggtagcctgacctcaaatcaatctttgaaaagaactttgaacaaccaagttgatcaaataattcatcaatcctcgataaaggatatttgtttttaattgtcatctgattcagctttctatagttgacacaaagtcgcaaagtcccataagttttcttgtcaaacaagactggagctccccatggagatgtactatnnnnnnnnnnncccttatccattaactcccctaattgttttctcaattaagttaagtctgtaggtgccacgcggtaaggcgcaatagaaactagttgagctccgggaatcaaatcaatgcaaaacttgatctccctatcaggtggtaaccctggtaaatcctcttgaaacacatctggaaaaccaataaccagtgatatccaagggaactagtctaagttcctagactcatcatcgatcgcaaacagattcccatcacactgtaagtttctctttccacctaagcatgccgttaagataggattttgtctcactgcgctcatgttggctcgataaacaatgaaatca

SEQ ID NO: 101632 - DNA, 1056 bp, Cannabis sativa
  modified_base (820)..(825): a, c, t, g, unknown or other
aaaaaatttagtcgctgaaaacttattttcttgtagtatgactattttattttgaaatggaaggaaacaccattctaaagaaaaaatttcataatttttttatcattctttttatacattttacatttagatcctgttatcccaactcaatctcactacaccaaaaataggttctaataacacttaaaaatgtcacaattttataattttagtattatttatacattttgtaacatttgtaagaaatgtgggatatgcccatgtgaggtaaagtaaaatgttactaaatagttcacttttaatgacacttgaaaatgtgactaataaatattttttattaattttaaaatatttaaaataattttagtgacattttaaaattgttattaaactatattactcacaattataaaaatgtcactaaaatatttttatatatcattttaattgtttttagttgcctctcaattataaaaatgtcatataattattattttagatatataatgaaaaataaattactggtttcttttacgtcatttttttaaagagtaatttgcggcataaccttcttaactggtcaagtttttccccaattctaaaaaattttggtggtaaaacctcctaaacccaaagttctattagcacttagccccttccatctattttttgctgttaactgccatggtggaatatccatgtgtacacagtgtacatgtggcacaattttattggtccacgtaattattatttaaaattaaaataaaaaatttaaaattaaaaattaaaaaattcatttttatattttttttcttttttnnnnnnttttctttttcttttctttcttcttcttcttctaaccctagccgaaccccccccccccccaaattcagccatcatcgtccccatcatcttcttctaaccctagccgaaccccccaccccccaaaaaaatcagccgcatcatcatcctagccgactccactccatgcacaaccaccaccagcaactccaccatcaccatttccatccatccaccctcctatccaccacgaac

SEQ ID NO: 101633 - DNA, 1813 bp, Cannabis sativa
gttcctgaagatgaacaaccaaatgaccaggcacctcgtcaagaagtgcctcggagaccccggggattcacaacgtaggggaataaaaataatgatttaccatagtcttctcatagaaatgagaacaaaagataacctaggactagggaacaagaaatccctcatggtaacaagagaaatcttgggactcaccctggacaagtgggttgccaccgagacaccgtcaatgtccttctcgcattgatagggaggaggcatatacaaaccccaacaggggacatgtatcaaacatctcccaaaggagaaggcctgtacatgatgaggaaagttctagctcgggacgtactagatctcgagatcacaatcaatctacgcgaggaggggatagacctcgacatagtaatgatcgagaaagtataaggcatacaaggagtagccaatctgagagttactcaggcacaagatcaataagcaactatgatcgaagacggccagatctttgtgagaaattgaatcggaggaagcccgatttacgcaaacaacttaattccaatctaaagcaagaggatctaatccaattgcgaattagtgagttagaaaaaaaaaattcaagaaatatcaagatgggaaactgcctgattatgactccaatgaggaactcaaacctttccatccaattattaaggatttaaaaatcctcacgtctcgtcatgcaatgggactacggatccggtcgctcaccttaataactttaatacaataatgcgagccagcaatgtcacaaataacttacgttgtattttatttcccacctcactgattggggcagtgagcacctggttcaatcaatacacccatcattcaattacctctttgggaacagctgtctaaagatttcaagaaataatttcaagaagcaagagataggcggcctgaatcgtcttcccttactaacataaagcagcagccaggcaagtcactcaaggcatacttgagtcgattaagtgcagctgctgccagagttagaaacttgaatgacagtatacaacttactgctcttcaagtagggattacgactgatctcttgacagttggaggcgagctatgggatgacttacagggtcgccctgtcaaaaacattagtgagttcaatgaaagagctcaagtgttcgtacgaaaagtggaagcaaggaacgagatgaaattgataaagactggcttaggaagtaaacccagtaatgtctcagcaagcaccgtctcgacgaaggctgacaatccagggggctctagcacaaagagaaaggatgattctaaggaatcagcctaagataagaaaaaacaaaagaagcatgataagtacgtgccaatttacaccgtttataccgagcttaataaaactcgggaaactatctttcttgcatatgagcacaaggttgcatttcacaagccagcgaggcacaaacgggatgcaacaaaattttgtagatttcacaagaactttgagcatacaacggatgaatgtcgtcagttgaaggacgagatagagagccttatctcgcgtggttactttcaacaatatgtaaatcgataaggtaatggacaaaaccagccaaatctacccaataacatgggcaaccaaagataacaacctcctccaattgagggagatgacattttagttatctcgggaaggccacacctcgctggagaaagtagcaatgcacaaaagagatgtaaagaccgtttagcttaatttagaaattatcatataattagggcttaattatgaaaattatttattaattttgaatta

SEQ ID NO: 101634 - DNA, 1001 bp, Cannabis sativa
  modified_base (39)..(63): a, c, t, g, unknown or other
atataaaaatatgatatataattcaattcaatataatannnnnnnnnnnnnnnnnnnnnnnnncggcgttccaaacgagccctaagatatcctaattagaccccttaagttaatataattatatgctagacttaagtagagagtaaaagtatattagccaacccacttataaaaatgtaaaaattacctaaaatatggaaaatttttttatggcataaataaataaagctaggtggttatgagttttttttatttttttacatttatataggtttttttgagaaaaattccagttcagtacatataatcttactttattacattaatctcttaataattaatttctttcatttttaacttatatttttatattattattatttatataccgatttctataatgttattttatttataacttaatgtgttataaatcataataaatgcaaattcttcaaataaattaattaaaataataataatgttataatatttataatttaatatatcactatttaattcttcttttacaagagtcatttttgtgtaaaaggattgtttgtacagtattatttcatagaataaaagaaaaaaaactttaatatgaggatatttattcttctggaaagagtcatctttaggtcaacatatatcttaaaaaatacattatgtgattgtatatatatatactaaaaggtaatattaacatattttataaaaatatggttcattattatttattttcatttttaacgtatttttttatattattttactaaagtatttttaattttatattcccattagatttaataaaataaaacatataattataggacacaataaatgtaaattttttaataaaaataaataataataaactatactttttataatatatgttaatattactttctttggttagattaaaaactatataccttttagtatatatacaatcacataatgtatttatatatacacatgcaatttaaaatata

SEQ ID NO: 101635 - DNA, 730 bp, Cannabis sativa
tgggtttggttctaggtcccgaccctttttctgtgtccctagtgtggttccatgtttggctcttacttcaagtttgggttcgggtctcgagtccaggattgggtcgggattccagtacagcttccaattcgggtctaggtatgatttggagtccggtcctagttcggttacggttttggatctaggtccaatttcaattatgattccaagtccaagtcctagttccagtcccggtaaccttcaggtttttgttccaatttttggtcacagggtacgggttcgggtccactttagattttgggaatgggttcaggtccgggtgtgggttcgtgtccttgtcagggttcgggtccatgcttgggttcaaaatcaaaacaccgactacgggctttatcaaggccatgggtccagatccggatcccaatatcgggtcccagtctagttccatttctagtgccgggttaggagctgggtcctagtttcaagttcgggtctgggtcgggtactaggtcccggtcctagttctatttctgaggtccctatcctgattctaggtccaggtcccggttattgggcgggtatgagtctcagtctaggttctggttcgagtcctagtctcggatcgtgtttgggtctctatttgggtttttatcaggattcgggtttgggttaaggtcctagtctttgtcctagtcctagttcggttctagttccatttgcgattctgagt

SEQ ID NO: 101636 - DNA, 519 bp, Cannabis sativa
tctatgcaaaattcaaaaagtgtgagtttttgctgtcacaagtgtcttttctgggacacattgtcgcaaaagaagggattatggtagacccagggaagaatgaagtagtgaagaactggcctagaccgaaaacggttactgaggtacgaagtttcctcagtttagcgggctactatccacgattcgtagaaggattctccaagattgcaatgtcgttgtctgagttaaccagaaagaatcagcagtttgtgtggtcagataaatgtgaggaaagcttccaagagttgaaacaacggttgattacagctccagttttaactctaccatctaatcaagagaagtttgtggtgtattgtgatgcatccagacagggtttgggctatgtgttcatgcaagtagacaaggtcatagcctatgcctcatgtcaactgaaagattacgagcggcattatcaaacacatgacttggaacatgcagcagtggtgtttcccttgaagatttggcgacactacttatatg

SEQ ID NO: 101637 - DNA, 859 bp, Cannabis sativa
actatctcccagatctttgatcaaccgacttcaacataatatataaacagaaaatcaaaggcaaaagaagacatagacacaaaacaaaagagagaagagttaaagtataaaccctagtttgagagtacttctgctctaagatccagagaagagaaagcaagttctcgtggtgaggaggtagaaggaaggaagtacatgcataaaaatagaaaactgagttagatcgagaacaaaacagagaagaacaaaatcagaaattgtacaaagaaagaatcgagtcttacgtgatcgttttctgtgacaagaagctccaaaatattgtaaatcgccattgttgatagtggatatcaagctagatctctgagatgagcttgacagaaacgtagccctaatttttggggtgaactctgaaataattcttgtgttttctctccctttctattgttttacatttgattaatctaatctgtgtgtgcgtgggtgaagatcccagggtttctacttaggatatcgagcaagttcttgtgaagaacttgctctgccagggtttctacttttcttgtttgagtgttgagcgtgtgttgtgtttgattggtttttgggtttctagactcttcttgaaaagtctttgagtcgagggctaaacgacacgggttttggtgtcgtgtgggttaaagtggtgtcgttttagtctaaattcatttagactaaggaaaggtcgaaattgacctttaaaactgataataattgttttgttggtgtaggttaataatttggtcaaaaatcctacaatatgactagtgtaataattaggaaaattctaaatacatcccttgaaaggtgactgatgtacctttat

SEQ ID NO: 101638 - DNA, 501 bp, Cannabis sativa
accacacgctcaaaataaattgcattctcggcatttaatagatcgactcggttgtaactctcggcttcagccttggctcatcatgggcgattttaatgattacttgtctttttctgacaaaattgggggtgacatgtcacgtgctccatccacgcaatttcaatcatgcacttcaccctctttcccctttaggtaatcttttcacatggactaatcgccaaaaacaaccaaatcacactcaggaaaggcttgactggtgcctctctaatgatgcttgggatgccatctttcctgcttctcgtctaaatcatggcgacttttttggttctgaccatcgccctcttattctcaccttgcatcatatgaacgatcatcgtaatcatgccccccgtttcatctttgataagctttggatgtctgaacttgggttcgaggattgcttgcgcgatgcttgggcgcagaccaattcaaatgctcattccaatcctttaattggtctta

SEQ ID NO: 101639 - DNA, 735 bp, Cannabis sativa
aaactgtgagaaaattatataatttgtttaaacaatcatataattaataatgacaaaaataacacaccattaataatcggagaaaaacaaggatgaagagagcattaaatttagaaacgattaaagcagtaaaataataaaatcaacaccaagatatatacaagatcaactctgataaattaatgtaatttatggctctactcctgttttggaacaccaccaaaattctctttattgattgagcaagaacaggtacaatacagtagagataattctttgattagttctctctaagtgtttcaactctcacactcttactcaagaatcttcttcatctacagaagattcttcatgcaaaatccaaacccaatctctctcttttctctatatatgtcgctctatctcgaaactcaatcgatctgatcgttgtgtctaaaatgataagtattggtggtatttatatacttagaatcaagatcctatagtcaatagctacaagaagcgagcgtgttaatttagttaggcaataaccaactctcttttgagcgagatctccacgctatacgtatgagtgtttttgggagcatatatgagggctttcaaaatcatggaccaagacactcactgaaggaactttctgaataagaaagagctagttagagttgactatccgaaaatcctttctaggaaccacgattggccattcagaattcctttctggaggaaggctagctt

SEQ ID NO: 101640 - DNA, 535 bp, Cannabis sativa
  modified_base (45)..(47): a, c, t, g, unknown or other
aaaatttaaaaaaaaatatgaaaagtaatttttaaaaattatttnnntttatatttttttttaataatggagtgtatttataattttgtgggatgtaaaagtccccattttcaaaatatggacatttatttaattgctaaaccattttggggccatttccctttattgcccttaaaaaaaatacatgttgtattattgagtaccactaatactattaccactaatactatagtagttatcgttaattactatttatacattttcatcttttaaatgagagtatataatatgagaaacagcctatttatcaataagaaaaaggggctaaaatattatttggtaagagaacataaagtcacaagtaaagtaataaaaataaaagtcctgtctattgacatggtgtgagagttttgttctgtttcttgttttttgttgttgaaagagtgagttaaagagtgtgtttttctgattatttcatggcgagttcaagtggggtaggtggcagggaggatgtctttagttttcagattgaaga

SEQ ID NO: 101641 - DNA, 586 bp, Cannabis sativa
  modified_base (50)..(52): a, c, t, g, unknown or other
aaattaagcaattcacttttttgcggaacttaatttcgattttatttgannnagttatgattttttgaaagttttgaaaaaagatagggtgatcactcgcgcgcagaaccgaggtttgctcggtcagctgcgtcttcggacaggttttgtctgaaggaacacgggtagggatgtttgaaatcccttcctgcacgcgcggagatcctgccagcaacctctggcgccgaggtttctcggctgtgcactcagtgagcgcgcgcggatgagaatgcaacgcataccatccgaacagctcacaaatttttcgatttttttttcaatttttcatgctatttcatggaatcaatttctgattttttgtatagttttgtattttgatttttacttttcatatttcaaatctaattatcaaaattaaattaattggatttttttaaaattaatttaagatattagtgttatttgaatttgaaacaggttaaaaaactatttttttttacttaattaattatcttattttttaaattttgattattttatttcattttaaaatttaaggtcagatattaatatttttttaaattat

SEQ ID NO: 101642 - DNA, 1682 bp, Cannabis sativa
  modified_base (131)..(132): a, c, t, g, unknown or other
tatatattgttattattatatattagagttcaaataatttaattaattttggtgttagtttatgtctaatattttaagtaaattaattgaaaaaatatgttgctaaagtgacatcttttgtgtagattaanntatttaaatattaggatggttgtgtgtttgtaattgatgcatatattgactgacttaaaggtaagtaaatatttcgctaaatttcaaacatatcagtggcaataaatgtgtgacaattataaggtattttgtgtcagaagtacgttagtccaaagattgacctattgtttggcacaattttattgtcattatttaattactacaccatgagtaccgcttgcagttaatattactgtccaaagacttgatattaatgtgtacttggtatcttgaaatgggattgactaatttttgaatttattattttattatgcatattaacgtgagcatgttttatttgttctgtatttagctagttcatcttctactgcctcaatatctgctaatattaattctattcctatgcttaatggaaccaatttcaaggattgaaaaaggaacttacttattttttttttgatgaatcagctttagtttcattactccaataatccattttacaatcaaagagcatcccaataaagggacctcacatattaatcacctgctttgtacattttgcatctattgtcaaaaattattgttacaactataagtttctgaaccaagccaagtcctttgccccaacctgtctcggccaaacgctgtagattctatgtctcaccatttatttgactttacaacttactctatctatatcctcatcttttccattccatattttgtcattcctagcattccatatatggtagactaagctggccattgcagccgagagagtgtgtttttcgaatttgctgcatttgcttctttcaatccacctcataagtcttgataaggtttgagtagaagctttccaccccaaccaatctttagtcttctggaggcaatgctgagagaaaggacatgagaagaatagatgatcacaagtttcttcctgagcattacataacacacatcctggatcattgatgatcccaaatctatgcaatcgttctcttgtccttaatttgccctgtacaacaatccacatattaaagttgcatttcgaaatgttaaacttcccccaaacttccttactccaatgcatttttggttgtggaaggactaaaagtttatatccaagagaaagatgatacttggattgtgtgaactattgaacattcaccaatgttttaatctgattcttggcctctaccacttttttccaataccaactcccttgaatgggggcattgtagccctaccaatcgtctccccgaatgtatacactatgtatccatcaaacccacatgttatcctccttgttagcaatcgcccacacatatttaaacattgctactctgttccattttgctacctttttgaacccgattcctccttcggacttagcttggcaaacaaactcccaagctattaaatccgaaccaatcattgaatgttcccccttccatagaaacgctctacaaatagcttctatgtcattcactatcttcttaggtaaaatcattatctggctccaatacgagtgaatggtcatgagaattgaa

SEQ ID NO: 101643 - DNA, 746 bp, Cannabis sativa
tgtttgatttgttttagtgttgttttacagttattttgccatgattatttatttgacgtcgattttattattttttcctcaatctcaccggaattaataattgttttccgattgtgatctggtgtttttgtggtgattctgtccgtgggtgtggaagatggaggtcttttttttttttgtatacagtatataaaaaaaaaatggacaagataatataaaagttatttcttccgtgtggcagtatttttataaatattaaaccaaaagtcagtatgtttgtaaattttcctagttattgataatgttttaaattttactaaaattagaattaaaatccttaattaattatatatgcatgtgttgtggagctcaaaaaaaatgaaatccatgcatgcgtgatttttttgttttgaattattgtcacacgatattgaataattaaacatattatttaccatcttcatctgtcactgagtttgaaaaacgatgcaaatcaatggttaggaaatgttgttttactttttatcattaccttttaactcttacccttgtcatatatatatatatatatatatatatataagagagagagaaacactatagtctaggactcttttatatgtcaatattgctattggccaaattaagtatcgaatctcatatagttcaatgtaataacttttagaaagtatcactagccaatcacaatacgacatatctagaagtactagacaccattggtatcc

SEQ ID NO: 101644 - DNA, 779 bp, Cannabis sativa
tggacttgttctattgattttttaagactgatatgtgaagtttgtttgagtttggttaggtttggaaggagctgggtttgtaaaactaggtttagccctttctgtagggaaaaatagttaaccgttttcccagggctaaacctagaaaacaacaaatcgtttggaaaaatggtgaaccatttggggtgttttccaactcctaggtttttatgttttatcaatatttagggtattgtcatgttatttatcaatagagaaattttcgattttgagttcaagtcctagaatgggattaattgagttatttaccggtttactattgtcgtgacatagggcccgtgatcatcgagcattgttccactcaggttggcccgcacacctgagtttgaatttgaggtaaaaaaagtcaattgtaccgcattgcatggctagttgtgaaacggtaattaccgttaatacgaaagagttataactctattctaaaactgttgttaggtttcttacttatttattgtctcattaggcaatgatagtgacattagttgactcatttggaaagctagaattaacggatactttatgaagtatcgagaatagtttttcttattagacaaataattaaattattaatattgtgctatgctgtaatgatctgtctgattatatgcttgaatatatgactgatattgattattgttttactttattcatgaatttttattattcctcgcttttcttgttgagtctttgtgactcacgggtgctttgtggtgcaggta

SEQ ID NO: 101645 - DNA, 667 bp, Cannabis sativa
tatatatcaatttaatttttcgggggcctccaaaatagtggggcctggggcgtatgccccggccgccccaccctctggccggccctgcgtacacttgtaccacctattttaatataataagatttgtctttcttgaaactaagactctttgtagagtattaattcttaaatttttttcagctgcaaaaattctcattaaactatataaattgtaaaaattattgtaaatatcctttttaattacattccactcattttttcaaataatttatttatctagcactaatataatataaatttatttcaatttagaagttcagacaaaaaataaaagaataaatatgatttaaccccttaaactatgatcttggtagaattttatcctctgaattttagctaccatttaagttaatttcattaaaaatatatatatatataaatataatttagaactttataatccaataataaataaatattagtttagtccaatctaattctcatgatctcataataaaattcactaaaaataaaagttaattaatacgcattgacaattttatttgcgtttagataaatgagaatcaatattttagatctaaatttttttttctttaatctcatgtgttaaatgtatattaaatcaattaatatatatttttaaata

SEQ ID NO: 101646 - DNA, 526 bp, Cannabis sativa
aaattaggggggaaataaatcatattaaaattaaccataaagtaatgtcaaacaacatctatctagaccctaatcaagtttttagctacacatgttcatggaagcaaaatcacgcatattataactttagaaaagagaagaagatagagaataaaataatgctgaaaaccctctgcagactgcctccagtattgacttctgtcttttaaattcgtactcattttttcttctaaatttcttgaccaaaatcaactccagttcactcgttatataagctttcagggactaaaaagatataaaaaaacgcacatgttaaattcctattcagattcgaattggaaaacaaccaaaatccacatgagagaaaaagatcttcttgggctgtagaaataggggcgggccgcgatgccacaagggctgggtcgcggcccttgtggctggtggtctgcttggattttggttcttttacttaggctggccacgacgcccattatgctgggtcgctgcccgtgtgctccacgtgcct

SEQ ID NO: 101647 - DNA, 629 bp, Cannabis sativa
  modified_base (352)..(354): a, c, t, g, unknown or other
tttcgtgctagaacttgggatcaaattcgtgctttaaagtctgattctcctctaccttggtgtattatcggtgatttgaacaatgtaacatctcaggcggataaaagaggagggcagccgtacccacaatggttactagatggtttttgcaaagtgttggaggactgtaatctaaatgatttggagctctcaggttatccattcacttgggaaaggggtcgtggctctaataattggattgaggttcgccttgaccgtgttcttgcttcacatgattggactcaacgctttatttcggcccagctcttcaatcttgaagtgacgatctcagatcattgtcctatccttctcnnnactgctgcgatcaatctccaccattcggttactaattttcgttttgaaaatgcatggctccgtgagccattgtgcaggcaagtaatacttgacagctgggaagtttgcgtggggctcactctaatagacaaaataaaatattgtggtgagaagctgatggtttggggtcaagattacactggtaactttaagaagaggattgctaattgtaaaaaagagatccgaaggcttaaatggtgtactgatgaggcttctattgctcagtataagcggtc

SEQ ID NO: 101648 - DNA, 534 bp, Cannabis sativa
aaaagccttagccatatcaagctttaatgcagcccatccacttttaccatgtttcctagtattaatagcatggactacctcttgtgcaatcaaaatattatcaaatataactctgccagccacaaaagcactttgaaaaggagaaataattttgtgaagcaccaatttcagcctattcgctaaaactttggaaataactttatagaaggttgaacaaaggctaattggtctaaaattagccctctttttttaggaataagtacaattaaagtgccgttaacttcagaaaaatcagccccattattcaaacaatccaatactgcattaataagatccacacctacagtgtcccaattcctttgataaaaataggcattaagaccatccagaccaggggccttatcacccgaaagctgaaacacagctttttggacttcatcaaacataaaaggctgattcaagaaatcaatctccaaatcctcaaaagggaaaccaaggcaatcaaggatatgattaacagcctccgtatcacaa

SEQ ID NO: 101649 - DNA, 792 bp, Cannabis sativa
ttgcattactcaaataaatattacaacaaaaagtgaatcaaagatacaaaataacctcactttgcatatggaatcatccctaaccttccaaggaagattaagctattatgctaatcattctcattaaatttctaaagagaaaagatgagaagaaaagttgagagaattttgctatagtttttctacactaaaaattacactctaaaacaataaaagtgaactcatatttatagagttttaaaatggactaaaatgcaaaatactaataattttgggttacaaaagaaataataataataataataataataaaatctgatagtttttgaagttaacattgattgactattattatatattattattattattgttgttgtctttgttgttaattgataaatctttgaaagatttaattttgtgattgatgtttcaatgcagatagagtatgggctttggcgtggaaggaatagaggagcagctgcatggcaggcccacatgggctgaagagaaaggagagaatggaggaactaatcccatggcgccatgtggcgcacggctggagaagaaacaagcaccacatgggtgctgacggggcgactgggagagcttgagcggcgccatttggcgctgacgtggcaccgtgggacccgcattgttgggctggtggaagagaaggcagtcctaatttaggctcttctattgggcccttttctttttcttcttttgtaaatgggcttcctctttttcttcttctttttactttattctctttctttcttttcaattttg

SEQ ID NO: 101650 - DNA, 1324 bp, Cannabis sativa
  modified_base (276)..(278): a, c, t, g, unknown or other
  modified_base (422)..(437): a, c, t, g, unknown or other
tattgtcaagtgttcagcatgatcctcatgtgtctaagaatacaccaagatatcatcaatgaataccaccacgaacttatccaagaaaggtctaaagattctattcatgtgatccataaaatataatatgtgcattcgttaacccaaatggcatcaccaaaaactcaaagtgtccataacatgtcttgaatgcagtcttagggacatcttcttccctaatcctcaattgaaggtaccctaaacataagtctatctttgaaaagaactttgaaccannnagttgatcaaataattcatcaatcctcggtagaggatatttgtctttaattgtcatctgattcaagtttctatagtcgacacaaagtcataaagttccatcagctttcttcgcaaacaaaactggagctccccatggagaagtnnnnnnnnnnnnnnnncccttatccattaactcccctaattgttttttcaatttagccaactctgcaggtgccatgcggtaaggcgcaatagaaattggttgagctccgagaatcaaatcaatgcaaccagatgactttgcttttgcttttccctttccttgcttaggatggcttatacttgcaccagaccctccaccttgattgtactctctttgactcccactaggagtaggagtttggaaaccctatgagtaccccatgttgaaccctgaactttgtggcataaactgatgttgatactgagactactggcctgattagggtgtgaaaccgtagaatgaagacttagactggttggtcctgagctgtccatggaaaggagtagactctacatagctccctatgggtcctccgtgagatgcttgaaattttcgttgtcattgtgggcaatctttcttcttatgaccttgttgaccacaactgaaacacccgtatggtccactatgagtctttccaaatgaaccactactagtgctacccccactaaattattgtctttgggaccactgcccttgatttttcttagtcatctttcaatcgtttccttttcctctgcttgtgttatttctcattcccttctacacaagcctcagttcgcaaggctgttgtcacacacttagacaggttgttaaagatcaaaggggttattggaccacatatcgcaggtctcaaatgacgcatgaactgctcaaccaccaagggttggtcaacaacaccaggatatgcataagaggatagctgtgcaaacttcatgtaaaactcattcacaatcatatccccttttcttatgccattaaatactccaataagagccctccgaggagatggaataaaatattgtt

SEQ ID NO: 101651 - DNA, 520 bp, Cannabis sativa
tttaaaaaaaaaaaaaaaatactacaatgaattatatttgatgatagtgcaatacaaaatttggtgtctaataaaattctctattggcaaaaataattaaataaataaatgaaaaaaatttgtagagggaaattattatccagtccctcctaaaactcaaatattttgtaaataagaaattgaataattttgtcaaattggtggagggacattattattagtcttaataatttttatatatcaacttctttgttttttttccctatattctttatatcttttaagtaatatgtttttaggcaatacatatatatgttacatattaataaaaaataaaataaaataaaattgaatttgaaacattataaaaaatagagagtttacggtatttgttttttttttttttttttttgaaagggtttacggtatttgtttggaagtgtatttatttcatttttatttatttatattttaaacgagttactggagctttttgacctttagaaaggggtttaaaaaa

SEQ ID NO: 101652 - DNA, 616 bp, Cannabis sativa
tcatggggaatttttaacggcaaaaaatgttcagggggtatgatttggtacatgtcaaagttcgaggggaaaaaatcttaattagtcttataaaaaattatacaatatttataggggacacactttagggtagttttgggcaccatagtgtacgtctaaaagcaatactttttattagaatatattatatgtaaatatttatccttttattttattttttggtttttatgagaaggagagcttccatattaaaaatattgaacaatattactataaagtactaaagtatcatggtgtataacactaaataagtatcaaattccattaattagtattttaattagagcctcactaaaatatacaaatagcaatattacattgaggtgtcccttatctcatctctattcacacgtttcttctttttagctaaagatgtgatcaaataataattatttttctattttttattgtatatctatgtatatgtggattagatcaacaaagattgtcgattcttcatgacaaatcaaattaattaaacaaaatgtcttcattataaatgatgatagacttctcacacataattagttgatgatgtataatttgtgagtaaaat

SEQ ID NO: 101653 - DNA, 913 bp, Cannabis sativa
atttcacgcgtttcaaatctgaaatttcatttcttgcatcttaaatttcaaatttttattttccccatcttaaatttcatttccctccttttaagatataaactcccctgaaaaaaaatcatatctcattttttcaaagtcatttgtaaattttatttcatttctcgactctctctcctccacgaccacgagccacgccgtccctctcctccactctctctctcgctatgtcgcactccttcgctctctcgtggcagcacaaggtaagcacaacattctcttatttgttgtttaaatttctattagccatgatttagtttgttgatcttgatttgtgtgtgttcaaaataaatccaaagcttgcaaattgaagaaagttttaaggatcgtcaagtgaaaagcattccgaaacttgtaaaagaaaattttgaggaggatgaagacaagcacaatgacgatggaggatgatgaagcttgtaaaggttttggagcagctgcgacatatgcgagaagtggttttgaagatgaagaagacttttttttttggacaatccactatagcgacggtttaaaatcgtcttctatactataggcgacaattttaaactgtggcctatagtattgactatagccgacaattttaatctgtcgggaattcttttataccgacattttttcaccgtcgccgactctactaagtattcgcaacgcttgtgtaggtgacagttttatagaccgtcgagaattctttacctgacggtgtaaaactgtcaggaatttcaagttttttagtagtagatcatgcagtgagtgtattttatctgatgctttctttggtgatgatcccaaactccttgaagacaattacaacaccaaacatatattcttcataagaggtttttttttttttttt

SEQ ID NO: 101654 - DNA, 813 bp, Cannabis sativa
actaaaaataacctaacaattattatacccaaaattcgactacacttcagaggatgacacgtattagttagtggaatatgaactacttggtatcataaagttataccatttaacgcaaagagaaataactcattaaagatagaattaatagagtatattcataattcactggctgtattgtcttaagcgagataaggatacaaaactattaatacctatattgacgagacaccaacctaccttaaaatacacatatccaaggacaagattcgtttattttaaaaagaataagtgaaattactcaaggcaacctccgacaatatatagcgaagcattcaccttgctattcataagaaatactgacgagatgaatcagttgttaaacacatgccgtattttccacattacaataactaagtgtaacaacttagaaatatgcaggacacgattgtccagtctgcgaggccttcaaatagcagttcttaagtttgctcagtacactggtgctcatgtcgttgctggaaggcatatgattgtccaaatcaccattgaccttttacaagttaagcgagatgatattgtccaaatcaacatctaccatctttgatgataagaatgataagcagttatgcggttatcaattgttatccacatgtgtttaaatgaaacgtgatcaattcccacgtttcatgaaacggttatgtatttagaatttaaatgtaaaaaactgttaacctatatttctataaatagggacagatcccacagaaaaatgggatggaagaatctttgggagaaatactatcaattgta

SEQ ID NO: 101655 - DNA, 1365 bp, Cannabis sativa
attttgaggagcaatatgagcttcattttcctctgggccgtcttgggaggaaggattggccatctctgtaatagcgtgaggggtggagcactctctttcgtgcagaaagtacaaggcccaacgtggaaggattcttttcaatctcctcactctatgactaggacatgtagtttcgtgagacccgccagatgactcactgcctaaagggctaggtgaagacgacgaatcagatgaatttggaggtgaccggtagtctgagtatagatgagcaaggaggtcgtcgtcaatatggttgtcgcctccccaatggtcacgagcatacatctacaaacacaagtagggggagtgagcatacaagcatgaaatgaggtaagaaaaaaaataaataaaaaatactaagttaaatttacttgataaagtagttaggctagttaattaaaataaattagataaaaactaattcaattacaaaaattagatgcaaactatatttgatttcaatcaaattggaaaaatctaattgtgttaaattagattggaataaacctagtttaatttaactaagctgaatgaatttaattttttttaaaaaaagtattttattttattttttggattgttttgggtatattagaattttattgaggcatcaaccttctgtatgtattcttggtatatagatgtgtataaaaaaaaagaagcaatatgtgtggctccatgagctccaacaaaggagccaaatggctccataagctcccacaaagaggtcaaatggctccataggctcctgcaatggagctgaaaaaaaaaagtggaactggaacaaaaaagtggagctgaaaaaaaaaaaaaggaaagtggagctgaaaaaaagagagtggagccgattggaatggctccatgagctccaacaaaagaaagtggagctgaaaaaaaaaaaggtggagccgattggaatggctccatgagctccaacaaatgagctgcatggtatattggagccaattggcacaagaggagacccaattggtattattgtctattttaaaaaaaatgtatatatatgcaacatgagacatggagatggtatcaacgtatctacactcatcaattcctacatactccaacccattctacttttttgtctttaccctctaaagcctaaatagccacaaacacatttttccctccattttaaatttcttttggatctaaattagggatttcaaatgttcatcactatcatcatcatgttcttcatttttcccaaaaacgtttacccaaatcacaccaaatacataaatctcacgcatttctaaaataaagagtggattaagataacccatagcctacattgctaagttt

SEQ ID NO: 101656 - DNA, 812 bp, Cannabis sativa
actattttttcttatacgcgtggtaagtaattttgtgaactttatttttagcattataaactatttagaattttttgaaaatttacaagtggtttgtgaaaattgtaatgtacaagataatgaaaaaatgttagactgaaaagctttcctagttgctgaaattgataggaaaatattgaaatgattttttagtgaagggatgaaaaaaaaaattaatagttggccccttagtaattaagttctagctccccctggctttaagtattcttactttttcaaaaatttgtggaagaatctgagctcgagaatttttcatatatatatttattataatatatatagggtaaatctattgtaaggcctattgttactacctcatgatatggggaaggtaattggaccagtaagattaaagtaaattaattgtccaactgatgtaggtgtattcttatacagttgattttctctttaaattaaaaacactacaataaaacccgcttttgccggcgcattattgcgccggcaaaagtaccctaattgcgcaggcaaagcttatctgggaagcttggtcggtaaaggactttttaccggcgcgtagactaactgcgccggtaaaacttccttttaccggcgagaaatcacgccggtaaaaaataagcgtcggtgttaagaaatgcccttatctgctttgaacctgctttgataagcttttgccggcacaatagggcgcctataaaactattggcgccaaccgtcagattggcgccaatagttttagccactttttaccggcgcactattgcgccggcaaa

SEQ ID NO: 101657 - DNA, 753 bp, Cannabis sativa
tctaattagggttttgctaatcaatttcttaattctagggtattacacaccctaaatgtaaagactgcttaattttaatatgttaaattagtaaataattagggcttaattatgagattgagttattaatcatgacttacaaaattgtggagatttatttaaatttagtatgtactaattatgctttatatgtgaatttcttatttttcgtaattgtgttcggtagcagtagaatgcgacgttgggccattagagagagtcacgttttcatatggtttagaatgtttttaatagcgatggacatcattattaggcattagaaatttcgagaaaattgtcgggattcgaaaatggccacattacccatagatgtcattaagctttttgtattatgttaaggggtatattagtcttttcactagaggaacttttgtcttttatgggcattattaatcagttttaattatccaaatttaagtaattaacattaaacatgcataactataaaaaaacccagaaactacccctttcatcctacaattctctctctctctttggaacaccaaagaaactagctgagaattatggatttttcaggtcattttagtgtgcttttagcatagttgtgagcttcaatccaaggtatatcaccctagtatcttcttcctttgatttctttaagtttaagttaacttttaatgcaagatttgggaaataggatgttgtgatgaggaagctgttgggttttatgcc

SEQ ID NO: 101658 - DNA, 1073 bp, Cannabis sativa
  modified_base (573)..(573): a, c, t, g, unknown or other
attgatagagaaactcacttactgcttgattctagcaacaagaaagttaaggccctattttcaagctcaacctgttcgggtgtacactgaccaactgttatgcctaatattgcgaaagctagatgcctctagacggttacttaagtgggcagtagaactgggtcaatatgaaattactttccaaccccgaacaacaatcagaggccaggccttagcagactttatggtagaatgcacaggcaaggaagaaagcatatcgaaaggcgaccccgagctagtagaaatacctcagccaagtaacagtgaagataagctgacatgcaaactacatgtggacaggtcggctactgatcaactatccagtgtaggaatcgcccttgtcacacctgggggcaacacctgcatgctgcagtctagtttggatttaaagcatccaataacgaagccaaatatgaatctttgatcgttggtctgaagctagcccgggagatgaaggccgaccatattgaaatctgcagtgattcacaactggtggtaaatcacgtatctggagaatacgaggctcggggaganaagatgatagcatatttgagcaaaatacacgattttctcgcacagttcaaaagctacgctctcagacaaattccaagggaaaaaaacacgactgttgatgcgttagcttggcttgcgagtagtagtgtaagtgatagagcgaacttggttcctatcaaattcttttaagaacctagcatcactggcacggaagagatcaaaatgattgatacttccccaaatcggatgatgccaatagcgacctaccttaacactgggaaactcccagataatcgaaatgaagctcgaaagatgagaaggaaggttgcacggtacatcatagtagagggaatgatgtatagatgagttttctccatgccattgctcaaatgtgttacccaagaagaagttgcaccacttttgtctgaagtgcaggatggattttgtggaaaccacgccgccgggcagagtttatcaaagaaaattctaaggcaaggttatttctggccgacaatgatcga

SEQ ID NO: 101659 - DNA, 1706 bp, Cannabis sativa
ttcaatggcctggctcgaggaggcggaggcatgagttgtgttggggagaggctcgttggtacttgcgttgaccagaggaggagtttgatcctgagtctcggtcttagagacctcgaggttgataggctcggaggctttcttatttttataagcaatggatttcttttgccttttaagaggctccacctcaatatctgaaggagctcctgagttggtcactctcttcttccctttcctctacattacatcctcgaagtgcatgtctccgagtcgagataaaaatgttaacactaattataaaaaagtaaaaggggagtttagggtataattttctgcctaaggaaattaccatagtcactagaagacggggtatgactagaagatggggtagaaagaccataatacccactaaaatccctacaacccgtaatcttgaatatatcaaagagatcaactggttctaaattccagctcgcccaatctatcatggcacatattgctcgactataccataatacgactcattacaattaatttggacatgaaatctagggtaccagctgtcaaacctatgtgttatgcgatctactaggagagggttccaaatataaaaattaaagcgactatcttggaatgcaactagagtggtgcgttcagtcctaaatagtgtgggtgaccaaccacattgattacctcgagatgctccttcaccagcttcccgagaggcagtgttttgaaggtattgtgcccaagccacgcgatctcaggccgtatccccatctgggacgggaacctgctgccaagaagaatacttgggatatttttaatcacaagtaaattccttgtcaataaggaggtccacagatctcaaattgacctcgctgagaaggaagtcacacgacctaaggccataaggaagagtcaataggggcaggtctttacgaaagggttggcaaaaacaaaacttcaatcagataacttagaataaaaagacatggattaatttaacctagcctaatgagaacaatcacttacgaattatgcagaaggtggttgtgccaattggggagagactggtcgtctaaaagaagctatctttgaactcggcattctttcccatactcaattccacaagttctcagtgaattgcctacatagcccgcgataattttcacattcgattctattaactcggcttcaaaggtgacgttagggtcctagggagtctttgatttacgtggcttgggagacattatttcaaagtccaagtcacctggttaaaaagcaatcgtgactttgggtaaaaacagaggtttagccaaaggaatagaggacacactgggaggtttaggccaagccgcatctcacaagaatcagcgtttgccttctgaaatttcttgcaagaagcgtctgtggcaactagcattatcttccaaatggatttgtactaagtgttccctaaccctttcattatttatctctaatttggatgtgggttttgaaatgttggtttgtaagggacggcaaggaactcaatttctaaatcttctggacgataaacttttgaactagattgggacattgctgcaagaagaaagcaatcccaattcctagaaagaattttatcaaaccagaaggtgatgaattgaaggttctgtaaaacttaagtattatctaaaccataatatttacccaaatacagttca

SEQ ID NO: 101660 - DNA, 640 bp, Cannabis sativa
tatgctagatttaagtggaaggtgggggtatatttggcaactcactcaaaaaagtggatatatttcaatgaaatataatataagggtatttttaattaatgaacacaaaaaaggggaatttttcaacttatcgcaattaatttatgcttaattgatttgtattgaacaatcaaataggcccatcaaaagatttaaatagagttgaatagttgttttgggccgtaactttggtgagcaaaatggagaatcattcccatcaaatatatattgctttgcatggtcatgttttatgggatgagttggaccaatatttgcttaaaaaataattgagaccatcttgaagctctctttcaactttctattgggcttcattttacagcatgctcaaaagctgaaaaatgacataaaatcaaaataaattaaaatttttcaattaaaataaatttatcattaaaaataaggaatatttaatttatattaattatatgtacacaaataaaggctttaaacgtatcaatttcagtctttagtatgacttctcgctccaactcagtattttgtcagtttgatttagccaggcgttgtcaaagttgcctattttcaaattctaccagtaggacatatctggtaggatcatagg

SEQ ID NO: 101661 - DNA, 524 bp, Cannabis sativa
atttggggaaaactagggttcttgaaaaaaccccaaccgataaaattttttcccagccggttaaccagttcactcggttttctgggggaccaaaccggtttaccgatttcttaggtcccgcaaaacccattaaccagttttgtgcaggaaaaccaaaaaattgaccccttaaactcaaatcaaccctaaactctccaatactctctagaatgcatgtaaatattataataaactatactcaagcaataaaactcaatatcaaacatggaaactcaatccaccattaaagatcaaggtttgagttcttagaccccaaccttgccaaataaacaacataaccaccaaaccaactcaaatcaacctaaataatttaaacttagcttcagaactctaattcaaacaccgattgccaccacagttccataattaccagaaccatacattaaaacccttctttaactaaaaaatatatcaaaggaagaaactagggtttcataccataaagttaagcaccaactttgcta

SEQ ID NO: 101662 - DNA, 619 bp, Cannabis sativa
tatctcttttcccttcagcctcccccaagcacattctaagaactgccaacatcgaagctcatgtccttgctagggaagctctacggcatgatgaggactgcatgtagagaaactttgtttctcttctttgggttgctacttcctgtggtttcttttttagtctcgttgtagctcattcaaaaaaaaaaaaaaacacttttcctaagaaatacaatccaacaacttaaagctacaattctctttactttttttttttataaaaaaaatatttaattaacttacaatattgtacatataagttgacaaattacaaagatatccaaccttctacaaatttcatttgataaaatacttttttttataaccatgaccgattagggcgacttgaaactacagtacacctacacctatcaagcacatcaaataaagtaacttgctattattttgtcctttgtgaaggatgaaattcctaaaaagtagattaggaattacataatttggcttatataaatatatatataaataaataaaaaaaaaatcacctattgacatgatggagctacaataaaatagcagtagagagtgtaatagcatagaaagatatcaaatgtcttaaaaa

SEQ ID NO: 101663 - DNA, 560 bp, Cannabis sativa
caagaaatttaattaaatcaaaaaattataactatgttaaaaattaatttattaattaagtttagatgaacaaaaattataatatttttttaaagatttattttattttattttaatgtaaaattcgaatatgtattttaataaatacaatgaatttcaaatttataaatatatatggaaaattaaatttgagttgaaattgagttgaaaattgttgaaaattaattgaaaattaattttaaattaatttgggattaatttgggcaaacttaaattaagtaattttcataatatttattaaagaacattaatacaaaggatggaaaataaattttattatttttatatctacctaaggtatatttttataaatattaaactaaaatttatttttggatttttttaaattagtaattttaattaaatacatatatgaatattaaaatcaatagattaaaatagatatcaaatgaaaatataattttaaaataatgagctttagtttaaggatattccatctccattgttagttctatatggttcttgttttaatgagattc

SEQ ID NO: 101664 - DNA, 1214 bp, Cannabis sativa
ttaaaaagtaaaaaatgaaataggttgaatgtattttaaaaaaaagatggagaaaaaaaaaatggctaagctcctccatctttttttttttggataaggagtcatttactcaaaaaaaaaacaaaactagagtcaaaaaacaaagtcaagctcccccagaaaacgaagaacctcaaactcgaataaaaaaactcatacttagttcttctagtcataaaaaataatttaatatcatttaaaaataattaattacttaaaaatttattatacaaaaagagaattttaatttgtgtaaaaagaagtctaattttcgtaaaaaaaaaaaatcattataaatattataattaaatggcttaactgttctctaaaaaaagacttaactgttaaaataattataacatggatttatataaaaaattatttataattattaattgctaaaagagatcttgttaaatacttaattattttaagaaaataaattattataattaattgattctaaaaaaatgaagttttacctatgggtaacctaacttattattattataagtagaaaaatataaccatgatgtttataataaaataataaacacattactacaaatagtctaaatgctgaaacagattatactataattatggaaataattttaaaataacataatttgggctcattaacagccttcacaccagtcattgttgaccgccgatgacgaagtttctcagctctcctgacggacttccgattatatatatactcttgacggatgaattcttcaacggctctgcccatggaatccagccaggcatgatctaagcactgatcgttgaaacaattattccggccaaacacgtcaaccacaaaacaatggcaaagcagtgtcgtgataacggtggtgtggtggagaatgatggaagctcctctttaaaccttggccatttaacagaaacacaatatatactactgacagtaaaattcatacaatatatatacaaaaaaacaaaaaggaacaaacctggagattgaatcccattcactgaggaaactggaatataacaacatagatatatatacagaagaaacacacatatatgtactataaaatgcagaaaaagacgaaatcaaagatccaagatatttgcattggtataccaactaatcacattttccgatttgaccatgtgcaaaacaaagtacacacttaaattgt

SEQ ID NO: 101665 - DNA, 734 bp, Cannabis sativa
ataaccaagaaatacacactttattgacttaggatctaatttggtgacatgtggacagacatctcgagcaaaataaataatgtcaaatactcgaggagcaactaggaaaaatgacttacgagaaaaaataattttaatgggatctcgccattaagtactgaggatggcatggaattaataagaaagaatgctgttgaaactgcatcggcccaaaaaggtttaggaactgtcatttgaaataagagggcacgtgtagtttcaagaagatgtctatttttatattttgctacaccattttagggtgtagtatcaatgcaagaagttttatgaagcatgctattagaaatcatataagattgaaattgagaagatgtgtattccttggtattatcacttcgcaaagtacaaacagacatattaagtgttaggattttatgtcctaaataaaactcatgtcattataacagatttactaattactaaaagataaaaaatcattttatgttccatagttcacatgatttctttcatggttatatgtttaacatatagattctattaaatcctaaacatatatttattcatatttatagtgttgtctacatagtaaacaataatcatgattatatgcttcagagtatttagtatcatgatttatcaatgcactggatttacactaatgtgattatcagcgataaagtttacttacgcaattatatgtggaatgtcatttc

SEQ ID NO: 101666 - DNA, 619 bp, Cannabis sativa
  modified_base (579)..(583): a, c, t, g, unknown or other
tacataatgtatgaattcatctgggttcatgtagtgggccagcatctccttgccctttttggactctagaagcactggcaaaggtggagttggtccctacacccgttcaggatcactactgaccaattcagacccaattgttggtggtccaaactccatggacttggcagtttttggggtagaggggtttgcagtagtcagctcctcggaaagatcaataacctccccggaaggtctcttttcctgtgtaaaggacccctcaccgcccttagacttcttggccggaggagaggcgctagagcttccgcccattctcttcctcaaagcgtcgatcatctgccgagatatgtctgcacagaacaaagatagtatggttagaaaacagtcattagaaacacaaggcatgaaaatcaagaagctcaagaacaaggtaaagtaaaacgcaaagtgaccgcccgcataagactcagaagtccatcatcacctaacatcaatcttatctcagacatgacagctttcccttttccaaacactggaggggatggtcgagcagatgaaatgggctcccttatgcgaatnnnnngttcaataggcctgggcgaggccgggagtttcttct

SEQ ID NO: 101667 - DNA, 837 bp, Cannabis sativa
cgtgtgtgattttataaactagtaaaatactattagaataattaattattaaaaaccgtgataatattaaaaacttgaccaaaacaaaatactaaaaatgaacataataacagcataaaaagtgtgttcggggatccctattataataagttttgctaagaaaatatatacgacagccatttaaacacaaaatcaaaatacacaactgatgtcgcccagttagttatactgtggtcgcagtaataaacggactttgtcgtatccacagggaggcaaattaccattaaagattagtataaatagaaaatagtagaaattggaataaattataaataaaatgatgagagaaagagagtggtcagataaagagcttggtaaggtagaaatgtaattatgcaaatcttattctaataccgatattaattcagaacgcagttgcaacaccattaattacaaccggaagatatatatattaaaagcacaaattaattgaaatcttgcataaattgaacatcacttctaatttaagagcttatcatattatatattataaatcgacaaaacaccactattgacagaattcagtaaacgacatacaatataataaatacaccaaaataattaataacctaacttacataagaaaagcatgactgaacttatataaaagatactattaactttggaagaaaaatgagaacaatttcataaatcagaatggagatgaagcacaaagaatcaatatcaataattaaaataagaaatacaaaagctacactcaacctcaccaacattactactctagtttactcatttttgtcacataaaataagtaaa

SEQ ID NO: 101668 - DNA, 663 bp, Cannabis sativa
ttatctaattttaataacatgtatcaaatatttgaacttttatgttagatttttgtttattaaaattagataaaaatttttaaatctaacaatctcaataatttaattttttttaattatcttaaaagttcaaaatcgaataagatagtgtcaacatttagcttaatgcctatagttagagtaaagtcggtaggtagaacgacaatgttttcttttagccaataatgtttttcagttttaataagagaaatgttaaaaggtaataatagtgttattgatataattaattaaatataataattaaatattgataaccaatcttaaagatacttcttttaaaaaattattgccagataaaagtatgaacattaaaaaattatattttttgtaaataaaatcttaagaaatataaaaatattttaaaattctgtatcatcgtgtattttgtacttttttattgttaccgaatatttctcaaataatccttattgttatttaccttattttcattaccccacatacaactaagagataatttcaaaaaaatacaaaaacaataaaaaatattacaaattggttatgcaggtaatatttaatattgggtaaataccattttagaccctgtgttttgtaaaaattactaattggaccctgtattttgtt

SEQ ID NO: 101669 - DNA, 1063 bp, Cannabis sativa
tgtttcttttattgataatttgaatagaaaagattactagaaaagattacattgaactagaattttatttagggcacaaaacccaacacaaaagactagctcatacttacatgttggaagcttaatagtgcaattgagtgagagcgttaatcatagatatgaaatttacttctataaatatttataagttaaacgatagtttccttaaagcttggaaaaataagttaaatagtggagtactcatttcaatatttatatagtttatcgaaatattatttacaaagagctaagtgttttaaggataaaatacattaaagggtaaagcagtaattttgtccctattcaatgtaaatttttatagaggatccttgactagttagattgaaataataaataattatagtgtatctatatttggtatgtagagtgttctatgtaatcaagagtgtaatatagtggcgtagggaggaattaataagttaggaaatttacttggtaaatttcacatctacttattaggagcttggttacataaatccatggttcccatattatctgagataatatatattattgtggagactcaaatacttgatttaataaatcaactaaaattctaaagtagattatgacttatttaagaatttttggtaaagttgggctaatttgagaaaaaaaagtagtaagggtttatttgttaattacgaaattttgttggtctaattaataaatatatttaaattatatttttttaaaaaaaaaattatgtatagttattaaaaagataaaattaatatttaaataaataattagataaatagtatttttgaaaaagagaagatagtttcactaaatgaaattaaatggaaaaaaattaaacccatcgagctttagtgaatttcggccttgggtttgggtttaaggttcattatttttttctaaagcccatctattctaaaccctaacctagagagaacctatatataaagggaaacttacaaaaatactggaatttgagttagcttttacaaaaatactgtcacacggaaatctttttaaaaat

SEQ ID NO: 101670 - DNA, 622 bp, Cannabis sativa
attaaataaataaaaaaaaattcttatttataaggaatgtcattaaaagtgataaattttaattatttttattttattttttaatatgaaatatatagtgataattttgtcctttaaaatatatcttataaaataactactataagtttaactcaaaaagacaatttaatcaattttaagcattaggattacgtttcttaataaaataaaaaagataaattacaactattctattttcaaaaaaatttggtaaacaacatattacaaatattgatttcaattatttttcatttatacatttctccattaatttatttttcataatttgtttaagagtttatttctttattgaaaaaaaatatgcatatactatgaataaacaattttaaaatacttaatcaaacaaggagttctctctctggaaccttctaagggttgcatcccgttacagttctggtgcatccagcttgatctctcccgtatggtgtttaatcctacttcattaatctgaagatcacatttactctctcttacttcatttattgtgatttaaccctcatttaatcttctgctcccttcttttcgacttttccatctttccttctccattcttaattgcact

SEQ ID NO: 101671 - DNA, 500 bp, Cannabis sativa
gccaacgatcaataaggacacccatgagtttgtcaaaaagtgtgataagtgtcagaagttttcatatatacctcgcgtactgccgacggaactaagaatgatgacctcgccttacccatttgctatatgggggatcgatctaattggagcattacccaccaggcgagaaggagccaagtacgcagtggtagtagttgacttcttcattaaatggattgaggtcgagcctcttgtttccataacctgcaagaaagttcttgactttgttgtcaagaacattttctaaagatagctaccataagtactttgggctcacataagagtcaagaaaagactattcaatgttggagacttggtgctacgacaagtatttgcaaacacgagagatgcgcctgtatgagtgttcaacccaaactgggagagtccatataatcgaagcagtagtaggaataagagcttacaaattggctcggctaaatggcttgctgataaagaactac

SEQ ID NO: 101672 - DNA, 820 bp, Cannabis sativa
tacaccaaaagtagtcatgatgatatagacatcaatatttaacacgtggtaagaaagaaaacatctcgaagttggatagtcccgaatcatagtaagtcgacttgggaggggtccctagccctgcgcctaggttgactttgggaactccagattaggtgtttgtataccaccaagttatttctaactcactatcttttattattatgtactatgaagacatgaagcatccaagtctaggcctcgggagatgaaaacacataaattagtacctcaaaaatcaacctaagcgtctagggtttcacctaatgcctaggttgacaacccaactagggttccagtttctgggactatcttagtgcaaatgggtcaaaccttgcataggacatgaattagacataccatgaacatatttgaggcatcagaattagattcaaagatttttcattttaaagcaccctgacacccagtgctcggacaccccagtgcccagattgacaatctgtcaattcggaccactttcaagtatcaaattaaaaataaaaaaacgtgcatcttctttgtcttcataaaaataagaaaataggtacatttggggaagaaacaacacatcctgggtgccaaaacaatgacccagtgcccaagtttacaccttgggttggcccaatgcccaggttgagacctggggctagcctagtgcccaggtttacattttgtcatcatgggccaattctgaggattgtttcccatacgtttttcaggcatattctctattttcagcaaagattaagattcaacctttttggggaccaaaacaaaactt

SEQ ID NO: 101673 - DNA, 666 bp, Cannabis sativa
ttcaggttgttccttccacatgacaccaaacaagaacctgttcactgaatttgaagaaaatgcagcaggtactgttctcttgggcaacaacaaagcttgtaaaatcattggagttggcacggttaatatgaaaatgcatgatgggattattagatcagttcagaaagttagatatgttcctgatcttaagaggaacttgtatccataggcatgtttgacaatcaagggtacactgtcaaaatcgaccaaggcactctcaacatctcaaaagggtcacttgtggtagttagaggaagactcaaaaatggtctttactacatggttggctctgctgtaatgggatctgcaacactagcaataaacaatgcaaataatgatgttcaactatggcatttgaggctaggacatgttagtgaaagagggctcaatgaactcgacaaacatgggctgtttcaaggtggtttaaatgggaaacttggtttctgtgaggagtgtgtttatgggaaaagctgtagggtaaaatttgccactagtcaacacactaccaaggagaaattagcctacatacactcggatttgtgggggccttctagagttaaaactcttggtggagctagctattttattagcatcatagatgacttctctaggaaagtttgggtattc

SEQ ID NO: 101674 - DNA, 725 bp, Cannabis sativa
actatagactcggaattacactcctaattacatgaactctctatatatcaaatatagatacattataatatcatccattatctttatcatatcgatcatttatcctctatagagagtctacaattaatatggactaaaattattattttaccctttaattatattttatctttaaaacacttaatttttatgaactaatataatcattgaaatgagtgctttatcattaaatactttaagttagatcaaatgaaacttttatttcacttctaagatagaagttaaagtctaaaagttacttctttgtggcattgtaagtattaaaagtgagaaaggtgagattctaaaggttcacaagcataaactgaaggcatgcaccagtgatagtggagtgttgactgaacatctccgaaatgacaaaatttaaagcaataacaacgtgtagctaaagacgataacaaagcgctttatgggaggcaacccataattagtttttatttttattcatatttatcaaattttatttttaattattttgtattttagtcaaagtatcgtgaaatacgtgaaaaattttgaatttttttttgggcgctattgcgccgtgcgtatacagaaaaaaataaataataaataataagctaggcgctatagcgcagggacagacgccataacacccgaagttgaattttgaagaaaaaaaatgccacttaaatggcacatga

SEQ ID NO: 101675 - DNA, 949 bp, Cannabis sativa
acatggttttcaccttttatttttggaatgagtttcaaaaattctggaaaaaattcttgaatatgtcgtgagctttggaatgttataattgaacttggaaaaagttacggtatttttgttataaaatactatcactttttgttaaacacatggttttcaccttttattttttttgaattttgttgcaggatacgatgatgatgggttaatgccttatgatggaccaaatattaaaaacaataaatgttgattaaagattttaatgcaatacaaatattaaaagtgatacaattaaaaattaaagaaaaaaagaaacatatatgtatgtttaatttttttgtttataggtaatgtatttttttatttttttttttatttttaactgtgtatattgaagtattgatcacattattattatttaaatttaatgtctgtaattactttattacaccatctttctttacttgtattagcagacaaaaaggtatacaatcggttaatttaccgttgaaattgtcaatactctactaataaatgctatatttttagaattctgtctataaacgcgctgcaacagattttttttccttacaaatgaacacagggtaatgatgttgaagcagtaatatttgacactaaaattgacgctagagaatacactttggaagtgttccacacttactacatcaacaatgcctatgtaaaaaaaaacatccatgcctttcgataaaaagcgagactacaaatatacttggacagtgaactcaagaacagaaatcaaagaaatccaaatagaagacagctagacatatattaataaaacaggcatagaagcaacaaacaggcatcatcaaggccatatattaataaaacgatgtttatccatgcttcttgtgtatgcttctatatggtctttgtgatgcctgtttgttgcctttgttgggccatt

SEQ ID NO: 101676 - DNA, 746 bp, Cannabis sativa
aacattaaccttccctcgcggaagacaatgtttaccttctaaaaattcaacatgactctcgcatgcacgtacctttttgtgtgtgaaagatcactgggggtacaacacgtcatcaaccctccttctcgaaagagaaggactgcttgaagcctgtcacacgcctagtgatgtttcaccctttgggtttttgaagcaaagtcataacttgaatttttatgcaactttagccttcccttgcggaaggcaaagttggcctcataaaaatttagcatgactctcgcatgcacttactttttcgtgcgtgaaagataactgggagtacgacctatagggtgtgcaaataaatatttctaatgagatatttacatatatatatatttgtacataatgaattattatacaaagtttgcatagacatgaaattgattgaaataaggcttaaatatttaaaaaatataatcataatttgattctagcttggaatatattttatgagagtttataggcgtcacataaatgttgcaacaaaagtttatttatttgaagctcctaatatagttagaatttaaaatatgccttatttaaaattctaaaagaattttatacatgttttaagtgatataaattttaagttgtgcacactatatgacaaaattttttgtataaagtaaagacatgtaagtaaattattagttaaaaaatatgtatgattatttatgtaatataaattcgtaaattatacgttg

SEQ ID NO: 101677 - DNA, 787 bp, Cannabis sativa
gtcttctccacatacgacaaggacgggttgaatgttggggacttggtcacgactgcaaactgcaggagggccaagttgatttcagagagccagtcagtggatgacttttatttatccaaggttttttgccccaacgttcacaatcctgaattcaagaaggtgctccgagcgaacatcattgcctccgcggaggaccggtataagaagtacctcttcagaagggaacaagaattggcctacatcaaggcccaagccgccgcaaggagtgtccttcaaatcgaggctggaaaagagcaggtgacctcccggcccaagcttccgttaccggtccctaatactggggctcctgatgccagtaactccggagctggtaagtctccgttgattgttcatcatgttccttctgttcaggattactctacttgtaggccggtggaatttgatgaccgacttcataggtttaggatgcccccttttttatggggcgatcatgccaatagtttttatttttcaaaccttagtcattttttaggtcgatcccggatggggtccggtccacccggacctatcttccagttggtttgtaacaccctaactaattaggcatgttaacgtgattttaaacgtattgtgcaactcgttgctaatcaacgagaataatgataaacgtgattaattaaactttcttatttaattaaaaacataaagtattacatttataagattccaggatcccgttacaaaatacatttatcaaagtttgctatgcatatacaaaagttttgtc

SEQ ID NO: 101678 - DNA, 715 bp, Cannabis sativa
atgcaatcgtaattatttgtcgtctaatgaaagtattaattatttatgtatatatattatgaagaggtctatatatatatatacacacgacatttgtctaccttaagtcggagaatgatgtatgataagcatgtgaaatggggactcctaacaataaaggttgaaaaaataaataaaagacaacaaacaattaaaacttgcatacatatatacagaaatggtagtggtgtttaagacaccctcatgtcaagttttatatacccaatggtcgcataaaatgaactcctaaaaagataagtttgaaatcacagccgccaatattattaatgttacgggtcttcagcttctcacttactgccaagttgcctaatttcattttactttctcatctatatatcatagatatttttagtactttttataagtgatattatataattaattaaccatattttttaaaaattatataagaaaaaatactaaacactaattaatatgttttagtaaatctcatatatatatatatatataatcagtacgggtttcaataggtgaatacaaggtcaacgtgaattatttaattaattaatcgaaccgttgtttaatttaggcatattcctaagtaagttctaaaaagtttaatttattaaaagcttcacttgggaatattcaatattgtaatataactactatttgccttaattatataaatgaa

SEQ ID NO: 101679 - DNA, 1054 bp, Cannabis sativa
taggccagataagacattggtgatgagctaagactcgggataaggctctccagctagggcaagaaggtctgcccagttcttcttttgcctaagatattctgtcatgggagtgttttcctttctagtaacctgaatcaaggttctagtttcatccattttggacttggaatgagcttcatagagttgttcaagagccttccataaccctgcagcagtagccactcccataacttcggttgctatagtctcagtcattgagctatacaaccacccgatcaagagttgatcgttgatgatccagttctcataggctggatttacaacttgagaatcagcagtatccaagctttccatgactgttcctgcatcaataaactcaggtggacaggtgttagtaccattaagaaaaccatcaagtttatggcctctaacaatagttgagaccatagttttccatagactgtagttgtgtctatcaagcttaaaaaggtatgattgagggtgttgaagtggtttgagactgggttttgaagctgagaaaaacttgagccagcacccattacaatggatgctgcagtggctggagtggattatgcagggttgttgtttcctgtgttttggggttctgcagacatggtgagagggtagaaacgcctagctctgataccaagtgaaaattaattcaggaaaggttttatgaaatgtcagctctatttgcaagagactgagtgaattatatttataggtagggtcgaaagagaccaatacagaggaaagccaatggctcaattatagctgtaggcaattgtaacaaatagagaataaatcgtacaaaagcaatcattgcctcatcattacaagaataacggctatatctacctagggatctccaattgacagaaagatggacacctgtcctaaacttggaccacaacaaccagcagagaggaaaaatgcaccaagagagaaataggtacatttcttcacattttatccataattattaacaacgctcatcttaaaatgttgctattgcctatttttatttatttta

SEQ ID NO: 101680 - DNA, 583 bp, Cannabis sativa
gaattaatgtagtttcctattttaattattattgattaagggaaaccactcttcatgtaataagctcctataaatagtggcataatctcactattgaggggacaagaaattgagtttagaagaacactaaagagagaaaagcaatctacgagagagaattacttagagattaattgtaagagctttggagagaaagaacacttcattcttactctcaaatcaatacaacttaaaggagagttggctattaccattctaacagggtcgaacctctggaaaatttggtattatttttactttattatttttgctttctattgcttattttatcttgactcactattgttggctagaattgaagtcaacaggtactgaaatagtttttctgtagctacaaaaggcaactctgtaactttagaataaactaaaaaaataaacagtgcagaaaagtaaatacacacaaagtttttgtatgtagtttcaacaatccttccagattgttactagttcatggggccacgccttgagataaaattcattaaatagatctaaaaaatacaaagtaattgacttatgcataaat

SEQ ID NO: 101681 - DNA, 673 bp, Cannabis sativa
  modified_base (57)..(65): a, c, t, g, unknown or other
taaacatgtaaatacatatacatgttgttatactaatcttacctcgattccgaattnnnnnnnnncggtcaacctgagtggaacaaaacaaagcttaatgcacaaatacaaaaatcatcattgatgagccaagcttgagtttgaaaactccaagcttgctcatccgactaattagcccttaaaacctacttaaatcactttaaataaacataatataactgcagaaaacatccccaaacacaaacaacatccaaagtagctaaatcaccatttcaccattaaaacccaagttttgagttcaaactccaaacttacttaaatccaaccgacaaccattataacctgattaaattaacacaattaaacatactttaaactctgaacacaacaacaatcaaccacagaaaccacaacaagcataaactcaaaacatgcaaaatttcttttccttacaactcaagaaataaagaacaagttacaaaaaaacataccaagaacttgagcttactaaaaccttgataaaacaacttgaattgcaaaggaaaacacaaaacccttgcttctgaaaggggggccgaaagagagagtgagattgagagaaaaaagtgatttttcttgaactttgtttttccttgaaaatgagacaaatgtcctttgttttaatcaaataaaa

SEQ ID NO: 101682 - DNA, 670 bp, Cannabis sativa
ccttgaatttctccttgattctgctcagtattaggctccacctcaaactgataatcattgtcttgttcaggttcagatgccactggtgcctgctgttgagttttgagagtgtctctataaactttgctttcatcaaaggtcacatccctactgatgaagcatttttgatgatccccactctcaatgctccacattttgtactctttaactccctcggggtaccctagaaaaatgcattttctagcccttggttcaagcttatcttgccttatatgagcaaatgccacacaaccaaataccctcaagtgttcatagtgtgcatctctccctgtccatgcctcaataggtgttttgaaacctatagtagaggagggacaatggtttatcaaataacaagctgttgagacagcttcagcccagaaattctttggcaaaccagagtggattaatagacacctaaccctctccaaaatggtcctattcattctttcagctaggccattttgttgaggtgttctaggaactgttttgtgcctattaatcccaacacttttgcaataatcagtgaaagaatctgagcaatattctaaaccattatcagtccttagcttcttaattttcttaccagtttggttttcaaccatggttttccattcaacaaactgtttca

SEQ ID NO: 101683 - DNA, 551 bp, Cannabis sativa
caatgtcacatggccactactttgtcatctacctcagactatactgagtccaatgtccctagtttagagtctaagagttgtatatctcattgtacttcagctgttacaacagctgccccatcatgtaatcctactgctataaataaaaatgagataaattctgatgctcccctttgtctttacaccagttctaatggaaatactgatgttaatatatggcactcaaagttatgtcacccagcacctaaaatcttggccaaaatcttgtctaaaataaatatatcccacaaccttaaaactcttagattctgtgaggcatgcaaaatgggaaaaagtcataagttaccttattttcagtccaattctcgagcctctcaaccacttgagttgctccatactgatctttggggcccctcccatgtcacttctattgaaggatacaagtactatatcatctttgttgatgctttcagtcggtttacatggatctttcccttaacagtcaaatctcaggcattctttatcttcctagagtttaaaaagcttgttga

SEQ ID NO: 101684 - DNA, 560 bp, Cannabis sativa
aaaaccaaaacatttcttaactcagcaagcgagtttcacaattttgaataacatatctatataaagaaatcatagctaggaatacaactccttaaagcttgtaccacaaactaattaaacaattcgtctccacagttacctattgccattgatgttccttgatccaacttatagcctccctaaccctcattgcctcggcaagctcaggttcgttaggaccatgagaataaagggtacaccctctttgcattgtagattttgattataaactctctttcatatggtaataaggaagcatggattcgccatttgcatccttcagctttacaaattaatgtgattctactagaagcatgcttcactttacgtagctcaaaaccttcttgaatggcaaagtctttcaatacttttccaaaaaccttgtgatcatttaatctttgccattacttaaggattattttcccattttcatacatgttctcattttttagtcttgataggttactattaggatcaataaaattttcattccttattagtttcttaaaattcctatgctc

SEQ ID NO: 101685 - DNA, 1049 bp, Cannabis sativa
ccaaatgaagcttggattagacccaaattgagcattaagaaaaggaccatccgcataataccttgctttaaaaattcttgagaccaaagaggagggtctagtaagcaaccgccaaccctgctttctaaggagagcaagattaaagtcacgcaaatctcgaaatcccatgcctcctccccttttgttcttgcaaagtttatcccatgacatccagtgaatgcccttgctgtcactcttcgtggaccgccaccaaaacttggtcatggcacgctcaatatcactactaatttccaaaggcggtaggaatacactcatagcatagctaggtaaagcttggattatcgatttgataaggatctcttttccggctctcgaaagaaacttgccttcccagctttgtaatctcttctaaactctatctttaagataccccaacacaaccgatttgttacggctcatattactcaaaagtcccaagtaaaaactaccctcagccgcctgatccatttgaaggagattgcaaagttgctgtttcaccgtagaatcagtattagcattgaaaaaaattgaggatttttccaaattgacttgttggcccgatgctagttcaaagcagtggagtaaattctgaatatggacagcctcagttgacgtagccttgcaatacaaataactgtcgtccgcgaacagcatgtgggagacacgaggcgccccattagccactttacaaccatgaatccatccattgctctcatatctccataggagagcagataaaccttctgcacaaagaataaaaaggtaaagcgaaagtggatcaccttgacgaattcctttggacggtaacaacggacccatctcatgattaccatgaataattgtatacttagccgaagaaacacacttcataataagcttcagccagggagaagagaagcctattttttcagaattgcttcaaggaattgccactctatgagatcataagccttactcatatctaactttaaggccataaaaccggttttgcccgctcttttctgttttag

SEQ ID NO: 101686 - DNA, 515 bp, Cannabis sativa
tgataaagtctctgtgaaacctaaaggaggcaggtatgtgagtattcgaagtgttcatccgaatacccgcgagtattcaagaaatatacaagtaagaaaggtgcgaatattcaaagtgttcttcctaaagttcacggttatacaaatttcaggtctattttttctaagattatctagttctaaacagaaaaatacaaccctatgtgtattccctatgaacatacatattcaaacaactcaaaatgtcaaaaacacagaaagatagttttcattttttcaaaaaccaaatacataagtggattagaaactaacctttagcttttctgattgctccttataattggtttcggtctcttctgaaatcttagagattcaggaagaaaagtaaatctgggtggaggatggatgaggatctctaaaatttcagaggaaaagggaagaggaagttaagaatgagatggaaaatgagaaaatcatttcctatcagagggcttaaatgttggaaattattttac

SEQ ID NO: 101687 - DNA, 748 bp, Cannabis sativa
ctattataaagtgtgatacaaaatgaagaccaattaggttatgggtatcaaaagagtattaaattgtcatggaaataatgtaatgctcgtttttaaaaattgactaattcagaattaaacttattttattatatttataaaacctcgtaaatcgggatcccgagtttaaaactgttgttgaaatacatgtattatatatgaagttacataatattttttacaaactacatggcaaccacaaaaagaaacccaaaatgtaataagatcgaaaccctccaggttgcactaccgcgatatgtacaatccttgccaagctcatctcactgctcctccagcttagctttacccttacctacacaaaggtagaaaacaaactgatgagtgagttgacagacagacttagtaagatacgcataaaacatatatagacaatgtaataccggctttatgcttaagctgtcgtgagcccaaatgctagactcaccgaatggttaagaacattctcaatggaagtacgaccattttaccatatgcactagagtaccgactccgtactcgtgttggtaaggcctttattgtacttctgagagttactgagtgttgtaccacttgcacttcgtaccccctggtactcatgttagtaacattgtaactactataaaaccttacactacactaacacccttaaaactacatttttgtcaatgttagtagtgttgggttttgtgccctaaataaaacccattac

SEQ ID NO: 101688 - DNA, 554 bp, Cannabis sativa
ataattctgtttaacactacaaaaacaaaatatatttttagtcccaacaaaatttgtgactaaaaataaatatttgtaattactaaaaaaaaatcataaaatttatgttataactataagtctaaaaatattatgaacaaaaatcatactttgtcaacttgtatctaaatattcttgtttgttagtacaagtaatttttttattatttgaacaaaaatgatacttagttacaaaaaaaaaaaaaaaaaattatgttatttactaaaacttcaatttttagtttaatatatatttcaatataaagagaatatttaaatataataggtatatgtcgagtgttaatttaacctacgttctctttcacatgtagagaaattataacatatttttttcgataaaggtgtatcttatagttataacagttactaatttaaaaaaaaaaaaaaattgaatgataattacagtgctttaaaccttgataattttttttacgtacatgcataaaaaaatacaaataaaatcatgtgtacatgcaaaagtaattatattaaatt

SEQ ID NO: 101689 - DNA, 673 bp, Cannabis sativa
cgataaattccaaatgaatgatatgggagaagtaagctatgttttcaagatcaaaatctatagagatagaaagcagagaacattagcaatttcttaagcaaattatatcaataaggtgcttaaaagattctcaatggagaatgccaataaaggatagttaccgtccaaacatagaattactctatgtaagtatcaatgtccaaagaatcctcaagaggaagaggacatgagaaagtacccttatgcattagcaattgggagcttgatgtatgcaatattgtgtacaaggcctgacatatgctacgatgtatggattgttagtcgttaccaatctaatccaagtttggaacactggatagctgtaaagcacattcttaagtatcttcagagaataagagatcgcatgcttgtatattctggtggagagttgaatcctactagatatactgattttgattttcaatcaaacaaagatagtcaaaagtttacatctagatcagtattaactcttggtggaggagttgtagtgaggagaagcattaagcaaacaagtattgcagattcaaccattgaagtagaatatgtagcagcttacaaagcagctaaagaagcaatttggttgaagaaaattttacactgatttagaagtaattctagaagtagaaaaaccact

SEQ ID NO: 101690 - DNA, 629 bp, Cannabis sativa
gaactcccactacgacaaggaatcgtgatcttttgaactagaacattagtgatagttttcttagttgtgtcaatttgtagtttaaccgagggagtgggatcatcctctacttgagtagaagacgatggagcattagttggagttaattctaaaagcatctcctccaatactactttgctttgtggcttgaagtttttaatatagtcattctcaaggaatgtgacgtttgtagaaacaaacactttattatctttgtgactttaaaatagtccaccctagtctctttaaaattgcctagaaacatgcaaacttcagttcgcgtttctagcttgccttatttcttttgtaagacacgagcagagcacctcaagattttgtaatagtgtaaagtaggtatatgacaattctataactatacaggtgtcttgggaacttatttagatggaataacatttaaaatattatttgcaatctaaatagcatatccccaaaaggacgttgacaaagttgtatagctaagcataaacataactatttccaaaagagtgtgatttcttctttctacaaatctattttgttgtggagtgcctgggatagtatattgatattcaattccaagttcaattaaa

SEQ ID NO: 101691 - DNA, 596 bp, Cannabis sativa
atactaagctatatatagttctttatatatatgcattaaaaaaaaattatgattaaacatgatgatcatattattaaccaatctaatctaaacatatacttatcattaatgtaatgaagactaacagtttcgttgaataatatatggtaattaataggtaaataataacatgcaaatctagataaaataagttttgataggagaacaaaaaaaaaaataaaaataaacacaaataaatagatacaagcttaaccaaattggtgtaattaaatttttcaaaaaaaaaaaaaaatacaagattaagaaggtgtttgaaaattggcatcatggcaaaaaactgtttgttaaaaataaataatttataaaatcaaaaataaaaaattacttgtttttgttaaagagagattttttttttttttgagataatgttaaagagagacttgagtactaataacatttggatacttttctactctttctcaattgatcatacattctctaccaaatacacattaatttagggcattttacaaaaatattggatttggggtaatacttttcaattttactgccacacggcagaattaacatttata

SEQ ID NO: 101692 - DNA, 519 bp, Cannabis sativa
atgttgttaaattatgctggtacaagtttgtctaaactcatcactgattttattttgatgattgtgattttgggtgataggaaaaaaatattgaagaatcttgaagatttcaagaatatggttaaactactaagtttggataataatgagaataactcaaattccattctgatcaagaatttggtatctgtgatccaattgataaaaacaattgtgaaaaagaataagcgtttggttttgccaaaaccggggaagttattaagcgatgatggggacatagagttcgagctgcttcgaatgatactcacagaagttttgtgtgttgaagttgttttttgtggtcctaggatgattgaggttttgacggatgatcaattcggagtatatggattttatcttcataaataccttagggaaagattgattgctttggatttgaagatgaatgagctgagggtgcaaatatgtttgatgccttccgtaaatgaagaatcaaaaaaaaaacttacaattcttcga

SEQ ID NO: 101693 - DNA, 551 bp, Cannabis sativa
tatataataggggagaagaaatctctagcatcatgtttaaattaagagcattattattgggcaccagtggtacctaacacctttaataggtgtcaccttaccattggttaacgatattcttttcttaacgatattcctcaacagaaacagatttgagatataactttgattagtccacttaacattatttgactacatcattacagtttttacctgacaagaatagtgtatgtgcaaccgaggttatgaaaatggtatgagcttttggccaatgagcacattgaagaaagtgttccagggctttagagagatccccaatataattgtaataaactgcctgcattttgttgaataagacagttgagccattagatagtcaaggaaagggacattaacattccagccatattttgacaagatatttatgaattccatcttcaactatagaggacgactttaaacaaaattcatacggttgttattgatacattaacaagatgacattatgtaaaacaagaaaccgtgataaatgaaaaattcttaccagtgct

SEQ ID NO: 101694 - DNA, 543 bp, Cannabis sativa
tctctctctctctctcaacaagtttattaacaataacaagtttattcaattttacttttatactttagtctcttaactcctatctgctaagattgtgtgtatatgtatatatgtatgcttctgattttcattccttttatgatatcttatacttgtttgtggcttgttaagggaaaagaagttgagttgtctaaagttagttaggagtatggtttgcgttacttacagtaagtgattgtaactgattctgttattcctttcttgctatagtcaatatgtgtatatattcattgtaatacctttcagatctataacaacaataacaactttcttcttcttcttcttctttcttctctctttcaatatcttctacatggctgagcagtgaaaagcttgtatggcagaaaggtgggaacgacaagtttgttagagaaagataatcttcaattcaagccaattcaccattcactttaagtgcatgcacaaataatttataagctgccttggttgtataggaacctagctcattacaaaatgaaaatc

SEQ ID NO: 101695 - DNA, 702 bp, Cannabis sativa
  modified_base (210)..(242): a, c, t, g, unknown or other
tattatttacgctatatatgaatattcatgtttacatattttatgctcaacaacattggaacgcgacgtttagccaatagaataacattttagtatcttagtagtaatggggtaatatagatagacattgggaatatcgggaatatttgaggcattagatttaactaaaatatccctagggggaagtatgctttttggtgtgtgcaaggnnnnnnnnnnnnnnnnnnnnnnnnnnnnnnnnncctttagtgaaatatgatgggattagtttaattctaatttttgattataagttaatgttagataaatactaggtattatctctttatttcaaaaatagaaaaaaaaaatcaaaattcaacctttctctctctcttgctctaccccttcaagaaccagcagcatatttgtgggtttcttcagctcaatcagggtattctagctagattttcatagctcaatccaagatatccatcaagctcctttctctttgtgatttcctaagttctaagctaagtttcatgcatgattttggacattgggttgctgtagatattgtttaatattatttgagtattctgaggttatattattgatgttatttgagttgaatcggtggctgtaatggtgtttggcaaggtttgagtttaagaactcaagctttgctctttaatggtatttttggtttctgggttgtttatt

SEQ ID NO: 101696 - DNA, 530 bp, Cannabis sativa
ccaccatcagtatagatgtggaatggggaaaagttagaagagaagagaagagagaagactattatgggtatgaatataaagtgtgcttatttttttaattttagaaagcttctgttcaaaaatttaatatacaccaattgcttgtatataaattcaaattttcctattataaatatagcatgtatttcatcgaataaagtttaaacaattgaatgcatgtgtgctaattttaaaattggatattaaggacaatactatttaaattatatatttcgttatagtatggcacaaattaattttttgggggcaaaatcctctaagcttcagttttgttttgatttttactattctgttactataaagagctattaaataccaaataaacatgacatattcaagactggctcaagggtgggcagtagaggctaacaaattatttaactcggaatagtatttttgtcattttacatatttagaagtttaaatatgtatgagattatttttttttatgataattaaatttttttggc

SEQ ID NO: 101697 - DNA, 1611 bp, Cannabis sativa
  modified_base (27)..(29): a, c, t, g, unknown or other
actaatcagattgtaaagagttttatnnngggcataaaacccaacaagagaaacacaccaaaccttagctggttctagagatttcgagagagaaaaagagagagttgaaatatagaccttttttcttacttttttctaatttttcaaaaatgatttagtgaaaaaatggttttgttttattacaaatatgagcctaaaagcattaatcaaaatcagattattaaacataatataaacccattaaaagataaaacaccaatgggcgaaaagactattttgcctttcccacactaaaagtcataaaaggtcacttaggggtatttttgtcaactctaaaattttgactattcgcgatattcccaatgtctaactatattactccgctatactaaaaacactaggacatgattctaatagccaaacaccgcgttccaatattgtcaggcacaaaacatgcaagattatgaaattttatatatgacatataaaatgcattctgaatttaaataaattatcataatttaataattccaagctaatatgcaagtttcataattaaaccctaattatctactaatttccaaattaaagttaagcggtctttacaaaatccgtgagggcttaggctcaaagcggaaatatcataccaatggagaaatagatggtgtccgacggtccttacagtggtatcagagcaaaattccaaaaattagccatgtgaatgtatcctcgaattttccaatcaaaggaggtgaagcttgctattagagccgtcaaaagttcagatttggttcaaagggatttcgaatcgtgctggtgaagggattcatctagcttactcaaaggggatcttgagtgttggaatcaagggattcaggtattcaaagggatttcgaatttagctagtgaatggattcatctatattaatcaaggggattgtgagtgttggaatcgagggattcaggttcagatctgtaatcgtgtgagggtaggcaaggtttgaggaggggaggattgttgggtgtacaactaaagtcccatattagctagaaatggaaaggatcttgggtatgtaagatgaacactatctccattggaatgaggcgttttaggaaggtgccggaaaacaaatctgtggggtcttacgcccaaatcagacattatcataccaatggtaaaatagatggtgtctgacggtccttacacttcttaatgggtattactcattgatggttactaaacaaatctaactataagtattaattttaaaaatattaaattattaaattttgatccaatatcgaataatgaaagagaaattttaatatttatgcttaatttagctatttaattaaaaaatatcaaaaaatatctctttttacactacataaaaaatatatccagatacaaaatatttaagtcaaacttaatttttttatctattttttgccaaaaaatctttttttcttaatttttttccaaccaatggaacaaccccaactcatataatatgaaaatgagagaaaactaattagatagaaaaattaatcttaaaaactaaaatttatccattcatgggtaatgctcattaagagtgcactcatatatat

SEQ ID NO: 101698 - DNA, 1179 bp, Cannabis sativa
  modified_base (893)..(896): a, c, t, g, unknown or other
catattcaaggcaataaaacacaactacaagctcagaaacaagtttcaccattaaatctccaagtttgagttttaaaactcaaaacttggttaactcttctatcagccacaaaaacattttcaaataaacattaaacaacatatttaacctccaaaaagcaacatcaaaccctaacagcagctacagcaacataaaccacagcatcatgcatatccattttcttaaaattcaagaaactccatagcataaaatcaaaagcttacctagagcttaagcactcctaaatcttgcaagaacttgcttgaattgagagaaaaaggaagcaaaccctagctggtctaggcggttcgaaaatgagagagtgtagagtgaaatgtaatttttggcttaacttgatattttgtaaaattaaatgagacaatgttgtttttattcaaataatatcagcctaaaccattacataaaatcaaatttaatatacaactccattcccacaaaaagacaaaacaaagattggcaaaatgacaattttgccctttcatactaataaccactaaaggtcaccaaggggtacttttgggaaattctaaaatcccaaccaatcccgacattcccaatgtctaactatatggccccgctatactaaaactactaggatgtgattctagccaaacaccgtgttctaatattgtcaaggactgaaaaatgcaaaattatgaaatttctatatatggcatataaaaagcattctaaattcaaataaaacatcataaattaataatttagaattaataaataatttccataattaaaccctaattatatgctaatttccaagtttaagctaagcggtcttcacaactatcacccttaaaaggatttcgtcctcgannnntaacctgaacaactctggatattgggctctcatgtctgattctaactccaaggtggcttcctccaccttgctatttctccagagtactttgaccaaagctatggtcttatttcgaaggaatttatcttttctgtcaagatctgtactggttgttcttcatatgacatgtctggctgcagctcaatattttcatagctgagtacatgagcaaggtctgaaacgtattttcttaacatcatactaatcttacctcaattctaaatttaggtgtgccggtcaacct

SEQ ID NO: 101699 - DNA, 635 bp, Cannabis sativa
tagagaggagattatatacacgttgtttgaatatttatgtatataaggaagttgctcatgctctatgttttcttattttctttcttgagtacggtatatgcatatacacatattggttaccttaactttttttaagaggtaaaatgctcgtggttgatgagatttgagtgattgtccttttgctctatttggacgactcaaccttttgttaaagaaaaagggttcacttatcattttgcttcactaatgaaaatagaaaatattatgaaatacttggtgttagcaactttttctttcataaagcatggaaagaatatgaattgaaacaaatggagttcactgttatatttatattttgttcaccattctgagtttttgtccaagataatatgaaatacttcaaatgcaaactggtattattttttaaaaactattaatatttattaatacttttaacattaaattataataaataataaagtattagcggcggactctattatttttatccgctggtaatacttataaagaagtaaatttgatgaatttattagtggcggactccgctgctattaatccgctgctaataatattattagcggcggagatattttccgccgctaataatagttaat

SEQ ID NO: 101700 - DNA, 518 bp, Cannabis sativa
ggtctgatgaatccctgattcagtaactcttgcaattgtatcttcaattccttcaactcagctggagccattcggtacggtgccttagatactggatccacttcccgaaccaattcaataacaaattcaatttcccaggtaggtggcaatcccgacaagtcttctggaaagacatcaaggaactcgcataccaatctcatatttttaggccctgatttcacaggttggttggtatccactgcagtgactttgaaccccaaaaaacctctacccatgaggtccttcgatttcaacagtgatattctcggtatgcgtgccccctgaactttacccacgaacaccactgggttagcattatgtcaaaatcagatatttgtaactcaattagatttgtggtcaactcacaaccgtcaatccaaaaagataaagaccgaacccaccttgtggacactatcaggtctcccgagggtaacagggttccaaaccccgaaacataaatatcacatggcttatgtaaa

SEQ ID NO: 101701 - DNA, 611 bp, Cannabis sativa
tatatatatcactataaaaaatttaatttttaatcacaacaaaatttataactaaaagtaaaaaaattatgactaattataaatcattattcttatgttgcgactaaaaagtccgtggcaaaagacattagtcacaaaaatcataatttgttctgactaaaacagtacttgttgtgactaaaattaaattgatcataacttgtatctaaatattatgttttagttaaaagtaactttttattgtgactaaaaatcacatttagtcacaaaaattttatattatgattaaaagattatcactaaaaaagtagcttttttgtagtggcagtttatttatatcgcaggtccttaaaactatataatttttggcaagttagtccccaaattttattttttgataaattggtccccaaactataagttttagcaaattggtccccaaattttattttagggcaaattggtccccacacttttatttttttaataacattaagtccccactcttatattgacatttttattgaaaatttaatttattttttttttgtattaaattcaaataattttattttttaatattaatattttgataaaaataattatattaa

SEQ ID NO: 101702 - DNA, 1091 bp, Cannabis sativa
cctcaaaagtgacattaggatcttagggattctttgagttacggagcttggaagacataattttaaagtccaggtcaccaggtgaaaaagcaattgtgactctaggtgaaaatgagggtttagccaaatgaatagaagataaatatgaaggttcaggctaggttgcatctcgtaagtagcgacatttaccctcagttatttcttgtaggaaacgcctatagcagcgattatcaacttcttcctgattagtttttattaaatggtccctaatttttgtatcatttatctccaatttggaccgaaatttgaaaattatagatttgtatgggagggccaattccttaggatattctgtttctaagaactctggagaataaactttagaaccagattgggacacttttttacaaaaagaacagtcccaattcctggatgaaatttattaaaccagagacttacaaatatgataaacctaaatttttactctggctaaatcctaaaaattacccagaaaatttaaatcaaaatcgctaaaaccaaatggagtgacaaagatgtaattaacagcataatgatcataacctaggaaaatgaaaaagatcagaggaaagaagatggatcacttactgttcgaaatcgagttgtcacaggatgaaaagctctacaaccgaggacggaatgaatggtgtgatgacttctatggactcttgaggttgaacagtatatccgagtatacgcccaagaaatatgttaatgacaatgagggcatgcaaggctttgagaaattggaatgattttttcgtagaaaaagcttgaaattttttgaaaaggcaaatggcaaaaaaaaaaatggttcctgtgcagttttatactttgagattaatctccgttagattaaaagaacaaaagatccaactgacaggaacaagagagaattgaaaaagatggctcattaatgctaatgatgtgcctcgaaagcatgaatcgcgaaatttaaaagcctgcgatttttcaaattgggttaagacaaaaataccctttataatcatttaaaaagtactttttattaaaaataactttttaaggggcaa

SEQ ID NO: 101703 - DNA, 653 bp, Cannabis sativa
aaagactcgtcttagcaccaagtcgccaacattgaatagtcttttcttgacttttttgttgaagtatcttgtaactcggtgttggtatgctgcgtttgtgatttgtgactcatttcatttttcctcaagtagatccaaggacaattttaaaagttcatagttttcttcttgaatacaaaactctcttctgtgagtcgatatgtccacttcaataggcggcattgcttctgagccaaatgctatcgagaaaggagtgtgtcccgtagctgtcttctcagtagttctgtgggcccagagcacctgaggtagctcatcaatccatctgcctttggcaccgtctagcttcttcttgatagtatcctttagggttttattaacggcttctacttgtccatttgcctgaggcctggatactcatcagaagtttttgataattttattcctctcgcagaattcagtgaacaagtcacaatcaaattgggtatcattatcggatactatcttcatgggaattccaaacctacagataatgttcttaatgacaaagtcaaggactttcttgtatgctatggagatgaggggctcagcctccgtccatttagtgaagaagtcgacttctactaccgcatacttagctcctcctcgcccagtgg

SEQ ID NO: 101704 - DNA, 661 bp, Cannabis sativa
gagaagactttattcttccaattgtgaaggtgaccccagaccttgtcatgcaggtaatggaacaattgcttttttgttcttccaatgtgctgcgggagaccaagatatttttcaaaagaagaccgcaccgggatgcccataaagtcggagattaaagtttgatccctaagctcaacattaggggaaaagtacagagaagatttttggaaattaaccttctggcccgttgccctctcataggcctcaagcacttctttgatggtattacaagaactgatgttggcttgacagaagaggaagctgtcgtccgcaaagaggagatgagaaatagcaggggctcttctcgcgactttaaaacctgaaagggctcccctactttcttgctggtgcaaaagagaggaaaaaccttccgcacaaagcaagaaaagatagggagaaagggggtcgccctgtcgaatgcccctagaagggctgacgatgcctaagactttgccattcaaattgaattggaaggatgcagtggaaatgcacgcatggatcaattggacaaacctgggggggaattgaaatttcctaaggatagcaacaatatagggccattccactctatcaaaggctttggccatgtcgagtttgatcgccatccatccctttttcccac

SEQ ID NO: 101705 - DNA, 540 bp, Cannabis sativa
tataggtgaaagtaaaaagaaatgattatctcttagtctatattagttggacatgatttttttaataaataaaataataatcacatatatttgttgtgactattcattttgctaaataattataaacttgtgttataattttgttttaaagaaatttttttctaatatatattcaggtttaaagctatttccaatgatactttaaaaatttaaatttgttagtgtaatttttttccatgtttcaattttccttttttaaaataaaatatttcccttatgaagtaaatatttttattatattaataaaataacattataataaagaatatagattttaatgtaatttttagtattgtgattattaaaaaaaattggttctaaaataatattctcttggttttgatttaatactaaatttatgttttggtattggagttgccttagataaaaaattagtaattagtgggttaattttattgtaagggcatagttgtaataagataataatattatgtctagttattaagtagaaataaagta

SEQ ID NO: 101706 - DNA, 986 bp, Cannabis sativa
  modified_base (302)..(318): a, c, t, g, unknown or other
aaaatttcttaatttttcacaagtaatccaaataaattattttcaaaacgaaaataaaactgctttcatggaaaaaatttgtaattcacataacatcatcgaataacacataaactaacatgaacacatcctaatcaatacaattaacatattcatcgttttaaatccatattacatgaaagtaaatcattgctatggctttgatacaagttgttgggaatattttaccaggatttaaatttactaacaagtatgttgattaatatcctaaatatgaatatctctaaaataatgaaattaannnnnnnnnnnnnnnnnaaaccttacattgattgcagtgaaataatatgactcctttcgctccaatctctaatccttgatcctttgtgttacagagtattatcaagatttgagcctggatctctttctctctttcaggttggttaccaccgtcttccgcactatgattaagtacttgacttgctatgtgtgggcatggcactctatcactaatggcgaattggataaagaataattaaggaagtttcaaaatcaatacagaaggtgtctctcatcgactagttatcacagaataaaaactaggtttgattttgttaatgtcaatagtttagttgggtgagatgagagcatcatgttccttttatagtgtttcaaatatggcttaggtttgaactatatggattaaaaaagaataaaatattgggcaaaaagtcaccggagttgccggccacttaagtgaccattctctagttataattttgccactttatttcaataagttattcttctttcaataatacattattttccaattcaatccaataaataccaaaactatttatttaataattataattagtaatcaaatataattaccatttatattatttattaattaggccatgcaaagtctcttaattaataaattaaccctaaaattatttttcttcaaaattaagcccttg

SEQ ID NO: 101707 - DNA, 1237 bp, Cannabis sativa
ttttcataaaacttgtctcaagggctaattggttaacacttttatggggtgagcctggaagtatggctgtagtttgggaggaacatggactaggcacaacacgagttttttttaaaggggatatttggattctgcccctagtaacctcttacttacgtagtaaatagattgctggtgcttgcactcttctcgcactatagctgcactaatcgcatcttccgagatggttaaataaaaaaaataatgtctctctagttagtggttttgccaaaattggaggcgttaggagatgccattttatgctctgaaaggcttcttagcactattttgtccactcaaactttttgttgcctcgcaatatgttgaagaatggcacacacttatcagttgactttaaaatgaacctgttaagtgccgccattcatcctgtcagggcctgtacttccttaggctttgttggggatggaatgtctattaatgccttgatttttcaagattttcctcaatacctctctccttaactatgaatccaaaaaaatttcctgaggagactccaaaggaacatttttttgggtttagcttcatgttatacttttttaatattttaaagcattccacgaggtctgaggtatgatccttactctttatcaatttcaccaacatatcatcgacgtagacctccatgttttcccctatttggattgcgaacatttcgtttactagtcgttgatacgttgccacaatgttcttcagtctgaacggcatgattttataacaatagagtcccatgtttgttatgaagcttgtatgttcttgatctgggacgtaaattttcatctggttatatccagaatatgcgtccataaatgacataagctcgtgcccagcagttgcatccactaactagttgatcctaggaagtagaaaacagtcttttgggcacgccttattcagattggagaagtcaatacaagttgtccaagttttgttaggtttcgggacgagaacaggattggctatccacgagggataaaacacctcgcttaaaaaatcatcgactaacaacttgtcaacttcctgttttaatgccccttgcctctcgaaatccagcggcctccttttttgtctttttgccgggtactttggatcaacatttaagtgatggcagataatcttagggtcgatccctatcatatccccatgactctaggcgaattgatcctggtttgccttcaaa

SEQ ID NO: 101708 - DNA, 533 bp, Cannabis sativa
atagctaaattaattttatatattgctttgttttaaaaaaaaaatcatataataattatccaaactaaaaaaaaaatatttatttagtttggataattattatataattttgtttaataaaaattatttttcaaaatatttgaatatcattaaaatttatgagtaaattaaaaattatataaattattttaattttaaaaataacttctccaaagtctttttgagacaaattctaacttttttcaaaagaaaatttaaattaaaaaggaacttttaattttttaattctaaaagctagaaaaaaacttattgaagctaaaccggataattttaaaaaaaaaatactaactatttttttaataataaataaataatatattctagtcacatgcctattttatttttaacacattttattgataatattttttaatttttaagggaaatttgacaatatatgcttaaaaataaagagtacactaaaactatgctagcattctttatattatgaaaactatacttaaaacatttat

SEQ ID NO: 101709 - DNA, 1246 bp, Cannabis sativa
attattattattattatatatgtgacatttaaagtattttttatgagaacactaaggctaaagaaacaagtcaagttccagttggcccagtgatgagggtgcgagccaaaagattcaaagaagaattcaataacttagtcaacaaaattttaaaataagaggagaccgtggtcaacactaaaggagagcaaaaatttgtccttctcatcaaagtagactcaatttaaaaatctttgtggctgatcacatttttcaagacaaatagcaacattccttttatttttgtttcatttatttattttttattttatttggaaaattgtctttcttttagttttcctttttcttggttgtaagttggctatataaagccttgtaaacactttggaaaatcagattattttttaataaaatttcgagaggttttcttcttgagttattgagagaactattcaaacttatcaaggagtatttcttgtggcgttcaaccgacttatcaaacggacttccaccaccgtttgtggcatcttcctttataccaaggttcatgcttaactaagcattgggtcgtggttccacatctaaattttgagaattcttagaggttgccatatttggtgtgggattttatcacaattgttggtgtggttcgtatcatttggtatcagagcttaggatcatcgggtttggcctatctatcttttgtgtttttttattcaattcatgttctatactcttgtttaacttgtgttctatattcatgtcaattcgtgtttcatatcctctatttttttctttgtgaaatccaaaactgttagtttcacatctaataatttttgtgtcaaaatcgtgtctttgctgtcattagtttcccttaatttttttctccttaaaaattcaaagttttataaaaaaatgaaaattcaaaattataggcccataatttgatttcttgtttccaaatttttattgttttcattagttttccttatttttttctagcaattcaaaaattcaaaaactccaatttgttattgctgaattttttgtttctctatatgtgtcacaaattcgtttctttttttttttttttttttgtttctcattggtttcccaaaattgtttcatcaagcttgtgtacttagtttcctttttttttctttgtgtcattagcaagcaagaaaattcaaatttcttgaaaaaaaaaaaagaaaataaaccggagcataaaaaaaaagtcttaaaa

SEQ ID NO: 101710 - DNA, 890 bp, Cannabis sativa
tgcgcgaaaaagggcaattttatttgccattttttttcaatcttttcaacttttaaaaattatttttaatgaaataaaagttaaattttagtagatttttgtgtagaattttatttttcaaatataaatctaattatcagattaaaattaatttttattaatttaaattgattttagatattaataggttttgagtttaaaaaattgatttgtcaacaaacttgatattttggttattttaaactttgattattttttttattttatttattaattttaattataagatgattagttaattaataaaatatgaaatcacattaaaatatcaataaaatcaatatatttatatatatataaatgaaaagtatgaggcggtgacatgacattttaaaattattctaaacttatatcttctctccataattctcaattttaatattttattaaagcataaatctataaatcttactactataaaaaaaatcataaatctacaaattatattttactattattttaataattttttttataaaaatataaaatatcttaaaaaaattagaaaataaaaaataattccaaacaaaaaaatattaaaactgaaattaaatataattaatcgtctgtcaatcaatttaaaaaatattccaaaaaaataattattatttatatacatacataaatttaaaaaaactataatagtctgtcaatcaattttcaatcaatatatataaaggaaaaatatagggtggtgacattaaattctaaaatcactctaaaactatttttttattctctccctaattttctcaattttaatattttattaaaacataaatctacaaattgatattttactattatttcaataatttttctataataaa

SEQ ID NO: 101711 - DNA, 1057 bp, Cannabis sativa
ccacgggtagagtgaaaggtgtttatgagggtgccatttatggatagtcgaaaatggacagtagacagacaactcattataggagagataaaagatgtaggaaagccaacatgagtgagcaattgatttaggaaggaccattcaaccctatcaaaagccttttccatgtcaagcttaatagcagcccaacctatcttccccgaacgtctagaatgaatggcatgaataagctcatttgcgataagaatgttatcagtaatttgtcgcccctgaaggaaggcactttgattgatactgataatggagtgaagaacaagctttaagcgattagcaataactttggataggcatttgtaaagagtattgcaaagactaatcggtctaaaatcacggacaagtttggggtttttcttctttgggatgaggacaattatagtttcattaatttgggagatatccccctaatgggagaatttggagcatggctctggtgaaatcattcccaagagtggaccaattacttttgtagaaaaaggagttgagaccatcagcgccaggagccttatcacccgaaaggctaaataaggcttgcttaacctcaatctcagtgaaaggttcgtcaagataagcaacctgctcaggggaaagcctgttagagatcccttgaagaagagagttgacctccatatcacacacaccttgagaagtaaaaagagaagtataaaagtcaagaaattgggagattatggtagtagaatcatgggaaatggatccatcaggaagagtaatttggcgaatgagattgttctttttgcgagtagaagcacgttgatgaaaaaattttgtatttttgtcaccagcacgcaaccagtctactcgagaacgctgtttccaataaacttcctccttgaggagaaggtcatccaactgcgattggagagaagcagcttgagaggtagactggagggtcggttgagaatcattcaacaggttgtgaagatccgcctatatacgggatatttgaagcttaagaggatgttgagatttactccaagtc

SEQ ID NO: 101712 - DNA, 1390 bp, Cannabis sativa
  modified_base (229)..(229): a, c, t, g, unknown or other
  modified_base (1221)..(1222): a, c, t, g, unknown or other
  modified_base (1321)..(1322): a, c, t, g, unknown or other
gaccaatcccgacattcccaatatctaaataaccgtcccacaatactaacatgctaagttatgattctactgagccaaacaccgagtttcatattgccggataccgataatgcaaaaatatgaaatctcactatatgacataaaaatgcattctgaattctaaaataactgcataaataattatttaaatatctataaataattttataattaactgctaatttccaanttaaactaagcggtctttagaggtatactgtattttggcattttattacttttatactgccatatggtagaaattacaaaaatattatacatttatactgtcttttatactgcccatactgccacttgtcattttgcatgcctttctctatttttttttttattaattaatttttttaaaaagttgttgatgtgatgctcatggtcaaatcaaagtcactcaatttgacatgtttaaacatataaacacgcaagatggtccaatataccaaaattcacatgttcacttgtttgaaatcaagtccaaagtttaccaaaagtccacataatgacctataattttgagttttcagcaagtatagttcatataggtcaagaatcaagaaattatctcatctatgcatataaatatcatatttggaacgaatatgcataaataagtaagcaaagagatatgaaattttcatagctattaaaccttatatatcattcaagttggtcatgcctagatctcttctaatgaaactaaatctctcatcactaagaggcttggtgaatatatccgctaattggaatttggtgctcacaaagtctagcataacatcacctctttggatatggtctctaaggaagtggtgcatttatgcttggctctagaatgcaatattggattcttagagaggttaatggcactagtattgtcacactttatggatgtacactcaaaatcaatatcgaaatccttaagagtttgtttcatccaaagtatttgtgcacaacaactacccgcagctatatattcggcttcagttatggatagggctaccgggttttgtttcttgctaaaccatgacactaaggaatttcctagaaagtgacatgttccactagtactttttccatccgtcttacaactggcaaagtcggcatccgagtagcttactatttcaaagtttgagttcttatgataccaaagttctagattcattgtgnntatcaagtatctaaatattctcttaacgacactcaagtgggattctttgggacatgattggtacctagcgaaaagaccaacactaaacaaaatatccgnnctactagcggttaaatataataaagagccaatcatacctcgatacttggtaatgtccacattcttacc

SEQ ID NO: 101713 - DNA, 556 bp, Cannabis sativa
aagctatgaccttggtttagtggcctgagaatcaaatggcaagctagttgagaatcggacacaactggttcatggtgtggtagaactgatcctagtagaggccttacagattaaagaagttctcatttggttaaaagaaaggaagtggcaacgagttaatgtgaaattaaattgtctatgtgtagtacaagctttacaaagctctttgaatatgatttctttgtttgtaaaagcttgtttgattctttgaaaaatgttattatcttttttgtttaaatgatctgctaattaagtagcatgtgactttgttaaggttgttattttattttctgatcgttgattcaatttgaagtgtattttaactaatttatattttatttgatagttgaaattattggttagtaaaattgaattctcattaaaaaaagatatatgtttataaaaatatattattttaaatttaagtagtgagacattaaataaatttgagatatattttaatttttgggatatagtaaatataacattaaagaattaataaattgttgaaatgaag

SEQ ID NO: 101714 - DNA, 674 bp, Cannabis sativa
tttttttttttgacatgaacttgaagcttcattgatagaaaatgcagtacaaagcaaacaagtccttacaaggaaggtaaagaaccattccataataactgcctgtctaatcctaaacccagtttagctaaattatgagcatgagtattatcatctcttctaatgaacacaactttaggcctaggattaaaggacaaagagttgtaaacatcaattaaaacatcatcacaaacactattattccaattacatttattaatcttatcaaccacaaccttacaatccaaaaacagaacatgaacaggtagattaatcattttagtccaagccactgcaagagaaacagctttagcttcagctataactggagcaattaatccagcaactggtttcaccaacccaacaatcacttgatctgtatcattcttcaccaccacacttaagctaaaaacctgcttcccagtgtcaatggctgcatctgtgaatacctgatacttgcctggaggacaccaatccatgaccgaaggactctgatcaccctgagaagagggaataaatcttttcagtcccgcatccaaatactgcaaaagaaaactttgacagcaagcaaacatatcctttggatcaagagtgaaccgattaaagaactgattattcctttgattccaaatggt

SEQ ID NO: 101715 - DNA, 525 bp, Cannabis sativa
tttacaaataggtaagacaaagcttgatacccactaggcagaaaaccacttattctgtaattttaacatgttcacaaatgtcactcacttagaaaacaatatgagatggagaaagagatactctcactcacttttccatgaagatagaggtggagtttcagactccttccaagttcctgcggaaaagccgtacctgtcacccttcacgacatctgctgaagcataagattcaagctcagccatttcctctggtgtcagtttcactgataaggctccaatattttggttaaaattttcaatcttggtagttccagggatgggaactacatcatctccttggtgatgaacccaggccaatgctagctgcgcaggagtgcatttctttctggcagccatttcattgactttctcgaatatagtcttgttatgttcaagattttcaccttgaaaccttggaagatactgcaaaagaagaaaaacaaaatcaaaaacagaaaaaaaacttaagcacctgcattgaaaaat

SEQ ID NO: 101716 - DNA, 1360 bp, Cannabis sativa
aaagaaattgaaaggaagttcatagaagatgccacatcatcctccccaacaaaagaattataaagatatatagattctttctctctctctctctcttacaaaataattaagaagcactctttttatattttcttttttatctttaacatgattaataaaagtagtacatttattttggatgtgttgtactttattcggagttaatttataaataatttgcatattttaacaagtttgatgcctttttattttttttgttgatttatagttatctctttgttattttatagttattttacagttattttatgttgtgtttaggtgttctgtagttggtttatagttattttttttgtttttttgtttatgtttttattttatacaatgattatttagtttatgtgtattttttattgtgtatatttttagtttattttaaacaatatttttattgtatatatatatgtatttattttgttatttttttgtttatagttattttttttaactatcactaattaaaaaaggaaaagaaaaaaaaaattgaaagagtaaacttaacaacaaattccatgttaaagcaaaaaataataaattccatgaaaaaacaatgtaacagtacaaaaagataaattaagtaaaaaaaatttgtaatacaaaaatatattgatgaattattttgcttattgtaattaggtcaatattttgttattttttagttattttatatttttgttgttttcatattgtttttttttgaaattctacttgtttttaaattttttttgagttttttttgttttttactagaaaatagtatttttataattttaaaaacagtattttaataaaattggtacaataaaaatgtaaaaaaaaacttttcttcatcttaagttttttttttttttttggttaattttggaatatgcaatgtattttcattaaagataatacaaaattttatatagaaagaaattatatatatatttttaagcacaaaatgtgggaccacgacgacacataaatcgaccgttgcaggccgagacacttgttgagagagcaaaggcaagtaacattcaaatttcaaaaattcaaaaaacctgccataataaagaaacaccctttctttctctccacttttctcgtaatctcagctcttcttggattttgagctttcactgctactacactctccactacttgtactactactactacaccatccttccacttcaaaaacactcaaactttaagtttaacgctctctttctttcgttctcgctctgtgtcttcttcttcttcctccatgtgagcttgatcataagcttttgttgttgttttcacgatgagagaagaa

SEQ ID NO: 101717 - DNA, 613 bp, Cannabis sativa
gtgagatcaaaaaaaatacttattaatcgaaattattaaaattctaacctaatctcgaaaatagtgaggcttttggtaacaaaataaaataaagtgtaacagtatacatgacaagtaacaaatatttttaatggtatttggagaaattgctaagatttcagaatccatctaagtataaataaaaatatttatgattatattgattctcatattttaattagtaatcaaacttattattttttaataaaaatagattttccttcactttaaaattataacttctaagcattaaatgtgaaacaatttaatgtaaatacattaaatattatttttaataaaatataaaaccaagcattaataagttttaactataaaaaatacatgatactaaagatgaaagaaattattcaaagaagcaaaaattataagcatatattatattgagaatcaaaataaaaatatatttaattaaatacactaggttttattgtccaccttaataataaaggaatttagaaacccataagaaaattaactaagaaaaagaagtaaactaatactgaacgtgtgttatcccgaaaattagtaaattgattaacaaccctaattaaaa

SEQ ID NO: 101718 - DNA, 782 bp, Cannabis sativa
tgttaagtttgttagattcagttgttgagttggttagaaacagaatttggttagttaatagttagttgtaggatcaagttagttatgccagctgtaactaagcaccagctactataagtagcttaattgtatctgttttcatagctgatcaataaaataacagattcagtctcttttccttctattctctctattttctttctgccatggatttgtgaaatggtatcagagccaccattgttggttcggcttcatcttcatctttcttcttgcttctgtgatttcttatttcttcttcaatggcacgtggtggaggagctcaaactcgaaccaatcgagatgctgctaatgcatcaaatgactcgaacaggtactctgttcttggagagaactcaagatccagcactgccaatgatttgtcaaatccattttttctttcgaatggtgataatccagctacagttcttgtaccaaagatcttaacagggagtgaaaattacagtacctggagaagatctatgatgattgctcttgttgctagaaacaaaatgaagtttgttaatgggaagattccacaacctgatgaggatcatgaggattttgatgcttggtgtcgatgtaacagcactgtaatctcttggatacttcatgcgatctctgctgaaattgctgacagcattatgtatctagataatgcagctgagatttggtcagagttacatgaaagatttaatgaaaagaatgctccaagaatttacgatgcaaagaagactatgcagaat

SEQ ID NO: 101719 - DNA, 601 bp, Cannabis sativa
aattacaacttaggtattattaccgccaaaaattaaacttaattatttatttgcaacagagagttaaacttaggtatttatgccgtaaattttttttcatccacatgcactcttcaaaaaagaattttagccaccaaattcctcgattaattttattgtatgtgttatttgatgttggcccccctactatccagtcttggctccgcccctgcttattaccaatatgagatgacgtcttaatcagtagtattgagagtcaatactattgtaccaataatagtataacacatgttgatagtaaaaattcatcaataataaaaaataagaagatatttaacttgctgaaacttaagaaaagttgtagagcaacaatagtgaaaattatagtatcgtattataaacttctaagttagggttacacaaattttctaatccctttgaatgaggggtgaagttctatttatagaggagctctagtaagtttacatgtggtcccggggaacaacctagtacttagtacattcattagctgtagaggtcaaagtagtggttccatggtggtggttgtagcatattcttggtcaagtataccagatgctgc

SEQ ID NO: 101720 - DNA, 1552 bp, Cannabis sativa
atggtgttggacatggcagcattcttggaggcagcagacttagttcgagaataagtctaagccatcttcagaccagtttgcacagaggaaaaacgttagaatctaagccaagtaaagaaggattagaggaaactgtcaggaaagactcaccctcgaaactcctttaggactcctcccatcaacagctccagggaaggctcgatgtcagctccggctagctgctcattcacctcagggaccaaccgattcatgtagttggtgagcatctccttacctcttttggtctccggatgcagtgatggaggttggtaggagcctggatctgctcagatccgcccttccactgttcaggcctgtccgagctccctcctcgagagaccttgaacttagcagtttttagagcagaagggtccacaacggtttgctcctcgaacagatcgatatcagcttcaaccggtgccttctctctggacgacgttgtctaactgcccctagacttcttggatggaggagatgagcttcagcttcctcccactctcttcttcaaagcttcgaccatcttctgagacatgtctgcacgaaataaaagcaacatggttataaaaagccttagaagtatgaaagaataataatcaagaagattaaaaacaaggcggagtatgttgcgaagcattttgcccgaccaagacttgaaggctcatcatcacctgacaaatcccttatctccgctaggacgacttttccctttcctagtactggggtggatggccgagtaggtagactgggctccctgattagaattgcatgttcgctaggcttatgctcggcaggaagattcttcctccttttgagcgaagtcacctgctcttcctcagcctcatcttcaggatcccgaggctcatgagcatactgttttgcccccgcacctcctttcaacttagcctcacgcttaagttgaatcagttcattcacctaatgatctccctcagcccgcccaacacgagatttcctctttttctccttcacaggctgagggattaaatccttctggtagagcccatgctccacaaagttgtcctcaaaggtcaacaaagtgatattccgggcagcacccagcagctgagcaagcctttgagctctatccctaagagcaagtgtgaagggtgggcggtgatatacagggaactactagaaccgagtgtaggtgcacccatgccagccaccatgaaatactcgtcaacaaaatgtccaaccacttgtagtctagctgagagaagtagaagtacccgacctgccttgcttgggggtggaattcaagtgaaagaaccagctaacctcatggggagagggcatatcccacttcttggaggcgtagagaatgaacagggcagacagagacttaatgcctttggagtgaatagggtcagacagaggcagaagaagtcagcaaccttcctcaagtacggaagcaaaggcagcaatgccccttgtttagcatgagcacccgaccaggcacacatccccctctcagggtttgtggctcgattattat

SEQ ID NO: 101721 - DNA, 886 bp, Cannabis sativa
taacgaaaccgaacggaagacaaaagacaaaagacaaggcggtggcgtcgttgatcggtgactctggccgacgtggaccgaacggacgacgacccaccggcgacgctcctggactcgactcccctgtacggttatggcaaaagcttctcgacttctcatccctcgactcggatcgactcgctgtagggtttctctcccctccgtattacgtggtcgatatatcttattaatttcatgaaaatattaatttttttttaatttattttaaactttaagcctattaaatgtatatttttcaccattaatcacaacccccaactagcttattgctagtccttagcaattcaagcgaagaaaaataataaacgagttgattaaacaagtcaaaccaagcaaaactatccaagcattttcaaaatattggtagagagtcaaaaatttctatcaatattatttaagttgtaattctagagttgtgtgtgtgcatcaaacttttatttatttttttaagcattaacacaaatagtatcgaaaaatcttaaaagtgtaaaggtctcaactccaatttcctcacgggtattgaaagtacgtatttgcattgggagggtgacactcttttggagttagaaatgtagcaattaacgcacaaatgagagaggataaattttttttagggcaaacaatttgaacaagaattgataacaagatagacaaatcaaactaatagaattcaaatgacaaacaacctttgggattcatatgaaacacttacaaattaagagccaaagaactaactattaaaatagaaaagtacaacgataaatatgtatatatatattttttatttttttatagagaaatatgatatttctctctctctctctct

SEQ ID NO: 101722 - DNA, 621 bp, Cannabis sativa
tactaaatatgtttttcataaaaacacaaggtactaaatgagaatattcccaaaaaaaaaaataatgttatatttttaacacttcttaaaaaaaaatagttgattaataatagacagtattccaatttcccttcactatcaatatttgctagaaaatacaacgagactctaaacttttttcctaatgtgaaaaattagtcaaagctgcaatcatagattgtattcaaaatttttgaatattatctaatataaatagtactttatgaataataatcaaaacactaaatgcacgtcaagaaattatttctttaaaaataaaaggatattagcagcaaaactactcgaactttatgttttttaatacttaagcacaaaaattaaatccaaactcacatattgttttgctctttaaacttccatccaaaatcctcagttaagtatcacggtggactgcctacgtgtacacaaaagtacacgtggtaaaattttaatggtccacataattttaattttaagtataataaaaataattaaaaaattatataaaaaaatataattcataaaaatttaaaaaaaaaaaaaaattcctcgaaaaccaagtaaaaataaatcacttcaata

SEQ ID NO: 101723 - DNA, 548 bp, Cannabis sativa
tgattaccaaaagtatacaattgtgatgagacagtatgtatttataaagttagggaggagacttagctacataaccctagttagaatggacccactcatcaaaagcttttgtcaactagaaaagcccacacttctgcttcacctagactttacatacacagatgctaagatcaccaataatatgagctaaagcaaagaactatctaatcaatccatgttttaataaaactaataaaatttaatgtaaatccaaataaaaatctaacaaaaacgtcttttattacaaatataaaactcttagcatttatttacacaaattatattttaaataaatgaattaaaaataattctttacatgtatttgttatcattgcctcaatcctttaggtatgatcattaatattttgcattatctacactattgagagtgggataacattctctatataattaaatcatttcaatatctaatgagatgaaatgtattgtaagaccaaaaaaaattacacaatattatgaaagatggaaaatgagaaactatctaatgt

SEQ ID NO: 101724 - DNA, 810 bp, Cannabis sativa
gtgttctatgttatatacaaatagatcttgggtatattattaattttctaacaaaagattatattgaaatgggattttatttagggcataaaacccaacaactcaaccatagcagaaagtggaactggactcagattgcttggtagtagtacaagctattcaaaattcattacctatgctatctttttttggagttattatagaagattgtcataaacttcttgcatctttaaataataaatctttgttttttattaaacattttgctaacatagttgctcatagttttgctagagcatcttgttcttttccagattgagtgttcaatatgggtgatgttcctgttgagttacaatcttgtattttggctgatttgacaaattaataaaagttctatattaaataaataaaaaaaattaatatacatacttttttttttgaaagaaactatatatgaattcaaaatgtaaaaattagacatcacagtcattacataaaatatttcatggtatgctagatagatcaaacataaccaaaacgattgtgagcatacgctcacttagttacattatgggcaacaaagttactagttctcttaatactagaaaaaatatagctcgaaagcaaattagaaattctacaataatgagtacagtagttctcaatctcccatctagaaaggactccattaagagctttgatcatagttttgagtcactccacaataacaaaaagattttcttgattgagagttgtttccaacgccgaaagacaagttgtagcttcacctttaagagggtcagaaaattg

SEQ ID NO: 101725 - DNA, 589 bp, Cannabis sativa
aaaacaattatgataatcacttaatgtcgaaaccttcttatgatctacaacattataattaactaaaaataataaaataacaatattcaaaaccaaaattatcatattcatgcctttcaatatatacttttgtatatcacatgaatagtcaactcaaataaaattaaaatatgttgatgtgaatactcatcaatgataaaaagcaataagaataaatttacagaaatcatgaagccacatcaaattagaaaaaagaaaatttgaagctaagagatgttaagaaagagagtgatatattttacacatcaggaaaaaaaattaaagtgatgcaaacttggttaacggtggtttggtgttcactggtggtaagaaaatgagtgatgattaacaaaaacatcaactgtgactgtgagataggtatatatatacacaaaaataacaataatgtgagagtttaagagacttcttaaaatgagtttgagacaataagaatggttaattactttctaacgtccaatttaattatatgttaaacaaccatattataatactattaatattccccatatatatggactgtttaaattta

SEQ ID NO: 101726 - DNA, 1634 bp, Cannabis sativa
  modified_base (68)..(70): a, c, t, g, unknown or other
  modified_base (205)..(217): a, c, t, g, unknown or other
  modified_base (1149)..(1149): a, c, t, g, unknown or other
aacccgaaggagagaaaaagatctaggctcaaatcttaataatactttgcgacagaaaggaacaaggnnnagagatctgagcagaaggagtcatgttattttgttgaaaccaatgtaaggttttctaaactcttatgtatttaatttcattgttttagagatattcatattcaggatgttaattcaatatacttgttagtaaatnnnnnnnnnnnnnaaatattcccaacaactggccttagagccatggtagttgttatacccgaaattcggctaacacattagaggaggacacatgtcaagctgggaagaatatgaaccaagacacgtaattataattacacttgaggagggataactcgttaaaagcaaaattgacagagtatatttacaacttggttgactgaatagtcttttgtgagataaagatatacaaactgttgccttgtgcatcaacgagaaaccatgtaatttcaggtgtataagacgaggcactaacctctttacgcggacgaaatataatgactaatgagacacttaacgtataatacacggtaacatagacgtataagcacatacaactattagcgaggtatccctctcgctataggaaggcatgctcgcggtaccttcactaatcaactccaggcatctttcaatgagattcacagttccgtcgagctagttctctcagatagaagtttccattcaaatgatattgactactgaagttcacctcgtcaccaagaactgcgattgtcagatggagtgttatgtcttcagagccgaagcgacgagattcacattatcaacctcagaaagatatgggaaaagctccagctcgctatcaaggttattggtagtgagttcctatcgagacatcccataatattatgatttataacgtgtttaatacacgtttactttgacctagtaaaagcagactaatcacagttgtgtgatattcaaatattaattgcatttattttacgtgatatgtaatcaaacccgatgattttaggggatacttgttgtaaagatatcagtcaactctgaaaaagggacgaaaaaattcataagagaaagggccctaaaacactatcagaaatctaataagattgactcttggactatgcagaattttaactncaaaaccacgtaaaaaaacctttgtgttcatacttttttctttattgttcttatttttcggtgcaagtttatcactgttaaggctcatatctggttaacgaaaatctgcgttaacagtttcgtgctttcattgagagccttcgtgaaaaagctcagaaaaaatcctccttatataaaaaagaataatcctctttatggttgacaacgaagaaaataataaggatcttttgacttatcatttgaacagaccacaagctccgggaaaacccagaatatgggaatcgggcttgaaaggcctatgataaacaatggcaggtctcttcctaacctagttgatgaagatgacgcctatgatccaacaaagtatataccgatcgtcgatatcataaacttatcgttatatctttctaagtcaatagcacttagttgatcttagatcagtagagcttaatcttgagatggttaggttcgagctcaactgtatt

SEQ ID NO: 101727 - DNA, 899 bp, Cannabis sativa
ttttctcttcttagttcttgatcacgattgtaggtgattacaggacatacaacgacaattccacatatttctttcaacactggacatcgatcgacgtgaagatttaaatgcccagtccctttattttttcctgtcgccatgtgcctcccgcagtgattacacacttcttcaatatattgtcaatcatttgcaaagtaaagtaatccaccgcaggagatcttctcattctcttatttgttgtccctccactctgagtttcatctattctattacaagactctacttcttctgacataacaaattcaacatccttaaaaattcatttggccaaacatataaccaacttctttgtcttaaaatgttcactgtctcctactaaatttaacaatgcttcttaaaattaatataaaacaagcatattgtagactttaaatataacatgcaattcaagtatttttgcaacaaaattcaactgaaatgtgtagagttttttttttttttgtcttgcaaagattgtaaatttaggccgacaacccatataaaaatttaagtaaaaattgagattattgtatatataataataaaaaagttgtacacaaagctttatgaatgatactaatctagttatataatttacaataatatttaatttgttgctaaagtatgatatactcacacacactttcctctcaatagtggtgagagcatgtatacttatttattttcaaatagatatataggtatatacgtatatatagatatgttacatgtagagtggcatgtaattaatccatcattaacatttatttaccattatgaaatatgttaactatgtacctatactcagaatttttaccatcaataacttcttagctaatttctgcaaattccaaatgcaa

SEQ ID NO: 101728 - DNA, 803 bp, Cannabis sativa
tccgagatggctgcgatgcactgctaaggttgaatcgcagttcgccggaggtagaggaaaagctctctgctcgaatggagattggggatctgaaaatctcgccacctcttgatcgggcaatctgatcgtcttgcgtgtacatagaagaaggtgatgctagtggagtgtttgtggatcgtaaaatggtgctacgagagattgtgttgggtgttaatggtggttcaccgtgggaatcgattcacacgccgctgaaagatcgaagatggatctttgatcggggacgtcaatggatctttgatcgaagacgacgaacgaactttgacgaagatgaacaaagcagaaaggtcattggcggacgacgagaagcttggtcgcgtcggatcgcagagagcgcaatggcaaacagagttgacgacaatccctctgtattcactggtttgatatatatatatatacatgtccttattggatattttctgcaaatgttatatacatatatggttcaaattagtaattgtgttaaagatgaagcttcacattaaggaggtcacgaactcactgcttccaactaaaaaaaaaaaaaaaactgatggctaggattgtggaaaggaagaagactgattgccattggtactgtgggcttgggctttgcttaaaagtctactaggctaaaataatcataattgggctgtaattgtttttttttatttttctttgtgcatgtttttagttttcttttaattttaccaccttgagaacaaggtgattttgaagggtgggaaagtgttacactatgaaatagt

SEQ ID NO: 101729 - DNA, 783 bp, Cannabis sativa
  modified_base (738)..(747): a, c, t, g, unknown or other
gcaagaaagaaaaattatccatatgtatatgagtcaaaagcaatttcagtcatatttctcaaaaaaaaatttactcatgttgatatcaaataacatattcaacgatcattattgtggctatgtgtatatatttaaaaaagaaaaaactgtcaaagtagcgtccaaatcgtggcatgtatatatatatatatttttttttttgagaaaaatcactattattataaatcaaccagaatttacaatagtagtgaaaataagatagagaatttttcctatccaaacaacgtcttgatccaactctaaaagcatgttttgtcaaaccatgagcagcacggttagcatccctcttgaacataagaaataacaactttagagaaaaaggataaaagacaacaaacatctaagattaaattcgagaaactagataaatctgtagatgtattatgtagagcggtaacgactcggagtgcagccaattcgatatgagtaatgtgtagttattcatgaagcacccaactgagactgtgaaagagagctttcgcttccaactcatttgatctaaaacaacctttcactggctttgaaaaggcagcaatgatacaaccgtatggtctcgaattactgcaccaatacccagagtttttgtagttgagttgagagcgacatctacattcattttgaagttagcttctgatggtggctgccatagagaaactgctggaaatattttaccaggannnnnnnnnnctaccatgtatgtttcattaacaacctaatatgaat

SEQ ID NO: 101730 - DNA, 1057 bp, Cannabis sativa
aagaagcccaatttgttatttctttgtgagactttgtgtaataagacaagtatggagtttattagagtccaattgggctttgatagttgttttgtagtagaggcccgtgggcatagtggaggttttgccctattatggaaggattctgtgatgtggtaattcagggttttcttcttttaatcatattgatgctactctcctccaacaattgcaacactgtgttcaatggagatttacaggagtttatggggagcctagaagagagtttcggtctaacacatggaatctctttcgttctattaaagatgcaagcactcttccctggtgtctcatgggagacatgaacaacttaagctctcatgatgaaaaacgaggaggtaggcagtatccggatcgactcattgacggattcattgcagctttggacgattgtaatttaatcgatctgcccttggttggttgcccttttacttgggagaaaggaaggaatggtgataactgggttgaagaaagacttgacaaagcgttagttacaaacacatggctatctttattctcgtagccgactctctataatctggaagtttcaacatctgaccactgccccattcttttggtgttcaaaggtgtgcctcctactgttccttttaattcttttcgctttgaaaatgcctggattagagagccattatgcaagcaattagttcaggggtgttgggagggatcgggttctaacaatatccaagaaaaaataaaaagatgtggggaggtgttggggaagtggggaagggagatcactggggacttcagaaaacgcattgataattgtaagaagcagattaggaattcgaaatggggtagggaccagagctcaattcaacaacaccaacaagcaaaagccaatctttctgaggttttggctcagcgagaagccttttggaaacaaagatcgaagcaattttggctaaactctggcgataaaaatactaaatattttcattccgttgcaagcactaggaagaggaataatggtattgggcaacttaaagatgaaagt

SEQ ID NO: 101731 - DNA, 539 bp, Cannabis sativa
aactttgcaacttaaaagagcatgaaggaatgatttggaggattttaatcaatcacttctagctaaacaaggctggaaactcatacaaaatccggactgcttgcttgcaaaagtattaaaagctctctatttcccgtctgaaagtttttttgaagctaaacaaggccattatgggtctacggtttggagaggcatcctttggggaagagaacttttacgaaagggtactaggtggtgtgttggcaatggaagtaagattcgaatcaatgaagatcaatggctccctagaagccaaccgtttactcttcggagcaaggttcaaatcccagctgaggtaacgattaattccttattgcaaccagatggaaattggaaagaaaatgaagttagaagctggttccataatgatgatataccctgggtgcttggcattaaacctgctataaatcggtcggattggattacatggagtccatcccctaatggtgtctactcggttgcaagtggatacaaacttcgcttccaaaatccgaatgtag

SEQ ID NO: 101732 - DNA, 741 bp, Cannabis sativa
  modified_base (415)..(418): a, c, t, g, unknown or other
agaggttattcttaaatagagtatcttaaatagaggttctactgtaactacattcattcatctcgccctttacataatggagtagccaccacgaaaataactctacgatataaagaatactgcgataagaagaatatctatacttagcgttttttcctccaaagatggagaagaaggaaaactcacattcagcaaaaaataaccttcttagttagcataatcgtttaaaggataaagacaaagagcagttgggtagttactagatattatcccatttgcatataaatgaaacgtgggggatgtccacgttttatgagcaattgtaagtgaatagatcccaataaaaataactgtcatcatatacacctataaatagggacggaatccaaaaaaaaaagggacgacaaaattgagnnnnaatactattatttacttttattgaattgtactttgtattcaaataaatattcctaataagaagtagagtgtgtagattttaactacaaaaccacataaaatatctggtgtttatttattattattatttaattctgtagtaaatttattacgtaaaaggctatatatttagttaacaaaaatatgcgttaacaaagtagtgctttcattaagagccttggtaataaaaactcaaaaaaattctctccttataaacacaattacaaatccataccaatggcagataacattccacacgaagaagtcatccagaggaaactaccc

SEQ ID NO: 101733 - DNA, 701 bp, Cannabis sativa
gaagtaaaagtttaatttcaacgtgcttaactacaatccctgtgggattgacctcacttctggtgagtttactacttgtaacgatacgtacacttgcgtgtgcaaaatatcacaacagctattcgtcctaattttaaaggggtgtctcattttccctgggttgttcttcccgtgccttttcctctctcttggtttgtgagccacgaggtcttcctcgtggtcttctcactccaagtttaggttaattgtgggtattcgtcccctgtgccgccctagctgaggctgcctcacgttctaactcagtgtttcaacgctgcgcctcttccaaacgacgtctcaggcggcagcttttcgtttcataagttctttctcccacagattaggcacctccatgattaggctcttcatatccctcgtcacgagattctgaccagtcctacgctgaattctcctcgagcgtgttgcccgcgtactaggaccaacgtcaggtcgagttctctgggaacgtgtggtccgtgcgctggggccaccctcgggttgaaccctcctggaaggagtggtccttctggactgtggattgggaggtcttttagaacctatgcgctgtttcccagaacgatgattggtttcctcatgtggggtgttaacattttctggattttcagccatgaaggaggttgtttttcttcaaaaaaaaaaaa

SEQ ID NO: 101734 - DNA, 572 bp, Cannabis sativa
aataaatcacacacgtggcgtccttatagattacggcgttacagaacggctcctctcggagttggtgttggatattgttttaccatgatctagatttactaacatgtatgtttgattataaatctataatctaacatcctaaatatataggatatgaatttcctaagacagtaagataaatacgaaaaagttaataaaaaagcttacattggttgcagcaaaattaaatgactcattttgctcagatatctaacccttgatcctttctgtcgtagagtatggtcaagatctgaacctgaatatacctaaatactctttcagttgatggaattttacacaatcttccacactatcttgactttgtgttgaattgtgtggagattcctcaatcactataggctttgaaaatatgaggaagagaggaagaaggtttcgaatgaggatggtggctcttttctattttctattttctctaacaaagtgagtatggtaatgaatgagaaaataagagccatcataatctatatggggtagcttctagggagggttagaattaaaatggaattaaaaaa

SEQ ID NO: 101735 - DNA, 634 bp, Cannabis sativa
ccgaagcttaattggaggccttcaatatctttgcaacacaagacctgatatttgcttcgcggttaacaagcttagccaataccttaaggctccaacaacagtacattggggggcagcaaaacgaatacttagatatctcaaggggaccatgaattacggccttcacattcagtacagcgacaagctcaaactcacaggattttcagatgccgactgggcttgttgtgttgatgataggcgatctgttggtggatactgtgtgtatcttggtgaaactcttgtctcttggtcatccaaaaagcaagccgttgtgtcaagatcaagtacaaaatcagaataccgagccttagcacttgctacagcagaaattacttggctcgaatcattgctcaaagaactggaatttcctttggctggtacatccataatttggtgtgacaatatcagtgctggcgctcatgcatccaatcctgtctaccacgccagaactaaacacatcgagcttgacattcattttgttcgagacaagatcctgaagaaagaacttgaagttagatacataccctcctctgatcaaatagctgactgcctaaccaaagctctatctcattccagatttcgcctcctaacttcc

SEQ ID NO: 101736 - DNA, 832 bp, Cannabis sativa
gtcgttttgtaaagataatttgggaagaactccttatttttttaaaaaaagaaaaatacgcaacccctaaacaaacttttaacagcaaaatctaattctcctactgtttcagtacaactgttaatatttgactgttgaacacactactaacacaccattagaatactgtcaaaatgcaaaaataagttaattttgacccaaacaaagtatttccatttttatttttttttttttaaaaaaaaaatgaacttaaaatatacatcaattcaaaagaaaaatatattctgtaaaaagctcaatattaagtttataaaactgaaaaaaggattaaaattcccaattcttaaagcaagctacaaaatggtcaaaagaatagcaaaccaataaaatgtttaggggtgtttggcttaactaaaattaatttttcattttaaaattagaaaattggttttaaaaacctataggagtgtttggccaaaatttttaaaagttttctaaacctaagtttaaaaataaaaataacaatataaaataatcaaaaaatatcatgttgttttctatttcaaaaataatttttattttgtttgcctaatatatttttttacatttttctcacatacccgagtccaaggtcgtcggtaggagccatggtttgtgtcaactgtcaagggccgagtttggggttcaggttctggtctaggatccagggtctaggactggtgtcaagggtccaaagtcgggtgtggttaggtctagctctagatttggatccaaggtccaaggtctggggtcaagtccaagaccaacgtccaaagtccgtatcaaggtcggg

SEQ ID NO: 101737 - DNA, 794 bp, Cannabis sativa
ttaaaaataattaaagaaaaacttttaagttttgacaaaaattaaaaaagtataaaaatatatgttgcatttcatttaaaaaattataattaattgagcacgaatcttcaattatccacataaatactatgtaatgttgattttacacaaagcaaagtaaaaaagatagtgatatctatatagtaaaaatagtattctcaatacaaagattattaacttaaaaaattacaattattttgagtgagatttaatctcaaccacttaaaatatttcattctgttattgtaattaaatagatttttaatttatgtttatataaagaaagagatgaagattaaaaactctaataactcattctcctcttctctttctttatgcaaaattgcaaatttcaaattgggcttcaccatgggtttcaaaataattccacacaataattaaaattagtttttaaaccattttaaattatataattatttattgaactattctcaattaaatgataaaacacctaacataaaataagtatatgtaccttacatatagtttatttttgttaataaatatatataccaataaataagatgaaaaaaaaaaaacaaaaaaaaaaaacaattggaaaataataaattagttgtgccagatagaagcaactaagagtaatacagtttcacaattcattaaaaaaaaattcccaaagatcatgtgttataaatacagaaaaaaacaacttaaacaaataattttcggattaacttacttgtccaatgctatcaaataagacacaacaattt

SEQ ID NO: 101738 - DNA, 705 bp, Cannabis sativa
atgatttatgagataataatatctaagttatactttttgaaacttctataaatcgttaaatgttaagttaataattatacgatagtttttaattaatccaggtcgatcattaagtttttatttaaatatactaataaataaatgacgcgtataaattgacttaatacttaattattaagtacatatagaaattttaaaaatataatttatatattattactataaaaaattaaatttaagtatttatttaaaaataaaaattaaattttaaatatttacgttgaaaattaatataataataagaatacaacttattggagtctcaattttgagtgtgacaatattttataaataaaataaacattttatgaaaagaggttacttataaaataaacataagaaaataaaaatgaaaagaggatgtgatgtattctcatattattgggggtagtagtggactagctagtggtggttttgggagtggggttgagtggaaaaagttatttttgttaatttcaattattatggcaaaacaaatgatgagtgtgagggtagacactatccattattcaacataaatggcatagatcaaatattcgaggatatgatttattctcatattattaccttaaatagaaaattaggcattttttccaaaaagtagaagaaagttcattcaacaaaaaaaaacaagtagaagaaagt

SEQ ID NO: 101739 - DNA, 545 bp, Cannabis sativa
gaaattgatgttcacttcataagacatagggttctgagtaaagaagttggcgttagacacataccaatagaagagtagaatgctaacatccttacaaagtctcttagcatttcacaattctctatctcaagaacaagttgccatttttgtattctccacagtccagcttaaggggcctgttgaaaataaagatgatttacagttagaaattgttgagacgcacgatcagcaatataacagctagcagtacaacggctagcaaatgatttgcaatgatttgctcccataaaatttggttataatttttgctgaattatagggattttatattagggtgttcacgatgcgagtggtgtagtttttgaccattttttttaaatcaaacccgcacatgcggtttttctaatttcccaaaccgcactcgcacgacaaaactaaaaaagcgcgaaaattgcactgcaaaaaatggtgcggtgcgatgcggtttttgtggtttggactatcaccaataattaaactattacaaatacaacaaagcttgagca

SEQ ID NO: 101740 - DNA, 518 bp, Cannabis sativa
aagaagcattgaattggattgcaattctttcgtgggatagtcatgttggaaacagatagcttggtgtgtgttcaagcaattcaaagtggtattttatgccttcacaatttgtattttgtaaaacgatctgtaaataagttgattcattacttgacaaaaaactcttgtttctctacaagtcgtgtgcttcagttagaggactattcttctaaaatgcgttctatcattttaaacgaatttattagtaaatagatcttatcatttttattagaaaaaaaaaaaaacccatacatattctgatcataataattaatgagtactgactcaacaaagtgaagacacatcagacttaattaattactatatttttaagtaatttttattcttaattataatatatatttgctactgtcactctttatcctcatgacacctcatcatcagatctccactgttgatcacttgatgctgcaaaaaaaaaaaaaacattaatgatatataatctgaaaaataaaaat

SEQ ID NO: 101741 - DNA, 1186 bp, Cannabis sativa
  modified_base (202)..(204): a, c, t, g, unknown or other
  modified_base (363)..(377): a, c, t, g, unknown or other
gctcagtcccgagaacttgaagttgacacctttacttgttaaattaacccaaaggcggcgtcgtttaggtatgttctttctaatctataagaagaaccgtcccacaaatactaattattatttaggctaattagaatttttttctccttacttaaattattaaaattatcaaatttaagaatttttgtctaattttagtaannnaattctaacatgaatgaaagtttaggagatatgatttagtatataccaaaatttgaggggtatgatttggtagatttgaaagtctggggagtataatttaatacataaacaatcactgagataataaaattgaataaaattagataaaaatccttaaannnnnnnnnnnnnnnagttcagggagaatttttaacgggaaaaaaagttcagcagacatgatttggtatatctcaaagatcgggaaaaaaatcctaattagcctattatttatattgtcttttggcatataaaaaaaatcaataattttatttcatttttttttaatagaagcaaattacttaaaaattataatatatctacattagttttatcaaaaaaaaattattttaaagttatgtcgattttttcattttttatagattgttattagttgttgttatatggattttgttgtaaagtatatttctgttttattgtatggtttttattattcttaaatgatattaattttttattttgctatgtataattgtagtatataattttgttagcatttccttattgatttacttgcttcttatatttattgtttctttattgttttctaattttaattttctcttaattttgatataaccaaatagaagtaaaggtttaattttaaagtacttaactacaatacttgtgggatcaacctcactctttgtgagtctataacttgtccacgatacgtatacttgcgtgttgagaataccataacataatgcacaaccaacaatgcattgcctcgtatcacatagcagcaatgcatctcctcgtaatacatagtcagcaatacattgcctcgtattatagagcatcaatccatctccttgtaatacacaattagcaatgcattgtctcgtatttcacaatagcaaagtatctcctcataatacacactcagcaatgcattgtctcgtattacacagcagtgatgaat

SEQ ID NO: 101742 - DNA, 588 bp, Cannabis sativa
tctaataaaagagtgatgctgcaggggaaattataatttacaaagggacgatttccaatggttgcagcatggtgtgtgccataagtttgaaaggatgttacaacctttgataactaacaaagacatttgcaaattaacaatgaacatcgtcaaaaataaataacaatgataatgatgatttcctatgaattaaagcctttcccagagttaatttacctttcgacaaaacggacagctgcaaatccattgcaatccatattttgggggagaacagtataaacagtcagtcttaatattgcaaaatggttttgagaaaatatcaagagataaataaaatgaagtaaaagaaagaagtaccataggaggctattcaagtgcatcatcctactaaataaaaagttaaaaatcaatataaaattagaaaggagaataaatacctctcaaactcatatatttcaattggcttttcaggacgaggacctaacttcgaagtttctttgactttgtaaatctaatacaaaccattttaaaaattgtaaaacaaaaaaattaaattaaaaccaactgcaagtttcagatccttctgat

SEQ ID NO: 101743 - DNA, 970 bp, Cannabis sativa
  modified_base (937)..(938): a, c, t, g, unknown or other
tatttatggccacaattaagaggtttttataaaaatattggtgttttgacaaaattttataattttactgccatacgaaatttttttacaaaaatattgtctttttataaaacaaacgtaaaataacaaaatagaacaattaaaacaacagtggaacaactaaaaaccaaccatggaacaaccgtgaaaagttaacactgtacacaatgtaaaacttacacagtatttttaaaaaaaattccgtcccacagtaaaaaaattaaaaattttagtatgtggtgtaaaaaccccaattaatactgtattttagcgtattataagaagaaaaaatcaaatgcaatgttaaaaaaaatagtatattttgtctcttgaattttttacactactcagttatgtcttttaagatatacggctctccttcaaatttttattgggtctttcccacagaatcatgactcttatatacaggtatgtcactctgcatgctttctcacttacacgcttcttagaaaaaaatttcaagaggttacccatcctaagattactttaagtcaaacatacttaattttggaattctcaagtaatgggccactaaaaaaacatacaccttgttgatatagataatagtcatcaatctatttaatccatcttcaactgttgatataaataattgtcatcaatgtatttaatccatcttcaactgttaatatagataatagtccatagactagaatcaacaatataattataattttatgcattaatgaattaattatcaagtgtttttcgtttcatcttttgacatggttgggatgttcttatcagtatttgcgggtgctagtaggggtgggcataatccaatccaatccaatcccgttgaaccgaaccgatccaatccaatccaattataaaaagttggatatccaattacaattgnnttggattggatgctaaaagttagattctaatt

SEQ ID NO: 101744 - DNA, 679 bp, Cannabis sativa
cggtaattattttgaatttcggtagttgtgctgacgtggcacaccggtatttatgcaaataattttcttaaaggtatttttataaataaaaataattttaagtaatattgaaaagaccccatattatcatatcatcaacatatagtaataggtaaatctaatcattgtgatagatgcatagatcatatatacttttgacatattcaattttcttcatatatttatcaaatcttaaattccactgtctaggtgcttgctttaaaccatagagagatttctttaagtagacaaacgtaattaggatctttactttcatacccttctggaagctgcatgtagattttctcatcaaggttttcatgtaagaaggtagtccttacatccatttattcaatgtgaagttctttcttagttgcttttgccatcatgaccctgattgaagtttgtttgacaacaggagaaaaaatctcattaaaatccacttatgcacaaaatatgttcccacatgtcttatgcacttaaataaaaaaatttcgtcaagtttcgagagttatggagagagacacaagcaaaataatgccagttatacgaatatagctaaaaaactcgtaagtaatagtccattaaatttagggctatttacaaaaatatgggaaaaaaaatcaaagttttgataaat

SEQ ID NO: 101745 - DNA, 620 bp, Cannabis sativa
ttattgttattattattagtattagtattattaatgttattatcattattagtattattattagtattattaatattattagtattattattattataagtgatattattattagttaagtatgaaatatacggtatgtatatatatatatatatccttttttttttttaaattttaagttgttgaggtgggattatatttgggttaggactatatataggatatttatatgattgcttagggtttagagggtttagaaacggtgtgagaggcagagacggagagagaggttaacgaacgaaaccaagttgtgaaaaaagtgagatttggggttgttgagtttgaaagtttttgggctgccctagatgatttcattgagttttatttcatccaagaggagttttaaatgcgattagaaggtctgtaatcgcacctttcgacagacaccattgtttacgttcgaaaaatacggttcttgaaacggacccgaatttgaacgtgtttaagctgttttggagatcaaaggaggttatgtttaagtttatgggccccaaagatcagttttaacgtgaataatcgaagctttaaggtctgaaacggaattcaccatttttggactc

SEQ ID NO: 101746 - DNA, 757 bp, Cannabis sativa
tagtttgaactttatattttttttaaatatgtatgtaagttatatgataatgtaaatatatatataataaaacatctatatatataacaccctcttaattgggttgattgggttagttcgggttgattggacaggttggtattatttttaacccgcccaatataaagattaggcaagttatatttttgtcgggttattcagtttgcattattcgtcgggttatgtcaatttggtttgggcagattattcggtttgggtgatttacaaaaacttatgtacaaccctaataaaagaagcaataagtatggttcagagagttagctcccggacaagtgcaaaaggcacaccttcttctcccgtagttaagatatagtaaggaacctctaggacaagaaagacctattcgaacagtcacctcgcatttaatgcagcatggggaaaacgtctggaaaggcccataagaggacatatcagatatcgtaagcctgatttagggtgattacacgataatcaaagggactagtgacggctccattatgaagaatcacatcaatcaaggaaggatgaaggctaatctcacctaacctctatgatacctactatgcaggtaatgcatgccctattttgtacctttggggaacttttgcttatccatagctggcactcaaagacaagttacctcttttcaactattcccaccaatctctataaaataccactgagaaaaatcaaaaaagggaatcaaaaaaagggagag

SEQ ID NO: 101747 - DNA, 561 bp, Cannabis sativa
ccaacaattctgcgcaaagaaaaacctcacaaattatatttttttgtaactgttaagtctcctaaaattaaataaatttactaagagcaattatattttttttttgtgtaaagtagacatcaatacttttttatacctaagctcctataaagtagaattgttgggttaattggagaaatagacaaagacttgccacaatattaaagagtcttattttatataagtcaattttatttgaaactgtttgaaaaaatttctaataacttacattctttagacattgtttcatggattaggaatatctaaaaatatatatatatatcttggttatctaacggtattttttggtttaacataatatactttacaaataaaagaatattttgttaaatttaaccccaaaacaaccatccaccatttttttttaactttccttttaacgccgttaacttactataaaaaaatttgaaaaaaattcgattggtcattcgattttattccttctgttggagttgggttcaacctggattggcttccctgttggtattgagttcatttggg

SEQ ID NO: 101748 - DNA, 923 bp, Cannabis sativa
tataaaaactattcacaaatctctcgtgtcattaaatttttacaattgtaatattttaactaaataatcacacacttttaagacatttggctacaattatttatttggtaagtgaagaacaagaattattaggattaggttgtttggattaattattattccctatataattaaaaaatttaagtttgaagtttgttctaaaactgtaaatactggttattgggagatgttattagtacaaaatacaattagtttaaaagttttgttacatgattaatagtttagtaagttttgatgtaaattctaattgatttgttttttttagatagggggaagaaggattcgaacatgggactttctttattttcttgatttattttggttgtaatattttttaattgcaatgaatttcctcatttatataaaaaaaaaataaaactaaaacgaaaaaaaaagaatatatgaaagtaagggatcagtaatgtagccctcttatcaacaactcacaattcagccaaataataataataataataaaatacacacttagtttttagcaattataaaagagaaaagatagttaattatattatggttaaatagtttgagtgctaaaaatataatagtagagactttgaatataaaaaaaatagaaatatttataaatttattattaattgctaatatgatcttatttaatatttttattaaaaaattaatttattttaaatacataattaattataataaattcaattttaaaaataattttttttaaagaataacctattgtcaacctcttatatatttatagcaagttaataaaaaaaaatataaccatcatatataattatattttatccccatgttatatataatattatatggatgatttcttaatgggtaatacctattaatgggta

SEQ ID NO: 101749 - DNA, 1563 bp, Cannabis sativa
  modified_base (506)..(508): a, c, t, g, unknown or other
catgggctggcggttatttttcaaaaattcaaaattggtttcctttttgcttcattcttccatatttatttaaaccaatttccttgtcatttattctcaccaaactacctgattctctttctttgttttcttgccttcttgttgttcattctctctttcagaaatccatggctaagactaagaatctagggcatccaagaacaatggtggaatccgaacaagccccctcgaatgctcctcctgctgctccaatcttcctgcctgctgctgccaaaggcaagcagcctatgaaggattctcctcctggtaatatctctccatctcaagctgtcaattctcgattttactttcgtgataatgagcgtgactggaatatatatgctacccgaaagtttgaaagtgaaaggaattatgatttgcatgctcatagagtatatggaattgttaagtttgttcaataccactcatgggaaaacactctcactggttttgaagggtatattgannntattgtcaaagaattttatgccaatttgattaatgatatgcttgatgagaattttgagttctttggtaaagtctatgttaggggacattggttttcttttactgccaaggatattgcagtggatttgcaattaccccaaggtgtgcctaatgatatcatgtctatggatcgtcatttgatgcttactaaacttaatggtgcacgagttgaatggaaatctggggagagtcttcgaattacacatctaacataagctcatgcatccctcatgcggtttgctctaagaaattggctcccgaattccaacaaaactgtggtgtctcaagacttggcatcttttctttttcgaatcacctcgggggcatctattgatctggcttcttcaatcttagaccatattgttttatttggagaggtaaaaagtgaacttttaagcttgtgtttccaaatttaatctttaagattttgtcctctcagaaagatgtggcccaatctcatgaaacacttgagcctcccctggctagaaccatattccagccctcggagtattttgatggagcttttctaaaaaggcctaaagctggtgctgttgctgctggtggtgcaagctcgagttctacttctgcagacgtccaggaggtcaagaatgaggttcaattagtgaacaatcgacttactgccatggaggaggttcaacaagagctatccaaacagctgtcctcattgatcaagcttttatggggcataagtttttctttcttttattgattttgttggacatatttctatattttcatgtttattatctttggcccttagataaacaaaaagggggagtaatattttatttttaactgtttatttgtcaactctggacccttttttcagtgggagttgtgtttggtacttgtgatctttttggattaaaagttagcatgtttgtttgttgtttttcgttttcgattgtgtcactcaaggtgagttgttatttgttcttgctaactttaatttgcaggtacttatgtgttaaaaaatattttgttcatctaaagtgc

SEQ ID NO: 101750 - DNA, 511 bp, Cannabis sativa
tgtgggcggtttgatgaacacccctaattaccaacttttaccatttacaacaatatataattatattgatactaataaagtgtaaagtgtaacataataagatttatatacatttttgaaaagtcaatttcttattcttatataataataaaatttgtattttataatttataattttcaatttgtactgcaattaaaatgtcaaacttaaatttttgttacaaatatttatagtattaaaattaaacaaacaaaaataaaaataaaatgtaacaagaagagcaaagcacctgcatcgcacgtgctaacctcacctagtatgttaaaaattatcaaaatttatcacataaaagttgatctaaattcaaaaatacaatagcacacaatcacacgaatcatttagtttagggtagtgtattttcatatgcagatatatgggatataaatacaaatacacttcggtaacttgaatataattcgttatatataggaatacttcttaatgggtatt

SEQ ID NO: 101751 - DNA, 1180 bp, Cannabis sativa
tctctttctctctctccgagctcgatataaatacatttatttatatacttttttatttattatatatgtatttttttattgtattaatttaatgtattttaaagttagttgttattaaaattaattagttgttttattttaatttaggtaaaattataaaaatgatgcttgaaaaaaaataggagaaaaaacagatttcgcccgttttgcgacggtcgtataggcgacgattatagaaaccgatagaaatactttaaacaactgtttaaaaacgttggggaaaaattatttttgtagtagtgttggtacagtatatgatgttcagggtacgatacagtgttaccaacactagtacgtgacaagtacgtagtgcatgaggtgcaacactcagtagtactcggggtatggttcatccctaccatcactagtatgggacaagtacttagtgcatgtggtacaacactcagtagcacttggggtacggttcagccctactaatactagtatgggacaagtacttagtgcatgtgctcaaagcagttgtgcaatcaattcttacttttgctatgagctgtttttgaattccaataaccacttgtaaccaattggaattgatgatggctaatttatggtggggaacaatagagacatgttctaaaatccattggaagatttgggatgggtttttgctcttttatgcattttaatcaagagttcattgccaagcaagtttggagactactcgataatccatcatcgttgttaagtaagtttttcaaaggaaatagttctccaataactctttcttggaagcttcacatggtcactcttcatccttaacatggcaaggtatactttttgggtgagaacttcttgtcgctagacttcattggaaaataagagaaggtagaaaagttacttgtgctttagatccttggaatctaggacataactctttcttcccaacctttgattcggggccgcctgctgttgttgtttctgacttcattaatgaggaacgacaatgggatgttcctttggttaacagttgtttctctccgctagatgtggaaaaatattggtaatctctatgggaaatttgaatttccatacttacaaaatctcattatttttttcctaaatatatacttactaaaattgctaatatatgccaatttta

SEQ ID NO: 101752 - DNA, 577 bp, Cannabis sativa
tttatttttttaaaaagaaaaattattagtggcggaagtctgccgctaataagtgggtcaaaacattctcgcctattcaattcaaatattttgaaataccaattagcggcgggatttataaatacccccaccaacccattttccctactttactctcagctcttcaacttatttctccagccctctctctcaacccttctccaccaccaccagcaccgagtaacaccaccaccactaccactaccgagttctccaccaccacgcaccagcaagctaggacatcacgcaccaccgagtatcaccacacaccaaaatccatttcatgtaagtaaactttttttaaaaaaaaaaaaatcagatgaatggtttttatattttaaaaattttagggatatattatattttttaggttttaaatctatttatatatatataatgtgtatacgtattattatcttttttatatctacatattgctttgtctcagctggtctcctaggttatttcatcttggtgattcggtactagtttttgtttttgttcttcatttgatgaggaagaaagagtggatgagttt

SEQ ID NO: 101753 - DNA, 1004 bp, Cannabis sativa
ttttaagacttttgccgcaaatttctcttaaaattactcaatttacttatttatttatttcatgtgatataataaagattgtagtttggtgttgtaacatggtcgagtaatagtattatacattttctaaggtcttaagtttgactattctctccaaatatatttaagaatatagtttggtacaattcaaaatcggaaagagaaaaattatcttatgtatttcatcaagaaatttaaacgattcaattcagttcgcataatataatattaatctacaaagtattttattataataatacaatagagaaataaattttaagtataaaaaaagaaaatgagatacacatgtgaacagaataggagagtgagattcacacacgagtggagagagtaaagccgtatactgtcgtgcacagaactacaatgtcagaatatagtagggactctgcggctgccacatggcagtttggacgaagtgagcttggcgtataaggttattttttttttcaatgcaacaattatgcaaaaataactaattatcaacacaaaaacaacttaacaacaatcaaacttcaaaataaatttattaaatattaatatattgcattaacaaaattaaaatttataaatgacactacgacaccgtcaagaactactaattgaacatataaaaaatatttataaatttattgcaataaatataaaaaaaaatttgaaacacataaactaaaaaaatataaaaattacaccaaaataatatttttttaaaaaaaataaagtgactaattaaaaatatgttcaattaaaaatgaagtagagaacaatataaaatatatatatatatatatttatatataatgtagacataattaacttaaagtatatttgtaacgtcttcacttcaagtttccattggacccttacacttaagcaatgaaggctcttatacacaagtacatcacttgggctgcttcatggactgatgactaaccctacagaccaac

SEQ ID NO: 101754 - DNA, 580 bp, Cannabis sativa
tttgggtttggggttcggggtccgagtccgggtccaaggtttggggtcggtccaggttcaggtccggagcatgctcttgatctaaggtttgggtccgagtccgagtccaggccatggtcgaggttgggatcgaggtcgaatttattgtaaagaatttataattttacataacctattagtacacctcaatatcaaacataatattgtactaaaaaatagtaatacattaataccatacaatccaaaacaatactatacaatacaatgcatcgtggtataccaaacgagcccttaaaaaactatggggagtcattatttgtatggttgaagcttatttttttaaaactttagatagtatgattggatgtgctctaacactactataagagttgaatgttttgagtaattagcaattttttatattatttataaaataaaaatatattggataaataaatagtatttgtattttatttatgtatttatttagtgtaataataatttttaaattatattatgaactataattagtatattcaatactcatatatttaaattgtatcaaccccacattggaaat

SEQ ID NO: 101755 - DNA, 567 bp, Cannabis sativa
aggatatcccttgtgttcccaggtcgatcatcttgaggatttgtgggatttttagggttattacccctaggggtttccctatgtcttctggtctttgagtctctaggtcttccctgagatttcctggttgatgtgccgggttggttaggaggggcatcactgtgtgcagccgttgcagctgttgcctcgcactccaattcatcatttctttgatttgactcaccaatcattgtcagagttgtttgttttccgattccactaatggcatatatctgatgggatcataagcgtcctcacttcatcattatgggattccaccgccagtttgtttaaattctccaccatttcctctcccagagtgggagtctcagttgtgtttgtcctatgggaattttgatgttctttccctggacgttgagttgtttcttttggttgattatcttcatttccaagagtattatctaccatggatgaaaagttcgaatatgtttcaaggagagtattttctaagatttttcttacaaggctcttaatgaaaacaccaaactgttaacacattttcttcgt

SEQ ID NO: 101756 - DNA, 647 bp, Cannabis sativa
cttatctgcactcaaaattggatttgttctaaaccaataatagacatctgaaattcattagaagaagtggaaagtctagaagaaggtaatattaataaattatacttattttttgtattaatctcataacaattgagtctattatgatggtgttttatatttattttatattatatatatgtagaaatcttgaagggtgttgctgaaattaaacttgattgagtgaaaatgaattcttagatacaaaagaacatgaagtaatatttaaagactattatgttattatacttttactattttagtaagttgatgatagtaaaattatttgactaatcatttatttattgttttcttgatagaaatatggggcattggatttggatttggaacatgtttctttttttttttttgctgaaatggatttggaggaacatgtccttactattttgtgtttttattgtgggttgattgatttggattttagaatatgaaactttttttttagatttggattatagattatcaattatggacctggttgtcctactgctacctattgttatgtgtaggtttttttttgcatttaattttttaatgaaatattaaataatttttaacattaaaaaaaaaaaagtaaccgatccaat

SEQ ID NO: 101757 - DNA, 1191 bp, Cannabis sativa
cgatgagatacacaaacatggaagtaggataattgatttttaacatcgagaattaagtcacgataagacaaatcactcaatgaagaggcatggatggcattaaccagcaccaaggaatctgtttctacattgttcacttgataattaagttgatttgcccatcgtaatgcatgaaataaagccttggcctccatatgttttgacttaaaattgccattcgctggtgaggaacaagcagccaaaacagtccctgtagagtctcgaattaaagccccataacccaatttattttgagaagaaagaacagccgcatctacatttagtttaatcttcccctctgggggtggtgtccaaggacaatgtgcggcaacagcaggatcaacctgcatcagggaggctgaaatggaactttgctgcagaaaattgcagtaataagccttcgaacttgccaaaagatcagctggttttttgtgttgtttttggtgaataatattattcctgtccgaccaaataaaccacatagtgcatataatcatttcaagttcagatttggtgtgtaattgagacagttgtattaaaaagtcaccctcaaacattcggctagcagcagaataatcaaatgaaaagtctgagcacctccagacagctttagcatgcttacaactaaacaaagcatgccctatcgattcccacgcatttgtgcataaactacaagtgctagaattgattattctcctgtgatgcaagtttgatgcagaaggtaaagcattgtgcatcaccctccacgcaaaaattttgactttagaaggcaaatgcaaactccaaaattgcttccaccaagttgaagaggcacttgaacaagatgaatcttcctgagaggccatagaacaggccaaatgatatcctgaatttacagtgtaagactcggaatctgtatagtgccatacccaaaaatcagtaccagcattatgtgaaagaggtattttgagtatattttccacatcaagagctgaaaaatcagatgttagtttatcaatatcccactggttatcagcagagatatagtcagccattatattaccctccaaaccagaaaagaaaactggtgtgaaccgattttgagcaggtatccaatgatcaattccacatctaatgtgcataccattcccaacatggagtcttaaaccttta

SEQ ID NO: 101758 - DNA, 558 bp, Cannabis sativa
tatctcgaatagctcagaatctagagaggagagacagggccctccgccggcgcttggcccgcgggggcttatatggtgacatttctcttcagattaggcttaggggccaaagctctacgggacctacttgccccttgcctacatctagaggtaagggaaagacggttgttaaggattcagatggttcctcttctgaggatgatggtatttgatagtttattgcaccatcttttatattcttgtcatgcattgaagatttgtgaccttcattctgactttgctactttcttttaacagatatgtcttccagattgaaaggtcttgttgatggaccttttgatgagccttcgggtcgtctgagggccaaggtggctcagaccacccgcggtaaagatgctactggatcatcttttcctcctcctcctcctccaaggcttgaaccagctaggcagcccatgattgataatccttcggctaggagggaatgaccttcgagcaggggtgccaaccatagtgatgttgcatggggttggccgaccaatagtgtgtccttgaggg

SEQ ID NO: 101759 - DNA, 651 bp, Cannabis sativa
ggttcgcgggtccacaagctcaggttagtcggatcaacaggttgactcaatcaatttttgacaacgggttttttttcacccaaattctctataaaaaaaagaaaaacatttaaaatccaaaataaaacataaatccaatgatctaaaattaatcaaatcattcatcaaatttatgttcatattcatgaaaatcatgaatgatgaacatgaatgaacataataataaaaattaaaagtgtcaaaataaattgtgactaaaaatataaagtccatactctatattccataatccatctatacattctgtactagttattgtctaccatagaatagtccatacatatggtatgttcatatccttacaaatgtataaattaaaatgtatttataaatttaatgtatatatgataaaggcatttataaaataatagctatacactaatataatatgtatatatatattatatacctaactttatattcatctctaatttaatagataaaatatataagagaaaaacaatataaaaaaaatcatattttatattttaaattttatgttcattaatgtatatatataatttttactaaaatcttatataaaaaaatatattatttattttatgttatatatattaatttttttttttt

SEQ ID NO: 101760 - DNA, 712 bp, Cannabis sativa
gttaatagagcatatctataactcactaactgtatagtcttaggcaagtcaaagatatacaaattattgatttgcatattgacgagaaaccatttcacgtcagaagatacaatcataaggatgacatcgataatgcatagcgaggtgtcaacctcgctactaataaaaaggtgttgacgagatgtgttgacaattagagcacttagcattatattaactaagtataacagctggaagaacctaagtgacggataaccaggcatccatcttgctataggaaggcaaactcatggtaccttcactaataagctctagacatctttcaaggagatccattgctccgtcaagtcaactctcttagaaagaagttgacattcaaatgatgttggttgttgaagttcaccttgtcaccaagaattgcaattgtcagatggagtgttaagtctttacacgtagaaatgacgggatttacattatcaaccttaaaaagacatgggaaaagcttcagctcactgctaggattattgttgatattcaagttcccaacgagatgccccagcgagatacacttagcagcgtatctaaatctacgtcaacattgacccattaaaagaagataaatcacaattgtatgagtttcaaataataaccacatttatttacgtggtgtgtaattaaggcccacgatttcagggaaatattgttgtgggat

SEQ ID NO: 101761 - DNA, 645 bp, Cannabis sativa
aatcatacatggatagttgttccacttccacccaaccaacatgtaattgacaataaatgggtatataaaaagaaactaaatccagatggtactcttcaacgttgcaaagcacgtttagtagctaaaggttacactcaattacctggcatcgattacttcgacacctatgctcccgtggccaaattcaatactttaaaacttatttttgcattggcagccattcgcaattggcatttacatcacttagacatacataaacaatgcgtttctactacatatggggatctcaatgaggaagtttacatgaaacttccccaaggatatcaacccaaacatcccatccctcccaatgccgtttgcaaactccaaaaaagcatatacggccttaaacaatcctctcgccaatggtatgcaaaattgagtaccacattacttcaacataacttcatccaatctccaaatgatcactctctattcattagaaaccaatctggtatattcatggctctactaatctatgttgatgacatagtcattgccaccaacaacatccctaccatgaacacattcatcactacactcgacaccagatttaaactaaaggacttaggcccccttcgatttttccttggattagagattgct

SEQ ID NO: 101762 - DNA, 744 bp, Cannabis sativa
gtaatgggttttatttagggcacaaaacccagcaaccatctagacctggagctttatcatgtgctagttggaatgtagctttcttgatttcattagcagaaaatgtggcctggagaagctcaatttcttcctcattaagacattttgtaatgcctgagagaacagaatcgatgatatcatccttaggtgattggctttgaaacaggtgagtaaaataatgctcaattgtggttaaaatagaagttatatcatttgccgtggaaccatctgagcgttgaagagaaagaatttttttagtttgacgcctcatggaagccacacgatggaagtatcgagtatttttatcactgagctgaagccatgtgacacgagaccgttgttgccagtattcttcctccttctgtaacaaattgtttaattccttttcaagattccctccctgatctaattgatcattagtgggccgagggaaggattaaacaaatttgagttgagattgaacttcacgaactttagtagcaagaggaggtcccaaagattgcttccattgcttaagacgggacgaacaattatacaatttttcattgaatccaatcaacggattagaatgatgattatggttgttcaacgtccaagcgtcaagaaggcaatcctcaaaaccaggtgcggacatccaaagcctatcaaagatgaatttggggacatgcttagattgatcagcagggtgatgcaatgtgagaatta

SEQ ID NO: 101763 - DNA, 788 bp, Cannabis sativa
atttacagcttgccacaagataaaactatgcttcggaacatttatcaaactccacacactcctgttgtaaatgaatggaacctgagacaatttactattgtacaagagatgaggtttgaacttacccgaagcccctgcagtttgaatgtccaacttgtcaaatttgtctctcacatggcaagcttccgccaataccaactcgagtcaagctttaaatcataggtccatatagatgagttctttagatatatattgttgatccatttcacccaaagagaatcacttttgtttgaaatggcccaaatatattttgcaagaaccgcttgattccaattagcaccatccttgaaccccaaaccaccaaagttcttcggacgacagaccttttcccaactagcgacatgaagcttactcctatttccattccaaccccaatgaaaacctctgtaaagtttttcaatctcctttgttatactttgagggagtatgaagatgctcatccagtaattacggagtccaagtaagacaaaatgaataagttgcgatcttcctacaaatgacagatgtctactctcccaactgtggagcctttgcttgattttcttaaggatcacattacaatcttccactttctattttgttggtctcaacgggactcccaaatattttaacgaaaattttccttcatgaaggtttatctctctcagaatttcatgtttggccttacttccaacccctcccaaataaatttgggatttattagtgttgatagctaggcccgatgtggc

SEQ ID NO: 101764 - DNA, 537 bp, Cannabis sativa
tttgattcaaacaatttttgtgtccaatttctgcaatttttatttttattttttgaaaaataaagtgtttataaaatagaaagagttagacctctcagtcattacaaaatataaaattagatatagaggaggactctactatacttgaaatattctaagtaaaaacccacttagctacattatgggccgcaaaattacaacatttaggaataaacgagaaattacaacatattagagagttgattacaaatattaatataattatcaatgctccaacttgaatagtttcttttcagcgctttgataaccttttctgaatcactctcaatcaagacaaaacggtgcttcatcgaaacagtcgaatccaatgctaaacgacacgtcgtagcttcgccgatcaatagatacgagaagatgagcatgttaactgctactcacaaaactgtccccgtgtgatccctagccaaagccgccacgcacatggactcgctacaaaccttaacatcacagtttattttgatataatattttggagga

SEQ ID NO: 101765 - DNA, 541 bp, Cannabis sativa
agataactgaaagacacattttctgtcatcttgtgtagaaagataaattgatatggaatacagctaaaagaaaaatggagatttacatagcaaaaatccataatatgtaatgaaagatagtgtaatgcttgtgtcaaaatatgtattttactttcaacacttcaaacctgaaaaaataaaaattaatagagacctttgataacatgaaaaagtacattgttagtacacttaccacatagtaaaggaggaagatctcctatactaatactaatagtgttaaattcaatcaattcaatcaggtccttcacattgtactcttcgatatcggttatgttgaacttcttataggaccaaggcagagattgcctgtaaattaaatgaactcaagcaaaaaaatcaaaagcaaaacacataataactttattattcatcttattatcttagaagttgcaatgtagatgattaatcattgaaattcaaggtaaatacaaatgaaaattattgtaataagatttaacaatgatacttactctatcatagt

SEQ ID NO: 101766 - DNA, 796 bp, Cannabis sativa
  modified_base (27)..(41): a, c, t, g, unknown or other
ttcctcatttttgatgaagacaaagannnnnnnnnnnnnnnatttttgatctgatgcttggaagtggcccagattgatagattgtcaacctcgacgctagggtgatcaggcactgggtatctgggtgctcaataatgaaagttctctgaatttgatattgatgtctcaaatatgttcgcggtatgtctagttcatgtcacaatgcaaaatttgacccatttgcactaataaggtctcaaaaattgaaaccttagatgaggatgtcaacctgggcgctgggtgaaaccctagctaggtgcccaagctaacatccgaggtgttggttcatgtatttttggctctctaggcctagatttggttgctccatgtcttcatggtacaaaatactgaaagatagtgagttggaaatgagctatcaaagtccaaactttcatttcggagttcttaaaatcaacctgagcacaaggctagggaaccctccctggtcgactgttatgacttgggactactcaactccgagatgtcatctttcttgccacatgtccaatattgatgtccacatcaccatgaaaagtttatgggttaacaacactcataccatgatctttcagatctaccaccacacacaaggatcagtgtgggctaatagaatacacaaaatgataatgttcttgttttaatcttaacacatgagcaagaactctaactagaaagaaaataatacgattaacctttttaagtttcttaaatatatcgtatatataaatttaaatttataccggtataataattataa

SEQ ID NO: 101767 - DNA, 816 bp, Cannabis sativa
tgcttttccatagacaagccgatagggagacatcccaagaggggatttgtaagctgtgcggtatgcccaaagtgcatcttgaagacgagttgaccaatcttttcgatcgggatttaccgtcttttcaaaaatgtttttgatctccctattagctagctcagcttgaccattggtttgtggatgatagccatttgcaactttgtgaagtaaaccgtactttcgcataagagcctcaaaagattcgttgcaaaaatgagtgccttgatcactaatgatggcacgaggggtaccaaacctagataacacattttctttttaaaatttcacaactgtagcgttatcattatttcaacattgtattgcctcgacccattttgaaacataatccacagcaagaaggatgtaaaggtaagcaaaagaaggcgaaaatggtgtacgtggatccgtgctgtctcaatggctttttgcatggcgaccatcacctcttgcatctttttgttttgttctttttgggctgcgatctcagcttcatgatcagcagccttttgccttaagagcagtaactctgtgtaactgccttcgtcgtaggtgtcatactcgtcaaagttttccttgtactcgtcatcgttggcctcctctcgttcctcagaatccacgttgactctcgaagccacttctttgtcttcagggttttgagtgtcttgaggagcacggggctgacgtgtgttgcaagtttccaccattgttaccttagcttataaggttgttgtttgtttgaagacgcttccttcagcctctcaatgaaagcaccaaaat

SEQ ID NO: 101768 - DNA, 562 bp, Cannabis sativa
  modified_base (38)..(43): a, c, t, g, unknown or other
ttcactataatttgtatttcaataaaactttcacaagnnnnnntaaaatcactacaacatataagtagtcattacaagttttatttttatacacgaataaaaaaattatattattctccaaaacatatacactctataggagtcactattatgtctaccaaactttatatttcttcaggaattactatcatcaattcaatgatgtgtataatttaaaagatacatgacaacttcaccatgttgttgtaatggtcaaatagataaagccataatatagcatttattttttctcgtatctttctaacaagtcatctaatttattaatagattattcatcagtctaattatcatgactgatatatgatatatttaaatgtacaactagtacatacatataataagttatttcttgtcactttcatagctagataaaagttatacatctaggtacatacaaagatattttactagtccaagtagcaattatgcagaagacttcttcaggaagttttttaaattatcattttgtcattctttatcactttgattatattggatcact

SEQ ID NO: 101769 - DNA, 572 bp, Cannabis sativa
ttctatggactccggtacgcttccgctattccttaatcttattatttaattctcatgaattaattagggctatatacagatttacagtattctaacattttcagcaacaaacaacacgaaaattgaattttaactcttcaaatttcgtagtaaattagctcacaaaggctattctttgacatattgtctattgtcatgtgtatcaaatattgtaaagtatgtaacatgtaatgaataaaaaaatgaaaaactaaatttttaaacctctattaagaaacaaagagtaattattaaaaatacccaatcttttttttatcaagaagaaagctttattaatcacaccaaaaccaaacaccctcacggctctccaaaggagaccaacctcacccctcacttaattacaaatcaatctctttagtaaatctatctcaactttggatccattcatattcttgagaagatacaatctatatttgacatcttttttaattttgctaactatacaagtgatagtattagagtaattcaaaaaaatacaattgttactcttcctccaaatatggtaaattgtg

SEQ ID NO: 101770 - DNA, 528 bp, Cannabis sativa
atgataatctcatttaagagatcagctaataaataaaattaaattaaattaaattatgcactataaaaactggtagtagtatactgtacatgaccgcatttcagtgatttttactctctcctgtatcatatttctaaatacttgagaactatcaagaacatctataaaatttgatgtatctgagctttgcaaacataacaaataaaagacaaacttcagtgacattgaccgatttcctggcaaagaaaactgaatggcctatacaagtatctacaaaatattttatcttcatctttttacgaagtctaatgtgacgaagagcagtcaggaatcgctgagtcagtcttgatcactcgggtgttgtaagaaccacaactcccacacttgtgatatagccagtgaaatcgtgtgctgccctttcgatcacagtcgttacacagaatatcctgatgaaataatgcagcataaacttaaacactagttagtagttactagacaagtgaagcaatgaatttatcaatgtagagg

SEQ ID NO: 101771 - DNA, 720 bp, Cannabis sativa
tctaaatgctatgtatgtttagtcacaattattttttttgttgtgactagtgagtgactaaaagtcacattttgtcacaaaaaatgtatggtcactaaaaagttatcactaattttttgtagtgggggttgtccattccttagggatgattttgttaatcaatgacatctctttgacactcttttactgaaattctctcttgagatttttaatgagcccaaattttcttttaaaaaattaaaaatagggtaggtaaatactattttggaatgaatttgtttacaaaagttaccgattggaccctctgttttgttaaataagaaaatggaccttgtattttctaaaagtgtaaaaataggactctgagcttaattttagacaacttttttcttaatataattaaccaacttgaagacaatttttaacacgaactgatatagaaaatgtaaacagttctttttataacacctttagatcaaattattataaaattttattttgaaaaaaaattagttcaaggtcctatttataccattttagaaaatacgggattcatattattatgtaacaaaacagagggtccaattaataatttttacaaaacacaaaatttaaaataatatttacctttaagaatatatgggagccatgaaaataatttaagatagtttaattacacctaactatttaattaccgtgtaattatttagttgaacaaac

SEQ ID NO: 101772 - DNA, 591 bp, Cannabis sativa
gttgatacatgaaaaacagactgctcatagggagaggaaatagaatttttattgattgaatgtgtgttacaagattggtgtgtactaacacactgttgatttcaattacaatctttattatatgaacaatcagtagaaaaagactcagaggtaacaagatgacattgcagtgaatagcttgtgtgacttgaagaatcaccaagaaggtagaggccatccctagctttccctttgagcaccactgaccctattgtcttgtccttgacaaagcaacaatttttatgaaattcaaggaaaatgtcattatcttgagttagcttagaaacactaacaagattcttggtaatcgaatgcatagttaagacagatttcatatgtaaaggacaagctttatgataagaagtaatagaaacagagccagtgtgagaaatgaacaatttcttaccatcacctatggaaagtgtctcagggccagagaagggtttggactcatcaagattgcctgaatcaaaggtgacatgtgtagtggctcctgagtcgaagtaccaggagctgttgtctccaaagtcttgaatcatagtggttgtatag

SEQ ID NO: 101773 - DNA, 965 bp, Cannabis sativa
cgttggaaagctcgttctgagctttatatgcttatttgtattttgaatgccaattttatattatgtgaaaattgatttagggattaatcctatacttgtgaatcccaaaatttgtgactaggattaccggcactttgtcaggagcatcggggcatttggagtccccacgtttgcggaacatcaggtaagattgtagtttgcacgtagagttaagcgtaggggcactcatattgtatattgtggttgtgcttaattaagaatcgggagtagggttattaacctaaaatgagcggttacatggtctagggttattcccctggtaattaaaagatgttgaatgttatgccatgcttaatatgttggaataaagaattatctgcaacttgactaggtaaactagtaccttaaatttaattaactgtgctctaggattattaccctagaatattatgaaggtaagaaagcgatgatgtatggtaatattgttaatcaagtgaagacatgagttagggttaataccctcaataggtgttattttgagcatgctataatatgttgtaggagtgattatttagtatgcaagttagggttattaccctaagattctatatgttatagtatatattgagtgcacgcatttatgttaagaggtatgtggataagacataactgggttagacctggtatatatcactgggataaaccaccgaaagaacgtaatgtatggattacatatatatattgttagcgcagatttttcgttaaccaagtttgaccctcacggtaataatttcacacagaaaaaataaaagctatcaaaaaataatatatgaacatggggtttttaacgtggttttgctgttaaaattctgcacagtccacgtgtaacgccctgtccaacagggacgccacgtgtgtgcactttatttaaaataccaataattatataagatgtaattatacta

SEQ ID NO: 101774 - DNA, 504 bp, Cannabis sativa
gaactagccattttataagagagagctaagtattatattatggagagacacaaggcaatgaaggtcaatttatagagaagagattttagtgaagtggggggagtgaattgatgatcataataattcctccaaaagaaaatgattgtttatagcagccatatttttagatgaaatgattaagaagtagacttatatgtacgtagctatatttacctacatatatggctagctatatctggcagcgccgtcttcatgtatataatacaaattttcaaatatataatatgatgtcattttttatggtaccatattttacaggccataataataattgttattgttattatgtccttatattttaaggttgtcaaattatagttgcggctttgtactatataaccaaattaaataatatctatacgaataatattaatatgtacatatgtctatgatattttaataaggtgatcatatataatcaatgttttgtaattacaaatataa

SEQ ID NO: 101775 - DNA, 1217 bp, Cannabis sativa
  modified_base (27)..(40): a, c, t, g, unknown or other
aggatgttaatgaaacatacatggtannnnnnnnnnnnnntggtaaaatatttccaacaacacattgtccccaatgtgataaaataaaattgcggttgagagagacttacctgagccccatcagaaggggtttggtggaggtggttggtcataaggattgaagcggggaggcatttccaagtagttgggctcttccactccgacattcattcttgtgattagcgaattcaattgttgcacctgagtctcataaaaaacgctcctctgcgccatataattctgaatgtgcttgttctgctgaaaaagataattcagttgatcatgtgtgtactgcatggctgggtcgagaggcccagcaatacgttgcggtacattttcttcacgctcttcttgttcttccgcaggaggatctctttaagccggtggttgaccataggggtgcggtggtttaaatctaaacatcgtggccatggaaatacttcgttgtggtgccgcctttgtatcataggagtattgttgtactccatgggcctcacacaaagtggtgataatgtcagcagcccgagtccacccccacaagatccctcaatcatcatatcaaaactcattctaattatgtcccccacatctaggttgaagcacttcatgatggcatagacaaattcagcctgtctatctaagcatcagaatagtgtttatttggtaccaaccttgcacttacgaaatatagccatgcctttgccaccgggtttagttcacacctaaacagctgataaggttctccatcgtattcatgaaacctgaggcttgggtaaccaaaagtttcagctacgtcatcataattcaacctcttttctcggataggctgtttcagtggttgttcttccatggtgaaggttggtaagtcataaacggcatggatagcagctgtggaaaccgacactttagcccccctaacttttactttttcatcctctctttctggccaattggcaaagaattctaaagctagagtttggttatttcgctcagtaatatccataaattttgtccaatgcctattgattatctgctctctaataggctcaaatacagaaggaatggtcctaggttgtctaaggtcaccaatgtctatgcccctatcttctatgaatggtctatccttgagttgtagaaaatgctcttgtgcttcgacattcacaaatctagccctatca

SEQ ID NO: 101776 - DNA, 812 bp, Cannabis sativa
ttgagtgttgcgtgtttgttggtactataaactgtatcgtaagtcattgattgttccattttgcacaacaaactggtatcagagcttggtttgtaatcatggttgtcgcgaaatacaatgtcgaaaagtttactggtacgaatgcctttggattatggagaatgaagatgaaggcgacgttggttcatcaagggttgtatgaggctcttctaggagaaaagtctcttcctgattcgatgtctgaaaaagataagaaagagactcttgcaaaggctcatagtgctatcattttgaatcttggagataaagttctgagaaaggttgtaaaagaagatacaaccgcaggtgtgcgcttgaaactttgaaagtctatatatgactaaatcattggtgaatagattatatctaaaacaggccttgtattcattcaagatgatggaagataaatatgttggacaacaaattgatgagtttaacgagttgattctcaatcttgaaaacattggtgtcaccattaaagataaagatcaagccttgttgttgctcagttatttaccaaagtccattgcgcactattcacccctcagagtttccatctccttgtccctccattataaagattcacgtctttgctcgttaaatgcaaggtttatagctgcatagagatcctcttggtcatggtgcagagcattattatgactttggatgagcccaagggctactcagaggttcagcaggagaccgatgaagagtctgagcggtaccatgctaagtgccaaaaaaggtgtcgctcctatagcttctaattcccc

SEQ ID NO: 101777 - DNA, 533 bp, Cannabis sativa
tgacagtgttgaatcttgagagagaaagagaagatgaacagagttgtattctcattgaattgcagaaaatgaattacagagtttatatacacagtcctctactaacagaaccaacaaaacttacaactcataacagaaagaatacaacaactaactgaaaacagttaggacagttagaagcaactaacttatgtaacagtgtccttgacaataacaatgaataaataactcgataacaactacactctaatataaaaatcaattaggcatcaacacattgcagtaacttagaaaaatactacacaaacaatcttaaaatattaaacaacttaaaagcaactacaaattagttatatatcaactcaaaaatatatgtacttaagaaaaactaaacataaatttctttattagtacaatttgatttgataatttatattagcaatttttttattcacttgaatttctaggaattagcaataagttatttaggaattgtgttaagtgcatacaaatgcatatttataaatgtaaga

SEQ ID NO: 101778 - DNA, 611 bp, Cannabis sativa
gtatataaaggagtgatccaccataaaatgacacctacgaaactcttgcaacagtggactaagcagaccgtgatctgactgaacaactatactcctttgtctttttgatatttccagtttttactaaatacttacgttcccagttcgagtactcgccgttttaggttgaatactcgcaattgttcctcatataatttattcttcttattattattattactcatttttggtgttgaaaaatttgctcgacaacatttggcgccgtctgtgggaacgaagaagtacactcttactaaatacaagaaagaaaatcatcatggttggaaaccaagcaaatggaggtttgaacaacgaatccatcaacatcggaatgatgaacgttccgttgtttgggggtagaacacaacctgtggatgtcatcaatggcggagtaggtcgaggtaatgtcagacctctcaacctattccctgaaattgctgtcccataggccagagaaacatctacaccagcagccacaacggggcactttccacctttcactccggcggcagtgtccgagggtatcgtccagctaaccaccgatcagtataccgcattccaggaccagctat

SEQ ID NO: 101779 - DNA, 589 bp, Cannabis sativa
attataaaatatataattacatacttggaaagacacagcatctctggctgacaaggccacaatatcagcacaagaaacttcggttttagggcattgtgtcttaagagtgtttttaatttcatcaatcacttcgtatccagctacagaccgatttgggggcgcaaacttctctgttgtgtttttcccatctttgggatcgatcaatatcgatgcatcacaaccctagcaccacacacacacacatcttatatatatgaataacaaaatatgaaatatgatataggattttatatgtctatgaccatgtgaccgaataaatatagtgaatacgtttgttttaatgataatatataatgcatgcatttcacgtaatcaacttatacaattaaaagggttgactgatatataagtgcacgtacgtacgcgtatatatgaagttataaaaaaagataaattaaaataaggcttgatatgaatgtacgtatatatatgactcacatattaattaattgtatttgtgtgtacgtgaaagttataaagatgtttgattataagagaaggaatttatagatcaaaaatagagaatgag

SEQ ID NO: 101780 - DNA, 750 bp, Cannabis sativa
tatatacatatatatattcttattttaattttgtttatatatatattatatatacgtaagtattgttatacgtatatatatttatatatttttggtgtgtatttcaaatctttattgcaatatcacattcatataaaattatagagtgatttcgtgcatgaaaaagatttgaataaacatcaaaatttgaaatttttttttgaagaacacgtttggacccaactcttttttattggaattaaaattgactttttacgtgttttagatccataaaacccacatagatctctttattttttcatttggatcatttcgggatgaaaaacacgtaatttggtcgacaaaattcttttttccgatcgggtttgggtcgggtccgtcggacccacgtggctgaaaataggtcaaaattgatccagctggaggttgaagatacagccaaacgacatgtcgtttttccttgtgaaaaaacgacgtgtcgtttttcaagtaagtggcagccatcgtaagcttcaaacgacatgtcatttttcattttatccaaccgtcattttttataaactacatgtcgtttttcatactgtagaaaacgacatgtcgttttacgtcgttgtgggcaaccttcattgtagaaaaagcgacgtgtcgtttttggcatatagctaaaaatgacatgtcgttttcagggcagtaattttcaaaaaaaaaaaaaaggaaaatttcaaatttttataattttttttatttgga

SEQ ID NO: 101781 - DNA, 1133 bp, Cannabis sativa
ctcctgctggtgctgctgtttttcgactctttgctgcacaatttcatcatgtcggcagtttgctttcgtgtgtccaaatttagaggattgggaacacttagcaggtagccattcatattccactttcttgtcttgaagctgcccaaattcattgaaataaggaataaaccgaggtggttcatccataatttccatttcaactaagactttagcatactgtaaccgagttcggttctttgtgtgttgatccaccataatcggcttccctatggtgctaacaagagcacttaagcttttggtacctcagtattgcagacctaaatcttgaagcctgatccacaatggaacagtacgaaccaagttcaaagcatttaaatctgcagactaggggcgaacgatcactggttttcgatcaaaatgcacaatccctgcctccaccacttgatcacgagtagcctcatcattgaacctcaccattatcattcccattgacaacttgctgacttgaaccacacctaaatgaccccaaacccttttgataaacccttcaaaaattgaaatagatggattatcaccaagtaccttgcatatgactgctgtgtttcagttcttctcctcttcttgaacctcttccaaatcgacttgcgctatcttaattccatctctgattagaggctcagtgaacagcagacgtggatcccgattcagtgatttctccttcgtaaacgcctcccaggtttgcttagcagatctcagggtttgttgtttctcctcattcatcttcattgcatcctcaacttcctccgcccagctatgtgttcgaacactgcccgatctactcgaattttctgcttcaaggatatcctgagatcgcaccatctctgctatcagatttaacccctcagttttacgaacttcatcattgtcctccgtttcctcctctctatcagtgaaaatttcttcaataggaacacgagtgactggttttcttcctacttttttcttcctcgccatggaaggagaaagaagagggaacgaaaacacgtatccgggattagggttattacccttaaaaaaaatactcatttttttgttatttttatatttttactcactttttttttttttttttt

SEQ ID NO: 101782 - DNA, 656 bp, Cannabis sativa
ttgatgacgagattggtttcagaattgggagacatgggatgcttcagttgctacgttgtgtgtcaagagggacgcacatggagaccaagggggcagaggcagcaattgttagaggatggttgtatttggaggtgttcgcatgcgagttttatttgatccatatggaagcgccgaggcagtttagtggaatgtgttggcttgttaaaccgccagagggcgtaagtcgcagaaagacatcgatagagatgcgtagttgttgaatgaatgcatcaaagaagccagcagggctgagaagactgagcgaaagcattgagacgatactagagtttgtgtggaagccagagggtcgtgccagcgagacttagttagtcatgtttgcctgcgaaggtcaagaagggtgctagagtttgcatgaaggccagagggctgcatcattggaacttagtacaccgtggaagcaagaagggcgtgatgcaagtgtgaatcaattggatggttgagtgggtagttagtgcatgcatgtggaattccacaggggtgttatataagatagttgactcgagagtcacatcctgcgggatgcacttttagatgacatggtttgcacgaagagttgggtggtcaggcatttccgtgtgggcatgttgtcgaggacg

SEQ ID NO: 101783 - DNA, 552 bp, Cannabis sativa
acatatagatagttttatgaagtatgtgttagaggttttgaattctactctcaaattatttataataaaatagtaaacacttaaataaaaaaaaaaaaactaattatgattttagttccctgaattttaatatgtactaaatcacgtcctcgactttttaaggtcgttaaaaatgctctttgcctgaactattgagattgtttatgtactaaaccatgctctccaaacttttatatataccaaattatgtccctcgaattttgaaataaactaaatcatatcccttgatcgaactttcatctatgtaagaattttttattaaaattgattaaaagtccttaaatccaataatctcaatagtttacagtatttttaacaaccttaaaaattttaggagcatgatttggtacatatcaaaatttatgggacaaaatttctaattaacctaaagaaaaatatgtttttatgcccagccctggatgcatatatatatatatatatatatatatatcgaaagagagagagagagaaatattggataaaacatgggac

SEQ ID NO: 101784 - DNA, 1847 bp, Cannabis sativa
  modified_base (1785)..(1805): a, c, t, g, unknown or other
atttaaaaatataaattatatatgttacctccaaggtcggccctaggcataggcgggataggctcgtgcctagggccaacatttttcgggggcccaaaataaaaaaataaaaagtttcattagacatttatttatgtaaaatcaagtgtattgtaaacaacatatattcatagtttagttggttaaggtatatgacatattatacaatgtcatgtgttcaaatcccataacactattttttaatttttttttatatatttctgaggccccaaaatctaattcgtcttaggcccatatattcttagggtcggccctggttacctcataaagtaactatcttcattacaccacattgtctaatcaagcaagtcgatgctttagtttgataatctgtattgcattgcccaatcaagcaagctcgtgttataatgtaatatcatatataatatcattgcaccacctaatcaggtgagcacgtgccattacttggcactaatatatcacattgtctaatcagaagagcatgtacctatgtttggtacttatcatatgtcactgatgctcgtacctacgcccgatacgtcgccaggaagaaacccaataatggtttcgatctatgccgtaactaggcatttttatatcactaacacatgtacctacgcttgatacgtcaccaggaaaattgcatcacctaatcaggtgagctcgtacttacgctcggtactcatcatatgtcattgatgcccgtacctacgcctggtacgtcgtcaggtatatcgcatcacctaatcaagtgagcccatagattatgttcaatcatcgtatttttattgcttaaccaatcaatctttttattatataacaatattaatcatattttgatctcaatattaatcaattcataacaatattaattgtattacaatacaacgtactatgcagtacaatatacttttcttacctcaagttctggtttaggtatgttggatgatctacttggaaaacgatcgatgatcctaggccctatgtcataacaataataaatcaataagtgtttatctcaaaatactgcataacagttgtaaaggacaacctatggtttcctaccaaattctgtagttcaaatacactaaaatgaaacttatattttggaactaaaacatataccatatgttagaactcgttgcaagcttcaaaacggtatatagaatgtctaaaactgtaatgactgcatagttaaatcatgggaattagcaaaaaattaagaggttcaataattattatgtaattttgtgtttctaagtaggaattaggggttattatcagaaataagtcttaagaaaatattttctcaattacggagatatatttgaatactagatgtattaattatgttatatgtaaatttttattaatttcatgttttatgctcggtaacagtggaatgcgacgtgcgacctatagagtcacttagagttgatttagtatttttgtaatagtggggcaacttagatagagattgggaatgtcgagaatattcaaggtattagaactgaccaaattacccctaggtggtaaagaagccatttggtttaggcaagggcaaaatagtcttttcgccacttgagttcttgtttatgagttattcctattaggtttattaatctgaaattactttttaatttatatgataagtatgttttttttgttataattcattcatttatttaaaaatcaaagaaaacactctttctctcaccaaaacactctctctctctctctctnnnnnnnnnnnnnnnnnnnnntctctctctctctctaaaaagtctcaatctcaaattctcaat

SEQ ID NO: 101785 - DNA, 527 bp, Cannabis sativa
agctagaggctaagaaaggcaagggaatgctcgctcattacatgaactggttggttcctgaggtaagtgagcaactggccagcgctgactacgaatcttctctggagctgctgatgggaggagtcttgaaggaattcataagggtaaatttttcttcacagtttcctttaatcctttttccttgactcagattctaaagttttttctctgtgcaggttggtctgaagttggcctacacttactcccgagctaagtctgctgcctccaagaacgctgctctgtccaacaccatgaaggcggaggtggacttggcccggaaggacgctgatgatgccagggtggagctcggagttgttcggattgaactgggtgaggtcaataagaagctttttattgctgagaagaaagtagccgagttggctaaagatctcgaggcttctgaccagcttgaggctaccattggctccctatcggcacaagtgaatagccttcaagaggaaaggggagttcttcggactgtcttccat

SEQ ID NO: 101786 - DNA, 538 bp, Cannabis sativa
cacaaaataacagaaaaacagcaaaaatccacagattaatcatgaaaagaatattctaaactaaatataagaataaaaaataaaacaaatcacttacccgtagatttttgccgaaaatggtctggtacttgaaaaatagagtctcacactaaagcctctaacttctactactttgtagtagcttggagagtttaatttacaactaaaaataaaaatttactttgaattgttagagaagaggagagaaaagggatgaggttgagagaaagagagtgaagagagaagagtggaatagattatgtgtgtataagagacattttggtactaaaatatttgtatacttatttttttaatagtaataaatattaatttaggaaattaatttaagactaatataagcatacaaaatcaaatttctctttcaattttgctttctttatttgatgtaacaattatgtaatataatatacaacataagtaattctattatagttctatattctacaaatattgaagtctcaatcgtcatcaagtcaat

SEQ ID NO: 101787 - DNA, 695 bp, Cannabis sativa
tttttttttttaatttacggttgggtttttgatgtggtttcttcgatagtttctatatggattgctatatagattttggttgtaatttaggttactccgttagttgcaatagagatttttatgtagaattccgtaaaaataaaaagaaaactgttttaaagtttaaaataataataaaaaaaaaaacctttttttttttaactttttctcaaaaaaaagaaaaaaaacaaacaaatttcctaaattaacttttttggaaaaaaaagtaacatttttgtaaactcgtatcttaaaatcataataatacaaaaactctcctttaaaatacaataatttgaattttcctaagggcccaataacatccagggtgggccttgatcaatagaccgagctaagaacaaagattggtattgcccaaatgaagtgatcaaaaagtctgaagtggccaaaacatataataaaaatattccaatggttaagttaactttcagttataaataaatatttaagtttaatttttggaggtaataatatctaaattatatttctggaattttgtaggtacttaatagttaaatgttaaatcattatatctacgtctaatttttttattgatatatttaaactattttttaaaataataaaaatttaatgatttgaaccaatcaggattgccaatttacttaacacttaac

SEQ ID NO: 101788 - DNA, 529 bp, Cannabis sativa
ttctttcctgatcattgtttttttttaggatcttataatgaagatgattatttgtaaaggacatgaatctggtggactgtatgttcttgatccacttccaccaacctttattgctagtccaagtgtttcttctacttctgaggctcattgttgtttgggccatccatcccttcctttgcttaagaaactttgtcctcaatatagtaaggtgtcttcattagattgtgagtcatgttagtttaccaaacatcatcttattagtttgagtcctcgagtcgataagagtgctagtgtttcttttgagttagttcattctgatgtttgaggtccttctcctatttcgtctaaacctggattcaagtattttgtaattttgtggatgagtattctcatgtaacttggttatatttaataaaaaatcattccgagctgttttctatattttgatctttttgtgttgagattcaaaattaatttattgtgtttcttcatactttgcaaagtgataatgccaaaaaaatatacatct

SEQ ID NO: 101789 - DNA, 845 bp, Cannabis sativa
  modified_base (209)..(211): a, c, t, g, unknown or other
  modified_base (479)..(479): a, c, t, g, unknown or other
atatctataactcgttgaccgaaaagtcttgagcgagacatagatgtacaaactattaattcacgtattgacgagaaaaccatttcgtatataaagatatgatcacaagatgacatcattaatacaaagcgaggcaccaacctcgctacgtatgaagaaatgtaagcgagacatgttaactgtaagaacacttagcgtataatatacannntacaaactaagcataacagttggatgaacttgaatgacaaatagcgaggtatccatctcgttataagaaggcatactcttggcaccttcactaatcagcttcaaacatatttcaatgagactcactgttctgtcgagtcagatctctcagatagaagttaacattcaaatgatgttgcctgttgaggttcatcttgtcaccaagaactgcgattgtcagatggagcattatgtcttcaagcacaaaaatgacgagatttacattatcnacctcggaaagatatgggaaaagctctagctcactactagggttattgttgctatatttccagcgagatgtcccaaagcgatgcgctttacaacgtatttaatacacgtatgcattgacctggtaaaagtagacctattatagctatgtgattttcaaataatagtcgcatttagtttacgtgggacgtaatcaaatcctgtaattttagtggattttgttgtaagatatcagtccaatttgtaattaactacactcctatgtaactataaataggagcaggttacaatgaaaaacggacggaaaatccttaagagaaaaagccctagaattgtatcagaaatatctaataagatagactcgtgga

SEQ ID NO: 101790 - DNA, 727 bp, Cannabis sativa
gaaaatatttttgtaactattattagatttattatatatttgattaattatgtaatatatttttgtattgttatgtattaaatcaattaattgtatgtttgcataactatttttaaatgattcagtatgaattatattttgaatatttgcaatcttcttgtgtgttttgattatatgatttgtttttttgtttttctaatgacatttttcttatgaataataaaacataaatattttattttgtaggtgattcatacaccaaaaataaagaaaatttaataagtagaggtacactcttaataagattgctttgttttcatagttgtgatatatgaattgaaaactaattgtttttctttttatttcattaattttttatatgtattttatgctaacctatggccaatagattattaaactaaatttagtagaatattttatatattattttattattatttatgtaacataaatttatattttgatttaaattattatactaaaataattcacactattttgccaaagttatttaaatttgttcaaaatataagtctattaaaaattagttaaaattaccaatatcaatctccgtataactctaaaaaaaagtgaccacctttctatgcataaatatagattgattaaaataaaattgctacacttaaatgtgtacaattcaaattaagatataaattatttaaggtatatgaaagaattttttttt

SEQ ID NO: 101791 - DNA, 586 bp, Cannabis sativa
gccccataaaaagagcttgatgatcaataatgaggaggacagctgcttggacatctcttgctgaacctcctccatggcagcaagacgattggagcaacaagagaagcagttgagggggcttgttcggattccaccattttccttggatgtcctaggttctttgatctaaccatggtgatctgaaagagagaatgaacaaacaagcaagaagacaaggaaatagaatcgggtaggtggtgagaataaatgacaaaaattggtttaaataaatatggaagaatgaagaaaaaatgaaaccaattttgggtttttgaaaaataaccgccagcccatgaacaaaaaggtaaccgcccactctcttaaaaaatgtttttctcctttccttttttttttaaaaaaaaaaaataaataaaacgaaactagaaataccaatataatttccaaaaatatcccatttaagaaaatctttcaagattaaaagcacattaccatataaaagatcaatctttaaatgaaaacatatcaaaataaatcaaggaagaataaatattgatacttaccaattaagcacaaaattttcttagcc

SEQ ID NO: 101792 - DNA, 505 bp, Cannabis sativa
tagtcacaaccgggtatttcgggccgaacggggttcgggcccgaaatgcaatttggtattaaatattgacattttatttgatatttgataatctgaattttatttgaaaaatttatgagtgtgatatgacaattattcccttgtttgtgtggatatatggaaattggcctctaagggcattttagtagtttagcctttatgggttatgatgggaaaattgtatttttgacaaaatgaattacaaattctggtcattctttctctcttggccgaactctctttccctctctaaccctcttgaaagttttaagttttatggtgaattgcttgagttttgcttgaaaattgaagtggaatattggggaagttattgtgcttagccttgcaagaatttgaggtagcttctaaaactttaattcttatgtttattgctgatttttgatgttggatgatcatggaaaaagggttgtgaagcttggtgttgcatgtgtttgaattttgaatt

SEQ ID NO: 101793 - DNA, 760 bp, Cannabis sativa
tttattgtgaatggtttatctgatgatttgtatggctaggaaatctaggatgcacttcaaaagaaattcgacactaaggaagctaaaactaagatgttccccgttagctgctacctcaaattccagatgactgacaataagtcagtagaggctcagtctcatgaacttcagaaaattgctcacgaaataattctacaggtatgactaccgatgagaattctggtgttgttgatttaaacacacctttttcgttttgagggaaaccattttaaaagatggaacataaaatattatttttcttactatgaaaaaggtttcttatgttttgacgacaaataaacctgttgtttgtgatactggtaaggatgatgaaaagcagaagcaaactgctgatttagcaagctggctcgagaatgattttttgtgcaaaaattatattctgaatggttttatctgatgatttgtatgactactataattttgacaagattactaaggagattcgagatgcacttcaaaagaaatacgacactgatgaagctgaaactaagaagtacgctgttagccactacctcaaattccagatgacttacaataagtcaatagaggctcagtttcatgaacttcaaaaaattgttcgtgaaataatttttgaaggtatgtctttagatgaataattctaaattgttgttattattgaccaattgcctcctcgttggaaagattctaaaaatattctcaggcacaaaataaaagaatt

SEQ ID NO: 101794 - DNA, 715 bp, Cannabis sativa
aaagacttgcagttgggtgagccattgttattataccgaatagtgtctctaaagagactttgaattggattttcttaaaacagaggcttctttctttacacatatatataaatatattttgcttgcccaaaatcacaaaagaggcaagtatcagattatcacattgggtcattctttgtattatttgttgatagactgtgcagcttcatcatatattaaattcgtttatgttgattgttgcattccattcttttttctttttctcaacttgaaaatgtgctttattttgattatgtctttatggatttatataaggagatggcccctttttattaacagaaaattaatgtataaaaattattgccaatatagagaaaaagaaaatatactttagcaataatgagccacagatagatttttcgatgagctcgcttggaactgaaccgatgaaattgtttcctctcaagtctctaaaatggaaaaaaagtgtttctttgctcttcatcaaataaaattatatattcatatcattatatatttaaatttatatagtaaaaaaacttacaaaacttttaagttctgcagttttgaaagaaatgtaggcaccgatccacttaagttattgtttgataaatctctgaaatgatacatatataattaatgctaataaatctctttactaaaattttactatataaattcattataataatat

SEQ ID NO: 101795 - DNA, 597 bp, Cannabis sativa
agttattagtacattttaatagtgaattccattaattttaatttaaatcatagactcgacattattctcttaatgttggagtttagtgaaaggttgaaaaggaggctgatttactttataatttgatgccgttttaaagattgaatgttagtatctcattcgttgtcgttttgattatcctgttgtttgattacaccattgtggataacgtgttaggtttcctaactcttttgcattcattggtggcgtcgggtcagtcaccattgcaatcccaatttaattgggtcgtttctcttttctagtcatgctcctatggtttcatattgtcgttttcattttcccatgtagaatctgctgtcattttcttacaatgttgtagatagatatcatgcctcactgagtaatttcaacattagccgttacaagatacacaagctattgctaggatcatttgataaactatggtgatttaatatttgagaagtataatgaataagtaatgaaaaaaaaaaaacaaattctgaaagcatagcatgacaattgacaagctttagttttgtcaagtctcttttaaggcaaaaatcattgggactcata

SEQ ID NO: 101796 - DNA, 675 bp, Cannabis sativa
acgtatggtagaaatgagattagatgtatttggaattaataaaagagaattgttattaaatatcagtagtatctgacactttttataggtttcgtctgtcttaaaagttattttttaagttatataaaatttaatacttaattcgacaagtaacatactaaaaaaaagtgttaggtactaataatattttttagccttaagaaccttttggttagatagtgagagttttgtttgttttgtttctataataataatagtatatgtatatatacataaatataaaaaattgcatcatttttatatgcaaagcaacaaaaatgaaaattcaattgagtctctaatagccaccttttatattcatgctaatgttgcatcatgaaagcatatgctactatagcaatattttcatgcaatttcaacatctaattttcattaattttctaagtaaacacactaagtatgtttggtatacaggaaagaaaatttgaaagaaagaaaatatgaaagagacaaagatagagcattttataaaataagccattttactattagaacaatttaatattaaaaaaattaacttattttacttcaataaaaattaaatctaataactaataatacaatgcattatttcactaaaataacaaaaatttataagaatatacttgtacaaaa

SEQ ID NO: 101797 - DNA, 1137 bp, Cannabis sativa
  modified_base (175)..(176): a, c, t, g, unknown or other
ttgataatcagataaataaactgcttctgatttagagatctagggaggaagacttagttgatagtattgctctattgaattaaagtaattgctatgtattgaattgaggtaattgctatggatcaatcaggtatgcatacctaattattatatattattattattgtgttctatnntatatacaaattgatcttgggtttattattaatttttctaacatatccatattgctgtttccagcaactcttcttgctggattcttgatgtgccttctggccatttgattggttcttcatgtactctcaccagcttctgttgtgccaaaagtgatctgatttttcttctccatatcctgtaatcaccaggaccatcaaatctatcaatatctaacttgatattactcatttcagcaatgaaatctgaattaacaaagttttgagttagagagttttcaattggatcattcaaaggaatgtccacaaaatcctaaagtgcataatcttcttgctgtgaatcaagttcttccaactttgaatggctttcttgatcttcttatgttgactttctttagcaagaaccttgctctgataccacttttgagaattgtcaaaaatatccctacacaaagtcaactcacacacaattcacaaggtcaatcttgacctttatcaactcagcaaatggacacaaactgtccatgtatcacattcaatatcaacacattacattaattaaaaaaccatctaagtttaccaaattgaaagcaagaaaagtgatcacgttttcttagcttagtttcgatagggttaggttcagaaatatgcatgcaatgttcaagtgattgagtttgattatgcagaagaaaattaaagaagaagagaagcaaacacaaagattttatagaggttctccctgagttgatggggtactcctctttgagctcgcctcagaaatgagcaaagcccttgcactattcaatcaagatctaatacacggcttaatggagcttccagttacaagatcaagtggtaagactcgatttcctctctttgcttagtttcctctatttctacttctttctttttcaagaacactctttcttttctctcaaattctcactcactcactctctctctc

SEQ ID NO: 101798 - DNA, 810 bp, Cannabis sativa
ttcttgctattcttccatttcttcttctttgcgggttttgaagtggaggcaatgtttgcctcatgctttgttgtaccaaccgtagaattactagaactaggagctttgtttcctcctttgtgcaacaaattgttaaatgtctgaaggttgttgatcaactcgtgaaagtcgaatgtcaacttgttcatgacataatttgaagtaaagggcaaaaaagttggagttaaactatttacgattaaactcacttgagtttcttgatctataatagctccatgattcttagcttcctggaagtaactagccatttggagtaggtgatcatgcatattctgatgaggtttcatccgtgcattgataaagttcttagtcgccttaaaatgagcttaatctaacgccatcctaaacagttcagttaattggttcatgatttctgcagtcatgagagtgtttacaaaccttgttttaaggtatcaagcatgctagacagcctaaattattgagctttattattagcattctactaatgctcgaacttttccttatctgccttggttgcagtctcacctggttgctcaggagcttctttagttaacacaaacagtgcactttcacttatgagagcaatattaatattctctttttatttgataaagttagctccagagagcttgttgttagttaacagtgacacaattgggttgttgatagtcatattgaaaactataaatatcaataaatagaaatcaaataaggtccaatacaaaatcatacacattcagaaattattaagcatttagcaagtaggaa

SEQ ID NO: 101799 - DNA, 1186 bp, Cannabis sativa
tttaaggcacaaaaccacccaacagcctaataatggtttgccccctgtggcattttcgtaaagacaagtttgccaacttagttggccaacttagctcttttttatcttctatgcttcgtacttttacattcgaacttaatatatttatgtttgcttgtgttttcattcacaatgttaataattatattttgatcaaatgcatagtactcttggtctttccattgctcgtgtttttcctatttaagtagttagtaatctactatatgcgtgggcaatttgttatctgtcaggcttttgatttgcgagcagttatcaattctgcctcgcgataacagttataatctgttttaagcaaacttgaatatactatttaatgatttgtcactttgtatatttttgattgcgtatatgaataggtatatcgtctattcatacactaggtttaagtacttttatcaggacaccttgatgtctcttttaatacttttctatattgtgcgagtcgttaatattcagcttcacacccgagttacgagttatatctcatttataacttttagtttttctttctcgtcagacaggtttaatcaaaaagttacgatggtttgatccctttctcttcagaaaagtttgatcaaaaaaatttaaagttgtgggtttggactatatcatatatttccagataaattctggttagtcatacacatatgccccttaagtaattttaaagagtaacactttgtaattaattaaacaaaagaaattattcactttgcaaacacttatcagtcgacttcgaaatgaatctgttaggtgtagccatccttcctgttagggcttggacttccttaggctttgttggtgatggcatatctatcaaagccttgattttctcaggatttgcttcaatgcccctcgcattgactatgaatcccagaaatttccttgaggaaactccaaaggaacattttttcgggttaagcttcatattatacttctttaatattttgaagcattctgcgaggtccatggtatgactcccacttttcgctgattttactaacatatcatcgacgtaaacctccatgtttcgtctgatctgattcgcgagcatctcattcaccaatcgttgatatgttgccccagcattctttagcccaaatggcatgactttgtaacagtaaag

SEQ ID NO: 101800 - DNA, 876 bp, Cannabis sativa
ttcgcacaatgatccattagtcgtggaggtataaataacaaataaaacaatggcccggacaatgatagataatggagcctcagcaaatattctgttcaaaacaccttatgagaaaatggggctccaactcaaagatctaacccgctgtacccaaccggtatatgatttctccagcgagagtgttgcacctttagggcgacttcgtctaccccctcactattggaaaagctctaaggagcataactgtgatggcacaattcctggtaattgatgtttcattagcctttaacgttatgttaggctgaccaaccttatatgacttaaaagctgttacatcaattttccattcgtgcatcaagttcctaataaataatggggtagggtgcctaagatgaaacaaaaagttgcacgagaatgttacaaacttgccctgaacaaggccaaaaaggaagaatcctttggccagagttcggacaggggaaaaaatattgccaaatagggaaccgcccaaggcggggatgaagaggtggatccccggcttggggaaccaaatataaatgttaggccagtggaagaattggaagagatagaaattgacccgaatgtcccgaccaggaaactcaaaattggaaaaggtttgttgcttgaagtaaaatcatctttgataaaatttctaagagcaaacctagacatttttgccttctcacatgaggacatggtcggtatcgatccttctataatttcacatgccctaaacattgatgcgaccttctggcccgtttagcaaaaaagaagattgttggacaaagaacgagaaagagtattaaaagaagaggtagaaaagctgcgcaataacaacttcatcattgaggcttt

SEQ ID NO: 101801 - DNA, 615 bp, Cannabis sativa
tattgtgatgcatccaaatagggtctgggatgtgttttgatgcaagctgacaaagtcataggcctcttgtcaactgaaagattatgagcagcactagccaactcattacctagagcttgcagttgtggtttttgaactaaagatatggctaaattatctttatggtgagaaatgtgagatttctactgaccataagagtctcaagtatttttttacccagaaagatttgaacatgaggcagaggaggtggttgaggtactttgatgaagaaagagtggctggtccgccaagtaatctagattgggtaaaagcaggattagttgtcagttttttgaagagattctatgatcttactaatcggtttagtgggtcattatatgtcaccactactacaaaaaacccttttaatgtcccttttttaagtccaacaaaattattgttggacataaatttcttttgaaaagttttctagtcgaatattgttagactagaaaaaaaaattctatcaagtccaataaagttggactagaaaactattagtcgacgtgatatatatttttttttcttaaaaaaaaatggtttattttgaagtccaactgtaacgccctaatgcta

SEQ ID NO: 101802 - DNA, 1198 bp, Cannabis sativa
cttgaagaggtcagactagaacaaagatgagggtagtcctcgtacaagagttgaagcaaatcctggtcaattcagtgttcgcttccccaaaactcacaagggtttcatctagaaaagataacaagatgagtgttcggtagggatatcgaacaataaacaggcaaatatgccgactaggagtacttaacatattaaagaatagaaatatttgacgaaaagtcataactcagaagtttgaaattctcgagagttagggaaaaattttcacaaagctttgaataagcaaggtgaaagacagacattgtgcagtcaaatggcaagcattatgaattgtgaagccgcataaatcaatgcaaaggaaaatcgtagagtttctgaacctagggttttctacctatcttctatagaaaaattaagatcgcattcaaaaattcaatgtgcaaagtaaaagtagatggaatcgaaaacttactcactgatcgacgtctagatttagtctacctgatgttattcagatagttcttgtgaaaatgtcacggaaaacttgaagcgaagaacttctctttttgctctaaacttgcttaatggagaagttggtgaaaatgagtttgtgaacaatgctcagtcgtatttataggcagagaaaaaacaaaaagaggtaatcatttcaaatacctcagacgcctctgtttcccaaaaaaaaaaacaaatattggaaatcaaaagtaatcaagtgtaaccgtcaaacgtggtgagagaaaattggatttcaaagcattaattgcatcagagcatttattagccgaaaattgaagagacacctagccagcctcacatcgaatcgcaaacagacacacctgacatgtgtcacccatccaaacggaaagacagcttggatgaagtctacacgcagcttcggaagtcccgtacagacttggggggcaaatgttatcccaatttttacactctgatgtggcatcacacgatggtgacacgtggattcaactctggggtacctgctcgcaagaaatatgccaaacaagacaccacgcacatttgctcggacgaagtcctcttaaccgggtagtgagcaatccgcacaacatgccgacacttagcaaattcagctttcgtatcatgagtcatcaaggaaatccctataactttgggatcagattacagagatatggcaagctat

SEQ ID NO: 101803 - DNA, 689 bp, Cannabis sativa
agaaacaacatcaaattttaagttatcaaaatctatgaaaataaataaagaaaaaaacagatttcataaacacaaattcaaacagtaaaaccccagtaaaactcaaaaattaaaaacacacacaataaaattcaaataaaaatcttaacacacacattaaaataaaaattaaactatatatgaatcaaacccacactcaaatctctcttcttcttattctttggcctggtctttgttcaagaccattaaattgggtcccaataaaactattaattaagtttagaaatttgaagatttatgctactatgtttcgaattctgatatttattagcaaaaaatttaattttttaagtatttatatcgtaaatttcttgatagtaaagttaaaattttaatataatttgattaaataattattattaattaaaatacataatttattttatatataatttaaaatattttatacatccaacgcaaagtgcaagatgtttactagttaaaataatgtaatacacaatataactatatatgtttatttaaaaaagacaaacacctattttatttattctatataattactttttggaactattacataaaaaaatataaattgacattttatttacaaaaatacctccataaggtaaagacaacatttataccttttatgtgattttaattactaa

SEQ ID NO: 101804 - DNA, 662 bp, Cannabis sativa
tctaaaaatgcaatgttagattttttatttattagtgcagtgtacatgactttcactttctttaggtgcccgaaagtataccaaattaaggagccttttctcagttgtgtatagttccatttaaaaatatatagctcatgtgattgcagagacaacaacagctcgatgtggttattagaggtattagttaattcctagaaaatttcacatttaaaaattcacaatgattccttagttatatatatgaatgttattgccattaagaaatatggctttagctttgattttgtcttatactaaaaaatgcgcttatagcaaattgtatgattaatcctgtacaatttatatgcgtatatagtgaatgaaaccaaacatcattgattgaaaatttggaattagataaaaataattacaaataacactcaatgtgtttggatagtcaaattctctatgtattaaaacattattatgcatttttttaagatttcttttgcgggacattaatttaggttattaaagatactgatttttgagataaggcatttagaagattttaaggtaaagtatatattgatgttgccaatgcctgccctgaggtgttcatcaaggcctttgatactaggcgaaggttacatgatttttatacagcaatatttaagtct

SEQ ID NO: 101805 - DNA, 674 bp, Cannabis sativa
aaagatgaaactggaaaagaagagcggtgcttcctgcaagattctattcaaatatgaggatcttcctacattttgcttcatttgcggtgttcttggccattcggaacggttctgtgataggttgtttgagactcctcttcatttgattgataagtcgtatggcttggagttgaaggcagccccgaggagacgacactacactatgggggctcaatggctccgatcggccgtcgtggcaaaggctggtgcgtcaagctctcatggaggtgagaggggacaacacaataatgatacagagaaaaatccggggatggggaattcgccagcaaacaatccgaatatgaatatagattatggaaagaatcccactaatcaagccgctgaaagcaatggagacatatatggcaagtcaaaagccattgaattgattacaggatcaaaggataatgatgccgtgcctagtatccaggtggttgatttgaaaataagaaaaacaataatggacagtgattataatggggaggaggttgatgagttggttgggccatatgataaaatggtcaatgacgttagtggggttgagtatgaagatgtaaacatgggctttaatgatggggttaatcaaaaaaacttctttggggcgggttctggttctcaggcccgccgggcattat

SEQ ID NO: 101806 - DNA, 1111 bp, Cannabis sativa
cttaaaaaatgtaacaatgatggttataataaaaatgtaaccattgaaatctcttctaaaatataatatattctatcaatatctatatctatatatctgtagaaagaaaatgtttaaaagagtaataaaaggccttttataaattttattctaatttatcttgtttttcattttttttcttacattttttttttactttctaaaattttagtgatttcactttttattgagttaaatttaaagtttagggtttatttttttttactttggtttgtgcaaaattaatatgacataattttgtatgtgtaattgatgattcttgcccaatcaacatctatctatatatctatctatctatctatatctcgttataaatgagaaacttaggtgataacataacgctttctatgaattttatttaaatttatattttttttttgtcattttctttttacattttttatttactttttaaaattttagtgatttcaatctttagtgagttattttaaaaaaaaaatctcacataatgtagtgttacacttagagattattcatagataattatttctttcatttgttttttgtgcaaaattaatattacatagtttttgtatgtataattgatgcccaattgcttataatttcttaaaaaaatgcaatatatatttttgcattttttaatttttatcaaagcttaaaaaattattaaattattttttataaacaaacataaatttttattaaatttcaattattttagttttttatttcaaaatatctaaaattgttaagtgtttaaaataattcaaaatataaataagcacaacaattcataaatatctataaagcaaacacaatgagcaattttttaattagatttttatattaaaatttaatattctatataatactaaaaattacaaaacatataactaataaaaaatttatcactaatatgtgttaattttattaataatagaaaatttaaaaatggcactaatgtatgtaattattataagaccttatgtttatactagcaaaaagttacgtgcgaggcacgtatactaaattttatgctagattttttttacgttatttaaaagtgata

SEQ ID NO: 101807 - DNA, 721 bp, Cannabis sativa
ttattgcattaaacttgaatatttacatgaattgtctttgagatttttaaatttctgaaattagtttaaatttccaattcacccccctcttggaaacatatcttagtctaacagttctgcctctttagcaatcaaggctaactgaaccactttcttatataacgtgttgtgatcagtggtaatcttcaagtcccgactaatggcggcattcattccccttacatacttttgtttccgggtgaagtccgttggtaccagatcactagtgaacttggatagacgatcgaattgtagggtatactcggccactatcttcttcccttgggtcaatttcacaaaatcttccatatacgaagttcttacagcaatgttatagaatttttcttcaaacagggtaggacatggtactaacgtctcgagtctgacccacaatatcccaccaaatgcgggcatgatcttgtaacatgaatgcagcacaatgaactcgttatgttcacgtcatccccatgttatctaggatgcgggtaatagtgctcatccactgctcagacttgatagtatcagtacctcccagaaacgttaaaggttgcagcttaacaaaacattcaagcacagaatcacaatatggcagaataatgttggatattattttactaggatcttagatctactcacaagtatgttgtttaacaccctaaatgtgaactttctaaaacgataa

SEQ ID NO: 101808 - DNA, 1126 bp, Cannabis sativa
taacttttttttttcgttcaacagctagcatattgacattaagtatttagtcataaagagacatgataagtggtcattaagcatgcaatactttattgggagatcgcatatatatcattgactataggcatgtcgcaacacaaatttaaggatcgtaaaacaaatatgggatccgattaccccttatgcaatttttggttgtacaactaaaattattaatgaaactcttagttttatattttctcatatttatgcgtatcttaattttatattataaaaaattttagaggagcagaataaacataaggcttaaggtttattcgcttaagtatattgtctcataaagtacattgttaaataatgaatatatcaaaatacatagaaggtaatacttggcatacaatgaggatctattgctatgattcatgtgtttattatataatgaagaacattgagtttacgtgctaaatctaaatgatgaccaagtgagagaatattagaatatttttatatataaaattataaattgattttacatgtacaaatatgaaatattcattataattgattccaaatcaattatttgataaacataaatattttagatatggtcaatttcgattcaccaattttttttatttgatttctcgaattaattgttaaatattctgacaattaatgttgtacatatagtgataaagtatctcacctataaatattggaccggtcctcgaactcctcattcattatgtataaagaacaaaagcttgaaagtctaaataccgacactaactcattctcttttctttttttaaatattttattattttcatataatatctaacaattgacatcagatgtatgtgtatatattttttttttctctgttgttttgttctgttttctcttcgatcatgaccgattgatgaattttttttttttttaattttaatgattttgatacatatttgtattcatttagtaagaacattttctatgcatcataaaattacaaccctatacatcttaccattttgatggggttgttcaagaattttcaaagtaaaatatttatatggttagagagaaataccaaatttttgacaagatatcgagtgtgttatga

SEQ ID NO: 101809 - DNA, 903 bp, Cannabis sativa
tgtctaggtggttagctcgtgcttcgtgtgctagcttggggggccaacatttggagcttcatgttcagcctcgttagtagaagctttgaaattgaccttgttgtcgcgtgcatcagctgcccccaggtgccttgggggccaggcctgcatcaggcaagtggtcaatgcacctctcagattcttggtctcgcttcttctctggctcttgcttttctcctaagctctgagagatttagagagatatgtttctatgattagccatgagggtggtgagagcttggcctttggtggccatgaaaggccaagcttttttgtgagatgcttttatgttggccgagtctcaatggttaacttgagtaattggcttgatgctccaagtttttgtagaatctaccgcaactgctaatcggtgtacacctttataaggtgtatctggaagtatggccttagctttttggaacccaagagtaagctgtgggtcagcttctctaggagtgggaaccgacttagtgtcgatcaatctcttgctggtgtagtatacaatgttgtacactgtcttcttctgttgtgaggacaacactcacaacatgttttgtgattgcttggtccacatctagctcttctttatctagggatatgggcaacaaaagtggccgagccaatctgtttcttcagctcttggaatgtgatttcacattttttgtccactcaaatttgtcgtttcttttgcttcatgttgaagaagggtaccatttgtctatatacttagacacaagtatgcttagtgtagcagtgcatcttgtttggctttttacttccttgattgttgtgggagacttcatgttcaaaagggtttggatcttgtgtgggtttgaaattcttcatgttgtagctgcaaaggat

SEQ ID NO: 101810 - DNA, 796 bp, Cannabis sativa
gttctacccactcaaactcatatcaccacatatggatagtccaatgtggcacttaatacctaaaaagataaaaatggcaatttgctaacagaatacgagttcggaaggttttaccgccaaaaaattagaatcggggttaattgcttgcgagataacacttatagaatttatgctgtaatttactcattttaatataatattttacataatatatatatgatgggtatcgtttactgcaacaaatttattaattttttttaatttcaatattatcaattacttcaatgtaacgataaatacatcgaatccacaaagactattatcaatttattattcaagaattagtactaaaaattaaaaaaaaatgttttttaatataaagattaaataacataataaaaatagataatacactattaagaaatagtttagagtcaattttcacccttaataatcattcaagattaataataataatagagtaatttgcggcataaactccttaagtgatcagatttttgtaactaaccctcaattctaaaattttggtggtaaaaccttctaaactcaagttctattagcacttagccctttccatccatttttgggtgttaagtgccaagttggaatgtccacgtgtacacagtgtacacgtggcacaattttattggtccacaattttagtgtttattttttatttttaaaataattatttttttttattttttaaatattaatttacgtggaccaataaaattgtgtcacgtgtacactgtgtacgcgtggacattccaac

SEQ ID NO: 101811 - DNA, 695 bp, Cannabis sativa
cagaacaacaattaatcatcaattttcaagttatgtaaggtaataaaaatattcatattccatttactaagaaaaatttaaatctagatatttacttgcatcatccaagttgcctttctagaactagatttagcttagtaaattgttactcatggccaagtaataacaatcaataaacagcaagctcacttgaatgaagaaaggcaaagttgctaaaatatacttaaaaataatcataccaaacataggagttcatagccattcaagcttcaacaggcttagctcatgttcaaaccagaaaataatatccaaaataaaagttgatcatccatgactgctacttagttttttacaatttaacaaacttcaagtatttaaagaaagaaagataatagaagaaagagaatagaaattcaaataaatgaagcttgtgatctccttctttttcgtgtgagttcctctcttaggctattcattttcggtactgtactttctgcaattaattttctctaaaaatggcagcttagctcatgctgaagaagatggtggctgtacttggtaaattgctagctcctcagggtacactgtaataccctaaaaatagaagctcattccttttcaatcttggcacactaggatttgtctcctccctctataacagccagttggcataactttgagtggctgatacgtac

SEQ ID NO: 101812 - DNA, 506 bp, Cannabis sativa
atatatatgagatctagtcatgtacaaaattataagaagaagagtatatcaatattgattgctttgcacatataaaaatagttgttgccatgttttttttttttttttttgagaaaatttccatgcgttttaaacacctaattaataaaattataatttgacttaatttttttaataattttttaaaataaacatttttattaaagtatatctttcacaaaataatttatatttttgttatcacgcgtctaaatattaaaaagatgtgttgtcacaattttggaaaaagaatgataagtatatcagataagttgtagtatttttatttattttttgaataaagtgtccatttaaaataataataataaatataaataaagagactaacttgtcaaatactgttaaaattactatttatttggatataaaattgtacattatttaacaatttggtagaaaatcaattattttgttgtatttgcttatcataacaatgttttacataa

SEQ ID NO: 101813 - DNA, 754 bp, Cannabis sativa
tgaaactaatttaatattaattagttttataaaataatttttaatttattgtagagatgatactcgattatcactttattacttgtttgacgattgtgtacatttgtacataatttttcccaacaagaataaagtgccaaggtttgggaaaaggtttctcaagctttcagggaaggtggttcaagtattgcttcgggaggaagcaagcacgtttcaagcaaatcgaagggaggtcgtattcttgaagagtcaacaatgttcatttgtcaatgtgtaatacatcaaacttgtgacatataataagagggattttttttatgcataagtcaaaaacttcgtatttttgagattgtttacccaaattcgactagggtgacatggtgaggatgatgacacgtggcatgagagtaccccgagactaaattaataaggaatatgttaagtcacttgacacaaggatacaattccagaaaaagaaggatggacccttagtttgagctatgtacgagaggaagtaaagctaatacatccccctaaggtgggtaaagtgaccaccccgaacatacattaagtgactatcccaagtgggttgagtgactaccccttgagagtgggttaagtgactaccccatggggtatgttgagtgactactcccggggtgagttaagtactactcctggagtatgttaagtgactaccccagagagtgggttaagtgactacacgtaggtggttctaccctacaaaatgata

SEQ ID NO: 101814 - DNA, 615 bp, Cannabis sativa
catggtgtccctgactcaggatgtaactacaatgacctgggagaaattccaggagctgttcaatgccaatattacaatgaggcagtcagaagttctaagaaaaaagaatttacccagctaacttaaaaagagaacatgagtgttactgaatacacgactcaatttgatcgtttggtgcagttggcctcgggaatcatgccaaccgatttcagtaagaaagagaagtacttggataggttgaatgcgaagatcagacacgatttaatgatcactactgatgacaacaccacctatgttgatatggtgggtaaggcactgcgagctgagggcttggtggagtgcactttagagtctagtgggactccagttgttggtggagctcctactcctcctacaacaggctatagtaggggagtagtaactcggccactgatcagaaaagacaggcacctactgcatccagtggctcggatcagaacaaaagggattgtccccaactcaagactgaagcaccgacaactacagcaaaacccactccagcaacggtgtttgcgataacttaggctgatgcagaagccagcccttcagtgttaataggtcaactctcggtcaaca

SEQ ID NO: 101815 - DNA, 1312 bp, Cannabis sativa
  modified_base (693)..(694): a, c, t, g, unknown or other
agtatgcttactgtgtcccctgatttgattattcttttgacacccgaacggagtagagattgggtagtccaaatacctctccagacaaagcttgggttacttcctagctctgctgacaagaaatcagagtgttgaaagtatctagctttatatacttttccaacaagatatctggattgcaaagtagacgccaaccttgtttagcgagcatggcaatgttgaaatcatgcaagtgccgaaaacccatgccaccatcgtatttatgagtagtcatacaatccaagacctccaaataatacctttccctttactagaagatgtcttccaccaaaatcgggccataagtttttcaatttctttacatgtgccaagtggaaggaggtaaacactcatagcatatgtggggagcgattggataacacttttcaagagaatttctttgtcggcacgagaaagaagtttagcatcccaactatcaattcttgctattaccttggtcttcaaaaatcttagtacaacatttttatttctcccaataatgtttggaagtcccagatagaggcttccttcagaggcttcagacatatggagaatatcacaaatctggacacgagttgcaggacacatattaggactgaagaacacaatagacttagaaaagtttaccttttgtccagatgcagtttcaaattnnattgagcaagtttgagacactgccggaagcactagtagttgattgacaaaacaaatagctatcgtctgcaaagaacatatgagtgataggtggtgcctcatgagccaccttgcatccttgtaaaagtcgttgagattcaaacttcttgataagtgaagaaagacctttaatacagatgatgaaaagctatgttgaaagagggtcaccctgccgaatacctctcgaaggaatgattggacccatattgaggcttccatgaataacaatataactgaccgaattgacacatgccataattagattaatccatctctcagagaaacctatacgagccataacgagcctaagataatcccactccacacggtcacaggccttgctcatatctaacttgagagccataaaacattttttgcctttagtcttcctcttaagataatgcatcacttcaaacgccaccataacattatctgaaatgagacgtccagggatgaaagcgctttgggtatcagaaatgacaaggttgtaacaccccgatttcccgagatgtcacataggatagtccgtataaaataatttaataagataaagacaatcaaatacttctttattgaaaaa

SEQ ID NO: 101816 - DNA, 590 bp, Cannabis sativa
cagaagccatgagcttcagagaggcgcttagttgggtaaaacaatactcaaatttgtggcagcaggtctttgctgaaaccgactgtttggttatggtataatcgttgaggagttcctttagaatgatttcagtatttggtgatttgattaacgattataaaatgttgcttaatgattttccatttgtcttgtttttatttgttaaacggtctgcgaatgtggttgctatagttttgctagagcgtctcgttcataccttaaccgtactttcagttatttggtaacagagtttgatgcttaatgaagcttgaattttcattaaaaaaaaaaaaaagtatatatatatatatataaccttaaatagaactaagtatacatctagtgtatatattctgatggcatcattgtcttaatactatacatacgtccaaattttgatgaagcaatacttgtattttttttttctgaatagacaataattttatttttaattataaggctgtggtaaaatgtgatttttgtaatattaaaaaaaatagcatagaattgccatgcatgcaatgtgtacgtacgtaaatttgagctgtact

SEQ ID NO: 101817 - DNA, 523 bp, Cannabis sativa
atgtatttttcggcgtgaagattgagtaagagattgtaacaggatgttgagggtagcactcctacctaaatgttgatatggacccagtgtatcccagtgtatagttgggcgtacactgttcatttgttgtactttttcaattcatacaacactaaaatattatttttaaataaaggactgcttgtgacatgacaggatacacttcccaacgaaacaatcagtcatgccccattatgttgtacgtagtagcctttgaaatagggtttttttttggcaccaagatttatcaacttaaatttgaaagtgaaaaagtcttttaaaaaaattcattttccccccactaactcatatccaacagcctatatataaacaggtccccactttccttgtggcaaaatgaataacacacattatctccaccatagttagaacaagtaaaaaaataattgtatacctcacaaattatagtacatcgaacatggtggctggtggtggagaggactcatgcgggttcgaggggggt

SEQ ID NO: 101818 - DNA, 1530 bp, Cannabis sativa
ggggtccacaaataattaatttcataaataatcataaaataacagaaattagtgcaaattgccttttatcaatccaaattactaaagcggtcattacatgattaatggaggggtctagattaatcaatttcaaaaataagtttttaatagatacaaatatttaatattgagaatattaaatgattaatcaaacaaagtgagcctgaaggaaataaaagtatgaataaactaaatatactagaacctaattctgtatattgatctaataataatgtggtggtttctgggatctggtgctacattatgtggtggtgctacattatgtggagggtctcgttcatatgatttagcttgagcattcgaatgagatagaacgtttgtaagagttataaaatgagctacacttacttttagtgcaagtgggagattgttgggatttatgccctaaaaataagtaattaatggataatatattagagaatatatgaaataaaaattataagataagtgatatattaatgatacgagtataattattaaatatctaaaaattccttattcatatggagaaggtataatcttgtaaggatgtagaagataattaagattatatgatatgaataaaacaagttggtagtgtattaaagtattaaaactctttaatatagaactgctaagtacgatttaatatacaacatctagtgtgtgtgattttaatttgaatcacatatattgatagacacgtagtaaatgtactgtgtatgtttagactatacatgactgaaccgatatgtaataaatatcttttattaactttctttttacaattaaaagagtttatcataccacaatgatgatcattaatagatcagcctgaatcttgagtatacataaactcttatttgtgttcattgagttctttgattcactggttgaagtttcttagagaagatcattcttacaacttctactttgggagcttaataacatgagtggctgggaacatgttatataatagtggaatccaagctttcctaatagatcaaatattagttcccttatagtgttaattttgggagtactagcagttggatcaaaatctataataagttataaattaactgttcacattaaattaatggtacataaatcaagagataattagaaggataaaacagtattttgacaaactctaattatgaactaataattggaggacaaactacttatattgattatatcaatagactacaagtaagaattctataaatataattctatattgtcaaagagtacaatttcatatttatagtggcgtaataatagaattaataagtcagattattctattgatgagattgataataatcttgggtttattagaactttaaattataggtacatggtccccgagtcacttctatagatcactgtccatgggaaggttttatttgatgaattaatttcgagtgagaattaatttctatgggaaataaattcttaagcacaaaatagtaatttgtgaaatta

SEQ ID NO: 101819 - DNA, 550 bp, Cannabis sativa
cagggttcgtggggggtttgacgacgagagggagatggtctgtgttaggtgtgttcgtggtttagctaggggagatttggtgtgctaagtgtgttaggaccctaaattgatttttttgtcaaaataaaatttaataataattcaatctaaatgtgttatgacaaaactgtttatattttctgtatctgttcgtgttaggaattgtcttcaaattggttatattaaaaaatgttgtaaaaaattaagcttatagtcttatttttaatgtccattttgtcatttaataaaacagagggtctgtaacttttgcaaaatacaaggtctaaaatagtatttactcgtagttatataaaatttttagagacaacacttaagagacatttacatttttaggagaaattattattcaatttttatttttataattatgtacattatagttataattataattatagtaaatattttacttattttaaaaatttaaaataatttaaagtgttaaaataatggttaattatcattcaatttcacatgtgaaaaaaaaaat

SEQ ID NO: 101820 - DNA, 639 bp, Cannabis sativa
aactagatatagtcttgttcctccactcttgggttgcccaaatgtgatacaataaggccaaggcaacccaaagtccttcttcaagcttctttcaaagtaatggaggtctttgctcagttgacctcaccaccccgaaacttcattccttggcctttcaccaagaattttcttcttgaaagtgcatcacgtagttttaccactccatcggggtatactctcaccaccaagaatgatccatcacagcttgaatctagtcgagcatgagtagccttcgttaaagagttggtgaaaattacttgttgcccaacttcaaacatttgagaccaaatttttctactaagcttctttttatttcgctttttttgggtggtattttaggatcaaataatgttttgtctttactttctcgcggctcgtgatccttagcaatttggggaatcttctttctcaccatcttactatttttgaatttggactcttcaaccatgttaggatccacatcttcaattgctaagcattctcctattgcatacggagcacgtataggatgaaagaccttgaatgtgccttgctcattttgagctctcatggtaagctctcctttttccacatctatcaaagtccttcccgtagcaagaa

SEQ ID NO: 101821 - DNA, 780 bp, Cannabis sativa
  modified_base (27)..(28): a, c, t, g, unknown or other
actaatcagattgtaaagagttttatnnagggcataaaacccaacagtacctgcatgtcacttaaaaagtcagcaataaattcagctaatacctgagatttgattgttgtccttggttggaatgtgatgtcgtattcactgagttctactgcccacttggtgagtcttcctgaaagctctggcttgtgtaggatgctacgaagttgatattgtgtcaacacaataatagggtggcgttgaaaatatggtcttagtttgtgtcctgctgtgataagtgctagtgctagtttctcaagttggttgtatcttgtttctacatctagaagagtctttgattagcacagcgctgactgctgtttcagacactgctaggtatatgtagagtccttctccatctttaggtttcgctaagagcggaggtgaggcgagatattctttaagttgtctaagtgcatcttcacattcctttgtccactcaaagtcctttgtttttctcagtgttgagaaaaacaagtgacaacatttagaagattttgaaataaaacgactgagtgctgctatcctctaggtaaggcgttggacgtccttgattgattttggtgattgaacgttttgtatggagcgtatttaatttgggtttgcttcaactcctcgctttgtcaccaagtatcctagaaatttacctgaggaaaaaccaaaagaacacttggcagggttgagtttcatattatatttttcaagtacctggaatgactgttcgagatgattgaggtggtctgc

SEQ ID NO: 101822 - DNA, 779 bp, Cannabis sativa
tcggaaaaaaataaaaacagatttttatatatttacaacataattgaatggatgtagtttagttcggttaaacagaaataagttaattcagcacttttaaaattatataaatggtaaaacatatgattttttataattatcttttagatatttattaatttaaataagatcttatttttatatatatattttaaataagttcttattaattagtatagaattaggattgatgaaaggcttcaattaagcggtggcagcagaattacaattcagcatgtaaaagatatttatcataaaaaaatgataaaagataggattaatttaaataatttccttattagtatagaattaggatttaatgaaaaggctataaatagatgcatagttacagcagaaatttagatgcaccctacactttcaaaccttgaaaacataattaagcttagaaagaattagctaatgaacagaatatctagctctgattccctttcaacaccaaggtttcggtgttttgatcccaccaactctaactcttacccagatcacaccactaatcacaaacactacatcccaacaaccacttcaaattccaattccactactgaaatgataactcctaaaatcgtcacaggtgacaacggttacattctcgaagatgttcctcacctatctgattacctcaccgaccttcctgtaagtgcaagtactctttctcttcttctttatcatctataatgtaactatttcttacgtactatatttttttttcttttgcagac

SEQ ID NO: 101823 - DNA, 970 bp, Cannabis sativa
tatagataaaaaagaatactataagaaactataaaattgtagttcatttttatcatataaaataaccagttatttacacaagttctgtaactataatttttttttaacaaacaaaaaaaactataaaagctaaaataatagtaatataattttattaaggcaataaattaagataacagtttattccaagtaatcaaagccaatttttaatgaaaaaaccacttatagagttgttaaaactcatatataaaatttacatatttttaataagctcaaaaacttatcatcaacccactatcaaaactaataccaacacaatactaatattaaaaccagttacaaacttctcagaaactccaatactggaccatcaacacactaccaaaacattcaatatccattaaagaataatattagccgcaaaagaaatagaaaatatatagaatgagagtaaattactagagttgttatcttgatgaaagaaaccagttatgttgtagatgtcaaaaaaattataaataaattttacatgcttatattctagatactgtatggaatattgaacaaatcaaatacaataccaaaataaaatagttaaaaacttctcaaaagctccaagatttaattatcaacccagtacactatccaaaatagttattatccactaaaataaaatattagccgcaaaaagagtagaaaataaaatgagaatattcgctgaagttgttatcgttgtcagattatcatcaaaaaattggtcgaagttgtcttcataattggaaattcaccattgttagaaattggagttgtcattggtgttagacgttggaatttgatacactgaaacaagttacaatagtcagctaattaacactataattgagaaaccaattatttaaaccaaccgtgaatcaaaaactaaaatattagagccagttacgtaaaacaacaaaaataataactaaatagg

SEQ ID NO: 101824 - DNA, 523 bp, Cannabis sativa
  modified_base (134)..(148): a, c, t, g, unknown or other
  modified_base (489)..(490): a, c, t, g, unknown or other
cttcaagcttggcaagcgatgagtttgaaccaaagtcagcaccaacaacataagactttggatgatgagcttggggagaagcctttcgtagcccatagaggatataatttggtgttgatgaaatatatagatcnnnnnnnnnnnnnnnagtcaatatcattaatgaagtcgaatcaatgatggcatgttcttccttatcctccagtgtcacagtatctacactttcatctaacaacccttcttcttgttgctcactctctacttggctatccatacccttgcttgtgatttcatattcaatgaattcttgatcatgaatgaattcattctcttccatgatttcatttactacacaactttcattaattatcgagtaagaatctgatgtagccaaattttgagttaataccacttcaaaatgatcttgatcttcgaatgtcgactcattatcttgcattccactaatgacctgtaaagcccgcttagttnntttggaaattagcagttgtttatgattaattat

SEQ ID NO: 101825 - DNA, 538 bp, Cannabis sativa
ggatgcaactcaacctgagaagaaatctttggaatcatttgtttcttttaataacaaaaatttagatgatgaagtcttgattgagacagtgaagactgatgttaataaggagcttggtgaagaaaaatgtgaatgtggaatggaaaatggattcttggtgaagacaaagaccagccataaggatgcaactcaaccagaaaagaagtctttggaatcatttgtttctttgaataacaaaaatttagatgatgaaattttgattgagacaatgaagactgatattaataaggagcttagagaagaaaagtgtgaatatagaatggaaaacggattcgtggtgaagacaaagaccagtagtgataaggatgcagcccaacctgggaagaagtctttggaatcatttgtttctttagataacaaaaacttagatgatgaagtcttgatggagacagcgaagactgatgggaaacaatcaaaagggtgtgttcaactcgatgaagggtctatggaagtgcttgagagcaagacttcttgtggg

SEQ ID NO: 101826 - DNA, 836 bp, Cannabis sativa
gatcagccatgagcactcgttgaacaaggcttggaaagggtagtttgttacgagtgccagttgtttctgaggcttcgaggatcctttcaaagatgagaaatggcagatcaatagaaacatgagctcctacagccattgagaaatgcactcttgacatccatttggaagagtctaatcttcataaaacatgcaatgatgagtaaaagtcttatagactctaatcaggccactggtgcaaaagtctcatcaaagtcgattccctccacctgatgtcgccttgggcaacaagcctagctttatttcgagtcattatcccaaattcatctgacttgtttttaaatagccatttttttcctatcacatttgctccatcaggctgagggaccatgatccatacaccaagtcttctaaagtttcccatttcatcttgcattgcagccaacaagaattcatccaatagagcatctctgacatttttgggctcaatttgagagagatagcaagcgaatgccaacaggttctgcatttttcatctagtgaccatggtgtcatttagatctcctaggacaactgcctgaggatgagcaatctgaacccaagagggtggtccatttttgtacagtttggcttgttggggttctttgggcagagcactactaacttcaagttccctgttttgatcactgacatctgcatccacctcatctgataacactggtttagtgtttagagaatctgtagaagtgtcaggatacacttggatcagtctagtggtaactggtctacgtccagaaagaacaggggcatcatctgttggatttattttaccaggatct

SEQ ID NO: 101827 - DNA, 1009 bp, Cannabis sativa
caaccccaatccaatccaaactttccagacctgttctatacaccctagagaacattttcaaggcaataatacattcaccgaaaaacagaaacaaaagtcaccattgatgagtcaagcttgagttcaaaaactcaaagcttcctcatccaactaattagctatcaaaacctgctcaaaccactctacaataccatcatataactacagaaaacacaatctaatcacagtagcaagaacaacaagcaaaacaacatttcaccaataaaaaccaaagtttgagtttaaactccaacttgaataaaaccaaccaacaaccactagaacctgcttaaatctccatatctaaacacaattaagctttagaaatcaacataaaacataaaacacaaccacaacatcaaaatcaccaagcatgcaaaatttcacttccttaaacttcaagaaaatacaaaggaggtgcaagagctataccttggcttggatttactaacaattagctgagcaagattgaattattgaagaaaaatttaaccctagcagcgccaagaaaaattgaaagagagagagagcttgagagaaaatgaatttctttacttttgtctaacttttgattttttcataaaaatgaataaaagacttgattttccttattttatcaaattgtttcagccaaacaaagctaagatcccctagatatacaaatagaatagatgttcatggatagacagacattccattgattctgagttttgcggttgaaaaagctcgtcgatccaaatccacaaaagacaaagcacaaaaatcagattaataatttaattaaaaatccacaaaagacaaagcacatatgggcaaaatgacctttttgccctctcacatcaaattgacataaaaaggggaactaagggtattttgggaaattctaaattcccgactaatctcaacattctcaatgtctaattataccgccccgctatactaaaacaccaagatgtgattctactgagcc

SEQ ID NO: 101828 - DNA, 585 bp, Cannabis sativa
agtaaaaattattatcatcaatataatttaagatccaataatatataatgttataataataaaatattaaatttttgagaaaaaataatcttacatcagttgaatacgttatcattaaaatatattgaatagtaaattaaaataacgatatgatttttatatattgtatatcaaaattataaacttaagaaattaatggatcgcattagaaaattattgagttcaaattaaattttaaagcctaatataaataataagctacaaaattttaaaattttaacatttcttgagtacaacaaataaattttttggtgtagaattaaaagtttttaccaaataaaatttattaatagaaatgcaagaaaaaaaaaatatattgtacactagactctttatattagtttttcacatttgttttattaggtgtacttttgtttttcattcagaaattgatggacacatactattatattatacagtaattatacatatatattattgatttggaaagaaaaattttgaaaagtcaacacaaacaaaatattaaaatacattagttagatagatatatgaaaagatgtgggg

SEQ ID NO: 101829 - DNA, 534 bp, Cannabis sativa
aaacaatagatgtcgttgatgccctgatctcaaccaagaccaagtatcttgtcgatgcctcacccgtatctccgttaggtgcggtaaagtctgtttgggccatggacggtcggagttgcttcgtctggctatgattaagagagggactgagagagtggagagaactcaagcgagatcgagagggagaacaagcttcggtgtgctctgatgcttgcgatcctggtgccggtggtggaaatctcgtccatcggttgtggtagaatgcctcaccggggtcgggcggaggtgcgtcggagatgaaagctacgaggagagatgagactgaggttcagttttaggtttcttttgattttttttattttattctctttataatttttaatgttaatttactattattattttgtatatttaaatttataattaggttaaattttaatttatttaatttaatttttttaattttaaaatgatttttaaataataaaaataagggaaatttacatctagagccttaaaatacatctcaattac

SEQ ID NO: 101830 - DNA, 733 bp, Cannabis sativa
attttaattattaaataaaaagatttggtatttaaaaacgtttaaagttaaaatatgacatttgtgaaaggaaacgatgcattataaaataaaatgataaaattgtaactagtgggggtccacactaagtggtcggccatttaaggtgattttagccatttatttatattttcttaatccatataatttaaacctagccctagatgaaagcctataaatagaacatgacacataacatgataactcaatattagtctattctgtcagaaaattgaaaagagaggctcctctctctaatttttgagttctctcttttttccttcatcaaaattttgtccctttagtgatagagtacatgcccacttacatcaagtcaagtactcaatcatagtgtggaagattataaagaatcaaacacttgaaggagatcgaggctcagatcttgtcattactctgcgacacaaaggaataagggttaaagatctaagtggaaggagccatattattccgctgctactaatgtaaagttttctgcaactttataagtgtttaattcattgtttaaggaattcatatttagggtgttagattatagattataatcaacatacttgttggtatatctagatcctgataagataacttccaacaattggtatcagagctatggtaatgatttactttcataaaatatagattcaaaacgatgattttgatgatttggatgtgttca

SEQ ID NO: 101831 - DNA, 568 bp, Cannabis sativa
ttatgcgcatgtggaacaagttttttaaactattttcggtactaatttaattaaaaaaattcaaaaatttacagaatgtcgtaagtatcaacgtgtgaatacatcagatcaccctttttgagggtacaatccaaaattcttcataagtaaaaatattgaaccaaccatatcttcttcataaaaaccatgaataatctattttgaaaaggtgtctctaaccatgaaaggcctgagcttagaagttacagcaccaaggaaatgaaaaagatagtttagtgaacttaaaagtacagcaacacagaaatgaaaaagatacttttaggtatagaatgtaaagagaaagtagtatattgagtaaaagcaaggaaggtaggacaattcatgtaatttcaaaatagatatatcaaggtcctaggtcatcaaatgattaggtgactagttcattcatttaaaaatcaagttctgacaaaagatgaagattctgcagacggtagggaaacagccctgctatacatccgaatatattctatttctatgaaatgatttatcatttaaaatatacctgttc

SEQ ID NO: 101832 - DNA, 873 bp, Cannabis sativa
aagctaaaagaaatgctaggtacccacaagactcaagagagcaaaaaagaactatgaacaagaaaatagcaagaagaatatactctgtttttctagatgtaaaacaaagcaacttttacttatggtacctatatttgtatatatatgtgtgtgtgtttatatgagctagattgaatagcaagtgcaaaaaataatttttaatcgataactaaaaacaactaaacatgatgaatttttttcttatataaggtagaattgtaaaaaacttttcttatgccattctcatacacgtactccattattatacatatgatcaactctcatgcacttactctactagtacttgctccacaataagtctcaaaatactacaaatgaatacttcacatttttcaaagtaattaatatcttgcatattaaattagtttgtgatatatgttagactttgaaattatattagactctttagtgtgtgatattaatgtggtagtttcataggtattttaatacctctaacactcatgtttatagatgcaagtgtagtattatattttgttgttttgtaatttagtttttgaattaatatattgtagaattgatatgttgtttttttgttgtttgtaatttattttaggttggtgcaaaatgagatttatgtcttgtcgtttttgagttgtttgttggttgtttcacattagaataatataaggtggagtaaaaaaatttcaaaaaatactaagaaacctccttcgaagttatctaaagttgatcataaaatgagttttgaaacgcattgcgaagaaggaaatgggtgatgttgcagagccatctggttcttaaaaaaagacctcttccagataagattgagtctcg

SEQ ID NO: 101833 - DNA, 1376 bp, Cannabis sativa
  modified_base (896)..(899): a, c, t, g, unknown or other
  modified_base (1146)..(1147): a, c, t, g, unknown or other
gatggggactctttctccaaaaattttattactgcaaaattttatcaacttgagctcaaatttgaatgaaactacgtgtcatctatgttaaatagttaattgttaatatagacgtgaagtgtcacatttatattaatacatttaatattatttaaaaattataaaaatattttaaaatttataatattttttaattttttaatattttattctctatttttataaatttatttaatttaaaaataatttttaaataataatattcgtactaatttaaacgtatcatgtgtataagagtgtatacataaacaatctatagtgacaattaaccgaataacactttaaatttgctactaattcagtagcttagaaaattttactgccaaaatttgaaattaaaagattaaatgcaagtgaaacaacaattaaaaagatttaactacaaaaaactctctacttatggttctatacgtctttccataactttctaatacttacgtaatatgagtttaataagacctttaaagaaacaataagtatttcattcaaagtttcttatatatattgtagtgatagttacgagagaagtaagtttcttatattttaaatgacggccaccatctgagattggttcctttccgtcatcttgaccgtacgagcctcctcttatgtgttgaaacgtttctgttagtttttgtttcacttattaattccccttttattagtttaattctatttagtatttttatggggttagaattataaagagtactttctttatttgattttatatgttgtgatcgtatttatgtgttggaactaattaagttttccattagtcttgtcttttgacatggttctttagtcttttcgtttttctggttcgattcttgttnnnncttgttagtttttttgtttatgtggggcgctttggcatgggttgtgtagctcgaaatcatcatggtgctatggtagaagcatttaagaagggaaagattggttgtgttcaactcgaaattgcttggataataggcattaaagaagttttgagttggattgcaactcatttgtggaatagagtcatgttggaaatagatagcttggtgtatacaagcgattcagaacggtatttttatgccttcacannttggtcttattgttcaagatgttcaaaatttgtttttgactttatcttttggtgatttgggttttgtaaagcgatctgcaaataagttggctcattgcttagcaagagactcttgtttctcaggttgtgtgcttcagtaagaggactgctcctctgaagtgcgttctattattttgaacaaatttattaattaataaatcttatgatttttatttttaaaaaaaaaaaa

SEQ ID NO: 101834 - DNA, 884 bp, Cannabis sativa
  modified_base (27)..(33): a, c, t, g, unknown or other
aattaatcatgattaactgctaatttnnnnnnnaaactaagcggtctttacattaatccaagaatggacatgtgaaaataagaaaatggcaaaaggaacattcacaaaattgattccagttgcagaaatgaagatgaaggacaactacaaagctactttgaaattaaaggtacaaaatttttctaaaacataatttcataatgttgaattgatgttttttttctgttataaaaataaaataaatacacaacatatttgttctccggttagagcatcaaatgaacacatatttgaactgtacaaagtaaaaagatcgtgggtggtgaatctagaacaaagaacatgcacatgcaacaggtttctaatagatgaaatgccatgtgcgcatgccttagcagtgatgaaagagatgtatctcgacccatagaaagggttgaacatcgggcaagtttactgggttttgggttcacgcgtttcgggttcaaaaaaataaaaccgaacccggacccaaatagggcacaggttggcaggttggcaagtcacgggttgacgggtttcagttggccgggttgaccgggttggcgggttgacccggtcaactctgtcaactctttaaaaaattaatgttttttattcaaaactaataaaaataacaataaattaaaataaaatttatatatattattaaaaaaatattatatatttctgaatataaattattttataatatatatacatttttatgaaaaaattatatataaaaatatatttaatttatattatttaatagaaaataaatttataaaaaataaaaaagaatctgagagtgagattgagagacaagttaccctaccgtggtggtggggttggggctgtgggcgacg

SEQ ID NO: 101835 - DNA, 1134 bp, Cannabis sativa
ggattgggactgctttttgcttgcagcaatgtcccactatggttcatgaatttttccagaagttctagagtttgagttccctacagaatcagccatcccatataaacacaacccttcaaaacccacctccaaattagagttaaacgatgctagggttagggaacacatagtgagaacccaataggaggatattgctagtcgttacaggcgtttcttgcatgaaatctctgaaggcaaatgccaattcttgcgagaagcagcctgggcggaacctcccagtgtgtcctttattcttgtggcaaagcctttgttttttcccaacgtcacgattgcctattaaaccaagtgacttgcatttttaaattatgcctcccaagccatgtacatcaaagactccttaggaccccactgttaccttcaaggctgagctgattgaatcaaaggtgtgatccatctcgagttatacaggcgagatgctgaatgcttgtgggattgaacttgggcagtcatgccaagtcaaatcaatacgagagggtgagtttagttcctaccccctgcgtgtcttgcaagcagtaacccggggaccagtggtgagactagtactagtggttcaaccagtatgggcgcttggagccttgagcatatcagtgcaggggccacccttcctctccgggactacttcaaagactatataaaccacattggagtttccccatttcagctgactcccatctcctacaagattcttgctagtttgaaagtgttgtgcaaaattctgaattgggggtgccccactccaatggagattgagtatctttacatcagtcttcctttttcaagttttttttactaatgttttgtgtgttctgacagctcttttaatgagacctacccctacccctgagatggttggtaggcataggcatctgttaactcttcccaacggtcttcgatcatgcaactttcttttgagcgaagttaacttacgatcggtgggccttcttgctgataaagaatatacttatgactacaagattcctaagtattcttcttggcaactgattattattctgcctgaggatcaggcttgggatcgcttggctcaggcacaataccttcaaagtactgcccctc

SEQ ID NO: 101836 - DNA, 676 bp, Cannabis sativa
agaatgaacaaactaaatatactataatcaaattctgtacatttatccaatgatgatgcgatgatctttgggatctagaactacattatgtggaggttctcgtcatatgacttagcctgaacagtcgaaagagataaaacgtctataagggttatagaatgagatgcacttacttttagtgcaagtagaagattgtcaggttttatgccctaaaagcaagtaattaaaggataatgtattagaaaatatatgcaatataattataagataaataatatattaattataagagtataattattaaaaatctaaaaattacttattcatatggagaaggtataattttgtaagaatgtataagagaattaagattatacaatatgaataaaataagccggtagtgtattaaagtaaggagaatctttaatatagaactgctaagtacggtttactatacactatacttctagtgtgtgtgattttgattcggatcacatatgtagatggacatgtagtaaaggtactgtgtataattagattatacatgactggaccgatatataataaatatcttttattaatgtgtcgtttatcatgaaagagttattcatatcacaatgatgatcaacccaaatcctaagtatacatgaactcttatttgtgttcattgagttct

SEQ ID NO: 101837 - DNA, 605 bp, Cannabis sativa
aatggtaagaacctaaccatctagtgaattcgcaatactacaatttagtaacagcaacttcataaagtcaactgatcaaatgcttaggggaccccaaacaactagagaaaggaaaaatcaaattttaaaaatattcagaatttaatgtataactagcactagaaaagaaaatcatacacaataacattagactatatggcacaacttcctcgaggataaacttgatattaccagaaagaaaacagtaaatgtatatgcttacccgcaagtagccaaacctagcattgagaaagttttacataagaccagtgcagagctacaaagtctccactcgaacttcattttttttttttttattttcgcactaatatattttcttctttatttaaagtatagatattcaaattgtatatttaatatttcaaacttatagaatgcattttaatatttcaaatttacacacgtcaaattactgataataatttgatccaaaattaaaaaagagagaaaatctaattttgttccaacccaaaggacaatacccacaaacaagctcaattaattactgatagtgccataccaaatatataaagtgtactacatac

SEQ ID NO: 101838 - DNA, 1122 bp, Cannabis sativa
aaactatactttctgcacttaacaatttgttgttccaaaccttgtcattccttgcattccatattgaccaacaaagagcaaccaatcttttttttttattcgaatcaagcaccagaaaattagagttgcaccagtctaaaaaatctgcattattttgcagcaccgtgactattccctctcggttccagcacagttgagcagttgggcaatcaacaagtgcatgataaattgattcctcatgactatcacacactagacagattgttgacacatgcacccgttttgttcttagttgaatcatagttgggagacatccttgacaagctctccacaccagatttttcatttttggagggagtttcaatgcccaaaatttcttccaaaaaacttcaagtgctgctgcatcatgtgtattctctccattcatctcttccatcattctatgtgcacttttcaccgtaaaaaggctcaaaacctcaccaatccaagtgattttatcttgatcgtgaccatattgcacagggatttgtaagatgagcctttgttctcgctgttcgaacaaatcaaccacaacttcttcatcccaacccgatccatctaacaccagcaggttgcatactcttttactagaaagagcagggtgttgagatgaaacaaaaggattctgagcatcaggtagccaaggctcacccaagattgaaatagaggtgccatctcccacagtccaccgaacccctttaagtactaaaggatgagcttcaagtacactacgccagacataactggggttatgaccaatatcagatgtgaaaaaaaaaccctgagggtaataccttgccttaaaaattcttgaaacaagcgtatcaggttttgtaagaagtctccaaccttgcttttccaacaaagccaaattaaaacttcttaagttacgaaaacccatacctccttgagacttatgattgcagagttttttccacgacatccaatgaatacctctgggagagttgctcgaggattgctgttgtgaaaatttatattggtttataattgtgcaagtgtacacaatcacaaacaagtaatacaatgataagtaatgaaagttcgtctccacagggacttttt

SEQ ID NO: 101839 - DNA, 1263 bp, Cannabis sativa
atggcatggctgaatgtgcatatttagttgttagtggaaaaaaactttgcccgatccccttgtgttaggagaaaaagagaggacttatttgtctatgtttaatcgctgtcccgaagcttggtaatatgtgttaatggaattttgaattgatcttgttgaagtgctattagcccgacagagaatgaggctatcatctgcaaaaaacaagtgtcagactgatggaccatttcgtgaaagctgaaagccatgtaaagaaccattgctctcttcattttgtaataatctcgagaatccttcagcacaaataatgaagagatatggggataatggatctccttgtcttaatcctcgttgtggtacaatattgccttgaatagatccattaagttggaacgagtatgaaactgtggagatgcacctgattataagattgacaagctgtggagaaaatcccatagtgagcatcatactttgaataaagtgccattccattctatcaaaagctttgctcatgtcaagcttaattgcagtgaatccttgcttgcctctcttaagatgtttgagagagtgaatgagttcaaaagcaacaactaaattatccgtaattaactgagatggcaaaaaagcactttgagattctgatatgattgggtttgattgcggcttcattcttagaacaatggttttggaaaaaagcttgtataatacattgcacaggctaataggccgaagctgagccatgttcagagacttttttactttggggattaaggtgatgagtgtagtgttgaagaggaaggatcaccactgtcattgagaactttcagcactgttttggtaacactatcattgaagatgtgccaataattagtatagaacatgacggacatgccatccaaacccgggctgccatcctcgctcatagatttcagagcgagaaaaacttcttcagcagagaaaggcacagagagagcttcattaacttcatcagtaacaagacagggaacagtagcaagaactatttgtgtagcagcagaattaattccttcagtggaaaaaatgttgcagaaataatcctgaatgatattagcaatgcccgattgagaggaatgcacaataccattagaatcggtcagcttagttatcttgttcacagcttttcttgcacttgctttttgatgaaaatacttggtgttagaattgtagggttttatgcgctaaataaaactcatctcaatataatcaaatttacttattaatata

SEQ ID NO: 101840 - DNA, 766 bp, Cannabis sativa
agctagggtgcgccaccatacactcatatgacaaaattttattaattgatgtaataaatcatcatcatcataatattattattattattattattattattatgtaggcttaattatttattgattattgctttaattaattgattattactattcaatttatttgttatatatagttaattaccaaaagtataataatcacaaccaaattaatattataagatacagctagcatttatttatttttcattttacatcattttaatttggaaacataacttatatatatatataaaagaaattcttaccaaaaaaatgaatatgtatacacaatcacaataatgaaatattgttggaaataataatcttatattaattcttaatttcaaggtaattaataaaattacgagtcttgctgttatgtcgacctacgcatgtatattaatttacttatgtttttatttatttttattagatagtaataatttaggggcggtttggtatgcaggtttctttcataagaataggtttaacattgtttggagagtgatgaagtgagctaggaaagcaacattaccgtgtttggttgatattggaatgcagtgtgacaatttttttttcttaccataataattatttttttttagaaaatactatataataattcaatattttttttttctttctaagtgttcaaaataatttttatttattatttttcatataaatttataaaaaaaagtaacaataataaataattataaag

SEQ ID NO: 101841 - DNA, 530 bp, Cannabis sativa
aatatatattttaatattttttttccttggtttaaacaatagaaaataaagaaatcgatttttttgggtaattagctacttgtaatttcttgaataaattacacctcagattctttgcaaccaaatatagggaattaaacgtcatgataaatccactctatctctatacaattatttctgagttatttttgtattgaataaatttttgttttaattattattattaacaatgagaataaaataaatatgaaatataactaggaattatattataatttattgttatttctttttgctttttttttaagaaaaaaactaataaatttaataataaaaaaattaaaaatataaaatacaaattgatgcaataaatatacaaatattaccctttgaagagcatatttttgattcaccttaaaaaagaaagtattttcgattaatatatttgttggtttacaatacttattaaatttataaaaaaaaaaaagtaagataaaaaggttagattatacataataaatatatatata

SEQ ID NO: 101842 - DNA, 1506 bp, Cannabis sativa
  modified_base (712)..(720): a, c, t, g, unknown or other
atctttggccataagccctctattttttaacactactattatttggccctgttacttttttttatcatggattgtgtgaccgatcagacagtctttaatccttgctatcttcttagggccttgacaagtaagggtatggatttactttgccaagctaaagtatgcctacacgacttaaaggtaggtttaatagcttataataagcgttaaaatttgcataagttctttatgctagttcaatgcattgcacagtatgggttccccccaagtgaccgtgcagacaagtctcttggtcacttgctattcactaagtttaacagacttttcatgggttctatcttgcgagggtaccatagtacgcacgtggaactgaaagagtaactttaagaagttagtctagtgagcaagtggtttagacacaataaatataatataaacattattttttattcattaattggtctttgttgttgtgcaacttacataaattgaatcaacaagctttcactacactgatttatcttctagatgtcaagtggctacccccgcttgcctaataatgcagaggtcaccattaaagaatggtaggagaccatgccaaaaaggtcatgggtactagcgcttttgtactctaatgttgagtaagtagaactactaatttgaagtagtattctgtaagctagttactgatagtatttgcgaaggtgctctnnnnnnnnntatcttggtaggagaacgagctccatgttctcgttgtatcttcccagcttgtaagctcccttactaattatctttgtaccttgatagtgccttcgcaattaggtccgaacactcctactgatgaatctttagagttcaggaacactcttcggagcaccgggtctcttatgaagaatttcctactcttgacttgtttgttgaagtgctttattaccttttactggtaggcttgctctcttatttcttctacttaatcaagggattctactagcagggtgttgtttatttgttggtcataggttattctcctgtgtgacggtggcactagctctacaggcaacatttcctcataaccataagctagagagaatggagttcgcccagtggctatcttctcggtagtcctatgcgacaagaggacctttaggggtaactcaggcaagttgccttttgcttcctcaaggcacttctttagagtactcttgaaggttttgttgacagcatctacttgcccatttgcttgaggatgggccacgagagaaaagctttcgatgatgtcatgtctgtgcaaaaatcagtgaacatgtcattgtcaaactacttgtctttgtgtgacacaatcttctggggaagtctgaatcggcatatgatgttcttggcaacaaagttaagaaccttcgtggaggggattattactagggctgaacattttgaacgggtttgacccgaacccgagcaacccgcccgaacccgaactagtgaacccgcaaaaaaaaaaatttaaaa

SEQ ID NO: 101843 - DNA, 892 bp, Cannabis sativa
attttagtataaattaaaatttaagataatattatatcaaatatgatatataactattttttttgacgtaatgattagaatcacttatgaatttatgatgcaaagattcacaaataacgcaagaacttccttgaatttagatagttcatcgtctaaccaaaagttatgctttgtcaaaccatgaactactataaaatctacgagcaacatgaaacaaaactatctctgagaatatatagtattatttaaaatatgagatctaaataaatttcaatacaatacagcatatcaaacaatataacacgagttagcaaatgagttcaaaatgtaatattttgtatgcactatatattcaattgtggtatttgacagctagcttttacttaataaaatgtaaaagatatccaatcttaaattcgatcaatgtactcccattgttgagcaacatatatcatgcctagccatcaccataatataaataattaaaagcttacgtggcgtattttaaattaattttaggttttttttttaaattacaaataatttgtctccattattggcaatggcaatctctctttctctgactttcattccatgtccatgtccatgtccatgtccatggctagctacccatctctgtcttccatgcatggctgcccatcttcctctcgagacaaatgccaagacaagatatacccttcacacaccaaattaagagctttttttatatacaatgtatagatagccagataggcatatatatatatatactaggcagaagttccgtgaaatgcacgtatacgtaattatatacttagtttagaaaagttaattaaattatataaagttttaagaatagtaaattagatgcaaaatatttacaaaatgagtt

SEQ ID NO: 101844 - DNA, 522 bp, Cannabis sativa
aagaaaaatatagataaaatgtctagaaaagataatataaatgtgagactatatatgagttgccccttctatagttaggtaccatatatgagttgccccttctttggtcaaacacctgattacaatatcatgaaacccttcggttgtgcatgttttcctcacttaagaccctataactctcataagatggatttcaggtctgagcagtgcctttttcttggttactcaccatatcacaagggttatctatgtgaaagtgctaaaggtcgaatatacattgcaaggaatgtcaacttcaatgaaactcactatcctggcactccttctgtttctgcaacaagtcaggtacatgtttctcctcatgttttacctactgctagttttaatactacacaaactaatcctactacttctggtgtggtacttccaaatacaactgaggtaatatgtgatcctgtctcctccccaattgtctcaacatccccacaacaattacctccaacaactataccccctatccct

SEQ ID NO: 101845 - DNA, 552 bp, Cannabis sativa
atcttatttcaaaaaaatatatatttcattaaatcatagaaccaaaatcataattggagatccataaactccaattaagaaaaaatcagccaattttgccaatatcgtttataatcctaatagtaatatatattgttcattaataaaaggactagaaaagatgaaaaataatattattgtctctccaatgtattttttttgcccaacaagttgtatctcttttttcttttattagtgttttcgctgtgccctatccacaagttatatagtgacatgtctccgcctgtaattttaaaagcttttgctcaactttttcttgataaaatatataaacttctcatccaaactcaaaataaaatgattcaatatgtattggaaaacacagatctcaacattgtgtttcaaacaaaaaaaaataaacttaaaatacattttacactttaaacttgaatggttgcttatcctcaattgagttaatactaataaaaactcgtaatattaaaaattactatcataacaaaagttgtaatatataactaccaaatacctttt

SEQ ID NO: 101846 - DNA, 745 bp, Cannabis sativa
  modified_base (715)..(719): a, c, t, g, unknown or other
ttcctcagtctatgtataaagtgtacatacaaaaaatgtgtaggaatatttatataaaaatatagatattagcattgggcacaaattgcttaagcacctctatgacattatatttgatgggacacgattttgttcttattttcacggaatgtattccgtgatgtacaacagccgttagttgggggagttatttgatctgagggctttggttgctctaggggtaattagggttaaaaaatggtaacgaaccctgagacccatctaatgtaccacaaaatacattccgtgaaagtacatcacgggacaaaatcgtatccctatattttataattggttagtaattttttataatttttattaaattaaaataaacctcacttagtattgaattgtacccataataatattacaataggtgctagaccctataaatgtcttttaatatttttctctctatataaatatttttgaggtgatgaggaatattatattatttataattaagaatatgaactactctatttgtaaggaccgcttagtttttaatttgaaaattagcatataattagggcttaattatgataattatttattagtattgaattaattatatatgatgatttatttgaattcagaatgcatttttattgtctcatatagtaatttcataattttgcatgctttgtgcccagcaacattggaacgcggtgtttgnnnnntagaatcacatcctagtatttttagt

SEQ ID NO: 101847 - DNA, 680 bp, Cannabis sativa
tttagaaaaggggggtgtaattttctgagaaagaagtctgtaccaaaatctctaaaaaaggctttcaaaaaaaaaattaatattaaatatagtaacttccccttattatgtatattaattcaaagaaccaaattatggtatactctcgtacatagtgaactttgttcgtttcttatttttagtgggattgttttttagactaattattagttctttcttttctacttattcgagtgtatgtcttcaacatatgatgtaaaataaaaataggaagcccatccatcgtcaaaggaaccttgttatggaatcttttgtggagttgatcaacaatccaatcatatatcccaatagattttggtctgtcaaacgattgtgggtcttcgatgaaatcggtcaatgccgaagcgttttgagaacagcgatcctctttattctcgcccaatttcttctattttggttttttgaaagagtttcggacaaattagggttttttcattttatttatggcataagtttctttttaagaatgtgttttaattttatcaccctaaactttgtagttttcacttttttttttttatttactaatatagttttttgtttgtttggtgagggatttgggatgtttggggtcggcttaggatggtggcaatcaaagatgtagacctcggctggccttg

SEQ ID NO: 101848 - DNA, 676 bp, Cannabis sativa
tttttttttttttttggtcagatagtcattagagggtttttttccttttttattttactttgataccatgttagaatttggggagttccattttaaaactaattgtcaataggagtagctcattcatcttatatatttaattatctttccacttattagtaatatgagactctctataacagtatatttaaattaatttttaaatgaaaataaaaatttaataaccatgactagtcagagactatcatgtggctattgacttgttctgaaaatataacttaaatattattactatctgaaattaaacttaaatatttatttataataaaaaattaaatttaaatatttatactaccaaataatagcttgtggaaggagatctttggtcattttgatcaaataagaccacaaaatatctaggtaggggatctaaggcgtaataatagtagagacttatataagactagatttgttttccaaaaatacattatacatatttttgtatacagaagctaataagtgtgaaaggtaataataaaacaacagaaaagtccattagtatcatgcacagaattgaaaaggacattatatccatttcatatttccataattccattattaattttttttttatgttttgcacatgttatcgtctaagtatttattaaaactcttg

SEQ ID NO: 101849 - DNA, 672 bp, Cannabis sativa
actctaaactaaacctagtatataaaggaaagaaacccctacggcagccactattgtcaacagaatattcaaactctttcaaaatcattttctctcttcaacacaaaacagcaggaggtaaaaaaaatttctaggagttaaagtttctaatatttttttctgtacttcttcttttcacccttatggcagagttatattgttgtaatgggttcttatactatttttttctcttataaatttcttctaaaaacagtatggaaatattagggttttctaagtttttttcttatttctcttttgtacaaacctatgggttagggttcttaatttttctcttctcacttctacccgaaaacaataaccgaaaatcaccaacaacaccaaacacaaacaaataaaaatataaaccatatagggattaggatgagaaatacaaataggtaaagatggaaacacacatatataaaaataaatttatgtcaatctctttcttttaataatacctgtacagatcgtgagaattttgaagattttagcagattataaagcttcaacaattatggaaggctccaataataacttcaaattaatggcagcaaacaaagttttttttttctttaaaactattgcaaagatgtgtcatttttgatatataaattgtgtaattgaatg

SEQ ID NO: 101850 - DNA, 504 bp, Cannabis sativa
agactgcaccatttggagtatggctgactttatctaaaaattagtggcttctatggcgggtggtcttatacaaggctgaacccacatcaaagttggaagaatatagtccctcgggctacaatcgggtggattacggctgtttgcctgtcttctactgcatttccattattatcgctgttatcgccattgttgctgccattaacattctcagccatgactacttcttcttcagcccttgctgcactcctttcttgccttttgtttcttctatttcttctacagatcttctcaatttaaggatcaacgcgcagtattacactttgtcctagatgtcacatgcactcccaatgcctaaaatagagtaagaaaaatttaaaagaaatagattaaaagaattaaccgaagtagaatttaatctaatttttttgtaatgtcaatatttaatcaatttcccagcaacgacgctaaaaacttgttaagaaaattattgtaacgtccccgctt

SEQ ID NO: 101851 - DNA, 947 bp, Cannabis sativa
caaccataaatagagaacatatcaaagtatttttgtaaataagattaattttagatacaataattaaaaaaccccattactaattctaatttgtttaaactgatattagtcaattttttatgcttttgcaaaaaataatcatactccaaattatttttttctttatctacttaaattttatttttataattttgtaaaatacatttaacatatataatagtagaatctttttacagtacctacggataatgcaacaaaagtataacagaatatatttttacagtaaagaaaaatattacttaggtaatttagtgtaaccgagagttatatttaaatattttcactacaaatcaaaaaattcataattccaaatgtaaagtaaaattaaataaggcatcttagtataaatatgtaaatataataataataataaaaaattacttaagtgttgggtccgtttggcacagctttttgaaaaagctgtgataaaaatgtgtttggtaagcagtcaaaaaataactttttgaaaatttttttggagaagctacagctaaaagctaaagctgctctaacccaatttttagagaaagctaaactattataatttttttttgtattaaaaccatatttaattattgattatatattaaaaaaataaaattatttaaaataaattaattataataaataaatcattattaaatctcataatttttttaaaataataatttatattttactttaatatttactcacaacatcaacctaaaaaatttcttatatacttaagtttctatttttttttttacatttaataaaacataatgtaaaaatactataaattatttttatcaaatgcatataaattaatatttgaaaaaaaaattaaaaatatataaaataataaaatattacataaataagtttttacatatttgtgattataa

SEQ ID NO: 101852 - DNA, 721 bp, Cannabis sativa
  modified_base (32)..(47): a, c, t, g, unknown or other
atgcaacataaaatgatttttgatctttattnnnnnnnnnnnnnnnntatattgaaatgtgttttatttagtgcacaaaactcaacataatcttagtatcaccaagataatcaaggtttcctttcggattggccttccaaaaatcatagaaaacatcaagaacaacttcctttaggacatccacctccttctcaagctcctccaccctagactgcttgtgtcggacctccttcacaagttcctcctccctagtctgattgttcttaacatcctcctccagtttggaaagaagagtgtagagactctccctctcatccttgagactattgacctctttagataaagaaacattgtcagcctctagttgctcggtcgaaggcatatcttgtagctatttggtcagctcatcaaccttggtgttggcagcaagaaccttcttgtttaccccccaagttcattcctcatgaccttgagctggctccgcatatccttagtttccttcttggccaattccacatccctctgtaatgtgttggtggtggcaaggttcttgactgtagctgatttggctcgggagtacgtgtaagccatcttcacattggtctgcacagcaaatgcgtcaaagtccgagctacaaaaaaacagaaagaaataaaaaagaaagagatttacccgagtaattccttcaaagatcggaagagcgtcgtgtagggaaagagtg

SEQ ID NO: 101853 - DNA, 776 bp, Cannabis sativa
ttgtaaagtacatgccatttctaatctatttgagcttgcacaacatttggatgtgtaaaagaaacctaaaagtcaacattatcaaacctagaagaaggaatatgattatgttgaaactcaacattggagacgcgtacattttcaagtaattggatatgcttatttggcggaatatatttgtcattgtcagttcatgaactataaggttttgaggaacattacgaaaggctcacttagcctgcaacaatagttaaaatgagttaatcagaagaataaaaaaagatatttgatatacatataccaaagtatctatcattgaaaattcattacttagctagcaatgaaaaagaaaacaaaacattaaaaggtcttgtaggcagcatagctgatctgcgtacaatttcaaaaaaattatgcttgaaataaaaggagaatcagttttgaccaaaaatgttttaccctcaatctcaaagtacaagtatgtcattgtttgttattcaaataaatagtttatcaatagtttagtagtggaaagataacatgagtcaaccagcaagcattagttttgttttattatcacttaactcatttacgcattaattggcttcaagctatgtgaaaaaaaattcatgttacaacgaaaaaaaaaaaggaaaaattcaatacctttactatgaagtcattaacaaatatttgcttcccatctaaagaacagtattaagcagaagagatttaatcacaaaataaatttggaagattaaagctaatgtggatta

SEQ ID NO: 101854 - DNA, 695 bp, Cannabis sativa
aattatttattcaaaaaaaaaataattgtaattaattatcgaataaaattatcatttatattatttattaactaggaaacggtccgcgcttcacgtgcggtgtaagaatgttggatttaactctatgtaggagtgacaaaactatcttcgtgtttgtgttatattttagttaatatgcttttatatttcgtgtcacgtgtgtcaatccttttctaaattacgtctaattttctcaaccctaacccgaagcataaacaattgtattatattcgtgttaacctactttgacctattttgctaaaactggatttaagaaaaatgtagatttatccattaaaaaatttatatatactatgtatatatagtttttatatatcacaaaaaattaaattttttaaaatattgtcaatttcttttataaaaaaaaattaattaaattattttttaactcaatattgaattactaaggtgtcattcggtaacacttttgttttctaattttttaatcacaaaaataaaagtagaattttcgtttttaaaaattctgtttttgaaaaacaaaaatgcgttctatagccacttttatttttctattttataaacagaaaataaaattgtgttctgtaaagtttatttttatttttatttttgatttatttaagtcgggtttaggttcgggtagggtgctaggttcg

SEQ ID NO: 101855 - DNA, 585 bp, Cannabis sativa
ctcccaatgacaagtagtaggggccttgatgaatcgagtgagtttattcacaataaatgtcatatctggtcttgttagtgacaagtactgtaatgctccaattgtactttgatacagtgtcatgtcagaaaatggttcacgttcagctaatgaacgtttagtgacagcattagttggattaggggaccttttgcaccttccatgtgaggcttcacaagaagatcggtgatgtactttatttgaaaaaggtacataccagttagatctcaaaaaatttccacacctaagaagtaatggacttcccctagatctttaagtgaaaatatttgttgagatcaaatgtgagcttgtttataagagtcaaatcaggtcctaagttgtaaacaaatagtgaggtatcagcttttgatgctatgaaaccccactgaatgagacaatttttgagcttatcattccatgcacgaggtgcttgtttgaaaccctagatagttttacttaaaagatagacgtgatctagtctttctggatctacgaaacctgggggttgacgcatgtaaactgtttcagttagagatccattgagaa

SEQ ID NO: 101856 - DNA, 532 bp, Cannabis sativa
tacgccggcattgctatgttttaccggcgcacaaatgcgccggcaaaagtaaacccaaaataaatttggaattctacaatttgggtagtctcgacaacttttatcggcgcatgtcacgaaatgcgccggcaaaaacaccttttcttgtagtggttttctcagtacatagggcattactgtaacgccttgatccgcaaggacgccacgtgtgtacttttattaattagtttataatattaaactaacagtttaagaaggatgtggtttaaataaaatatttagtgaaattatttaaattattacttaaacttctctttcaaaataccactagatttagggatccctttagttaaaaacttttactaaatactacaaaattagcttattataaaatattgttacatattcaaaacacaaccaaagaaagatcatgtctattgagaaccaaaacatggtgggttgatatgtacattaccgagagacctctgactcatggctggaccagtttcccctttcccttacctgcaccaca

SEQ ID NO: 101857 - DNA, 783 bp, Cannabis sativa
  modified_base (615)..(616): a, c, t, g, unknown or other
gatagtgggatcgtgtgtatgccttatccacgtaagttgatccttgagttatagggattgagctgatgactcatgatgcaaaaactgaattcgctaagtattgagtgttgtgcacggatcgctggatattttattctgaatgtaccactgaggcatcctgctcggtcaattcttcccgagcagatgctccaagtggacttcacgtgtcaccattctcgtgatgccacgtcagagtgcaaaatttgggataacaagatcaaataaagaaattgaaatgaaaaatattaaaacatggaaaaacaaaaatagaaaaaaaaaaacaaaatgaaacaaaaattaagactaagcaaactaaaatgaaaaacccatcaaaagaacaaataatttgaacaaaacaaattgaagccctacaaaaccaaacaaaaccaaacgaaatgctaaaatggaaaacctagaatagtacaatccaaaagcacaaaacacagaaatgtcaaattcgaaaaaatttcgaaaagaggggaaaccaaaaagaaaccgaaaacaaacctcagatcgaatagcaccactaacttgatcatttttttttagaaacatctttaggaattttttcctggnnagccaccttcgatttcttctttggaggagctcgcccacatttagacaatggaggagcaaagtcaaagtcatcctcagatttcaatcccattttaaagctttttttttttaacagggaaaggagttgatgaagaacgagttacaaccatatttatatatggattaaga

SEQ ID NO: 101858 - DNA, 887 bp, Cannabis sativa
ttaaaatgaatcctcttaaatgtacctttggtgtgagcgcaggaaaattcttagggtttgttgttcacaaaaagggtataagcatagatgaagacaagactaaggctatattagtcatgggagaaccacagtcacaaaaacttatgatccatcaaaataaaatttgatttaataataaacatatatctcttaacatagagaatatgaccaatcaaagtagtttaattaaagaattttatctcagttaagcttgttaagataaaattaaaagaaatttaccatgacaatatataatgtttaaagagagaatacaaaaaaataaaatttcacaaatgacaatgtgtatttattttacagataaaataattatgaattaatagttatatagagagccataccaacacactataaaaatttatagaggagttaaatatatgtatatatattgacaataaaaaaaaacttcacaaatgacaatgtatatattttacagataaaataattatgaattaaatatatgtatctatattatggataaaacaagcgttgagattgtggaggaactaattaaatttaactaactaaaataatctctacatagtaaaccacgaatagataggtaaacctacaaacataataatgcttccaaagcttaaacagaacacaaataaaaaaaaaaaaactacggataaatattgtattagaaaatatagagtttttgttaaatatacatgttaattatatgcagaaaccagttaaaaataatactaccttaataaatttctttgaggagaagattaaaagatgtttgtttttaaaaagaaaaaagcaaatatgaaagaacactatatattattgcatttgaactacttggttaaatacacttt

SEQ ID NO: 101859 - DNA, 509 bp, Cannabis sativa
tttataaaaaaaaaaaaaatagataactgattaaaaatttaaaaagaaaaattataaaaacacatcaatactaaaaaaaaatttacttttactctttacatttttaatttacagaaatatttcttcaataaaaataataaactattttttaataatttatttataattgtataagtattatagttgtgatgaaattatttttcgggttgttttataatttatttataattatcgcaaacttgatttctcgttgtttttttaaaaaccaaagtttatttttataattttaaaactttacatgaatatttttgtaattaaaaactttaagttgtaaaattgtaaataaaatataaaaaaaataatctttataaaaattctccatttctaaaggtagaattaacactcaatatattatttcaaaacattatttgaaaaaggaaaattatagtaaatggccccaaatcataggactatgttagtttatatcctcatttcaaaaaaatatagca

SEQ ID NO: 101860 - DNA, 899 bp, Cannabis sativa
acttacaaggtcggtccataaggaacatcactgagttcaatgaaagggctcaggtattcgctgaaaagaagaagcctgaaaagaaatgaatttgttgaaaataggctcaggaggcaaacctggaaatgttttgacaagtactgtctcaacgagaattgatatctaatgggcctctgctcgaagagaaaggacggttccaaggaaccatcaaaggataaaaagaaatagaaaaagatgataagtatgtgccagtgtatactatttataccgagcttaatgaatgtcgggacaatatttaccttgcacatgagtaaagggttgcctttggtaagctcgacccatgaggaatgcgaggaacaaaagagatcctaacaggtattgtaatttccataaggatattaggcacacgatcgacgaatgtcaccaattgaaagataatatagaaagtctcatggctcgcggtcacttcaaagagtgcatgaagagacagggccatggacacaaccagcccagtctgcccaacaaccaggggttacatcctctccctgttgaaggtgaggacatccgggttatttcgggagggccacatatcgccatggagagcaaaaatgcccaaaaaagatatgtgaaagacataaagaacgagcagtcgacatttttcccaaaaccttctaagaagctgaaaactgacgaacccccaatcatattcatagaggaagatgagaagaatgtgagatatcctcacgttgatttgttggtgattactattcaactcaccaataaaagaataaagttttggaatatagtttaccaggatctagatttactaccatgtatgttatttagcatgaatttctaaaacaatgtaatttaaacacataaaagttatgagaaacctt

SEQ ID NO: 101861 - DNA, 936 bp, Cannabis sativa
gcctacccttgctcccttcgcctcggagatgaccggccagtttgtctcccacctgactcagttcccacctaagagatatgctgcttgcgcctccgtgaacttcgtttactaagtgcaggacatcagtactgccatggtcgcggtaagttcttgtgatttattcccttctcttatattttgtctaaggcatctgatttcattcttgtttcttttttcttagattactaccgagaccggccgcctctccaagaccctgattaatcatgggttcgtcatgtccgaatttgggggcatagacgaggccgtgaggatcctgcgggacttgtcttccaaaaggagggcattcaaggaggaggctcgacaaagggaggcccttgcggaggcaaagtaccgggaggaggccaagaaaagggaggcaaggcaccaggaggagctgaaggcggagggcgaggctacagctagggccaagcgtgagcttcgggaagccagggaggctatggacgaaatgtctgccaagttaaagtccttggaggagttgcatcaggcagacttgcagtcggcgactaacctgactgtggaggtgaaagagctaaaagactttaaagatcaagccttaaaaaaggccaaaagagatgagctcctgaccccagttgtctgtaagcattgcgtcaagtgctttgatgatggcacttacatggcctagcagtcaaatggccagaatatcaagcttgacttttatcccaaacacgaggaagccctcgctaagtttcgggagaagaagaaaaggctttacgctatgcttgaagagcgtcggggccctcgtcttcctcctcgcattgattagttcgaccagttcaaccagttcaacctatttcaaccagttcaactactataatttctttacatttacagtctcttttctttcctttcagacaa

SEQ ID NO: 101862 - DNA, 531 bp, Cannabis sativa
cagctactccggcgactttttcgacaccgacagcaaacttgggaaaagtcattggaattggcataaccgccagaaaaataactaagaaaccagtttcttaatgatttttccaacgacaatgccaattccgatgatttttttggcaccagcagcaactccgatgacttttccgacaccggtagctactcccgcgagtattcccgtaccgacagcaaactccagaaaaatcatcaaaattggcattgtcgccggaaaaatcaccaaaaaaatggtttcttcatcattaaactggtttcttcatcattgaaaaaaccaatttcttggtgatttttccagtgacaatgccaatttcgatgacttttccaacgccggcagcaactccgacgactttcctgccgccaacagctacttcggtgaattttccagcatcgacagcaaacttcagcgtttttttcgataccggtgacaactccgacgatcactgtagtttcatttattttattattttttaaaaatatatatctttatata

SEQ ID NO: 101863 - DNA, 674 bp, Cannabis sativa
catataattacgtaaataaacatgtgaactaagcgattaataaagtcaaaatatgatttctgaactttattgattaaaaataatattaacttgaatttagattttatttaaggtataaaatccaacataaaaatttataataatgtggatattcagccttctttggtagttccccaggctcttaatttcttaggggctttccaacaggacccatcagtattgctggggttaatggtgggtaggtcgtgtctccattaagggatattgatttgggttttatcctgtcaaggcatgaaactatcaagattaacattgataatgctcttaatgtcgatagaggatcttcaagccttggtattgtggttcgggatgaatttagagtggtcttggcttccgcagcttggtgtgttaaagacacttttaatcctgaaattgaagaagctcttactttgagatcagcggtttcgccaacccctttctttagagcatattgctttgtaattgtaaggtggtgttctttgaggattctctaaaaaaaaaaaactacttatttccaatgggaaatttgacaatatatgcttaaaaataaatagtacactaaaactatgctagcattttttacattatgaaaactatacttaaaacatttttcccttacaattgtacccctaaaa

SEQ ID NO: 101864 - DNA, 532 bp, Cannabis sativa
aacatttgatctgcaacgttttagcatattgcgaagggactcagagtcgatttgtcttttaaattgtttgttgggattaatattctctgtaccaatatcatactccataacagctttgccttttgatagagaccgaggggattggcctgctgcagaaggaaatgtggaaacaatggtactaggagtggaaggaaccgagggaaaagatacaggtagtgaggaagtgtgagggaaagatttaacggtttgtggagtgggtggataagtagcaatcatgggttttaatgggaggtatggtgggaaaggaataacagaggcttccttagatgaagtaacaccagttgtcaatggtacagtcttaaaagttgatacatgggtggaagaagaagaggaaattaaagatgaatgtggctgtggggggttcgagtactcacgggtagtcagatgattaggcaaatggagaggaattgttgatagatttggtattgcagcaatgaaagactttttggcaagtcgagtcataagtggccaa

SEQ ID NO: 101865 - DNA, 537 bp, Cannabis sativa
aattccagacctttcgaatttggacacattatttgatcttcaacttcgtgataatttgttaacagggattgttcccaatagcttatcttcaattccaagcttaaagaacattactttggctaacaataagttgcagggtccaatgccttcgtttcctaagtctgtcaccaatgttgagcttgatggtactaatagtttctgtaagagtactcctggaccttgtgatcctcaggttatggctttgcttcaggttgctggggatttgggttatccaactgtgttagcaaattcatggaaaaacaatgatgcttgttctgattggagttttgttatttgtgattctgatgggaatgttattactgtgaattttaaaaagcaggggtttttggggaagatttcacctgcttttgctaatcttacatctttgaagaatttgtacttgaatgataatggtttgactggttcaattcctagtagtttgacccttttgcctcagcttcaagttcttgatgtttctaataacaatcttactggtga

SEQ ID NO: 101866 - DNA, 1522 bp, Cannabis sativa
ccatataatgggtaaggcgaggtcatcatcctcaactcaattggtggtacgcaaggtatatgtgaaaatctctgacacttatcatatttcttgacaaactcatgggtgtccttgttgattgttggccagtaatatccttgtctaataatcttttttgatagactctgccaacctgcattatccccacaaaagccttcatgaatttctttgatgatctagtttgcttctgtaggaagaacacaccgaagtagaggcattaaataacctcttctgtatattttgccttcaactattgtgtagcgaggcactgactataagagttttcgcgcctcgtttttctcagttgcaagttgcccatctagtaggcagttgattataggagtcatccatgtagttgagctatatatcatctcgatgtcttctttttcacatatacttgactcgtttagcatctccaccaaaaccaattttaattcatccaagtcgttctgcgaggccagttttgctaaggcatcagcgttagagttttgttctcttgggattttcttgattttacagtaatcaaacttttccaagttcttctgaaccatatctaaatacttagccatttttaggcccttagcctggtatttcccgagaacctaatttacaatcagctgtgaatcactatgactcacgagattcttaaccttcaacgcttctgctatcttaaaaccagcgatcaaggcttcatactcagcctcgttgttagatgtgtcaaattgaaatctcaaagcatagtgaaacttaaagcattatgggaaaatcaatatcacacctacacccgaaccatgctcgttggatgcactatccatgaataatttctaaaggatccgcgtctcgctgaacaagtggattttcttctggagttattccttctattaaataatcttccaaagcctgacccttgatggatgtttgagggcgataggttatgtcgaattgccccaattcaattgaccattttatcaatcttccagaagcctctggttttgataaaacttgtctcaagggttgattagttaacactttgattgggtgtgcctggaagtaagttcgtaacttgcaagatgcatggattaggcataaggcaagtttttcaagaggggggtacctcgatttttccccagcaaccttttactgacatagtaaacttgttgttggtgctttccctcttctcgcactattgctgcactgattgcgtcttacgagacatctagatagaggagtaatgtctttccagtcactggtttcgccaaaactaaaggtgtttccaaatgccttttaatgctctaaaaggcctcctggcattcttctgtccactcaagtttcttgttgcctcacaatatattgaaaaatggtagacacttatcagttgactttgaaatgaatctattaagtgcgatcattcttcctgttaaggcttggacttccttaggcttggttggtgatggcatatctatcaaagccttaattttttcaa

SEQ ID NO: 101867 - DNA, 1385 bp, Cannabis sativa
caggtacctacggaagttccaataccttaacagaaggtatttttaccgccaaaaatttttgttaggtatttatctgcaactccgagttaaacttgggtattttcaacgcaaattactcaaaggaaaattacgttatcttgaactctcaacatttatcttccaagacaagttcccatggctcaataaagatatcaaaacggtcacatacattcctgttgattaagaaggctttcaattcaactagattattttttattttctctttgaggatgttgtggtattgtcatcgtgtcagggtctcattagttgcaagaagtgcttccctaccaagactaaacgatcaacattttcaatccattaaataaggaattgaccaaatagagttacgattcacttagaaatgacaacattatatttttagcttttgatccatctcagaatcccatacacatttctacaaaattcaagttagtgtagttgaaacatttcagattggagaagaagaagaaaagtgcttcacattcgaaatatactcttcaagaacaaaagaatggttgaaatcaagagagatttgaaatcaaatgcctcaactgtcactaaattgaattctgtagaaatgtgtatgggattctgagatggatcaaaagctaaagatacaatgttttcatttcctagtgaatcccaacttagttttgtcatttccttgtttaatggattgcaaatgtagattgttaggtctggagtagcgaagcaactcttgcaacaaataagaccttgacacgatgacaatacaacaacatccttagggagaaaatcaaagattgtctctttgaattgaaatccttcttcatcaacacaaatgtatgtcacagttttgatatatttgttgagccatggaaacctgtcttggaatatgagttctgagatagagagttttgtcctttgtaattgagattagataaaagaacgattagatatcaagtggttccaagatttaggtacacatttcaattgaaacaaagtctctgtaggtaataggtataccactttaaagaattcatcattattagagcaccttatctttctcatttcttgtaacacaaaatcaaatatcatcatttaattatatgtataacatgtgttactatactgaacaagtaaaagaccataattgaaactctttaaaaataaaaactgctatgcaccatacagtcaactattgccctaccaaaaaaaatgctatgcaccattctcattaatattaattacattgcaatataacttgctattcagcacaatgaagaccaaaaggaaaattactttatgataaatctatggtatagagttatttttatgctttaaaactaaagtattgtgagaagagt

SEQ ID NO: 101868 - DNA, 726 bp, Cannabis sativa
caaagtttctttgacatagacttgtaccaaagaatttcaaaatttttagacttatatatttctgaacaaatattaatgaattagtcaatcaagtaatattatggtctcgttaggttaagattctactttttgacttatttttaccatttgaataattattatatgaagatctttcttataaaaaataaatgtttcgatattattaaaaaaaaaaaaattgtgagtaaattaaaaattatataaatttttaaaagctatgtagaagaagctacaaatcctaattttttttgaaagacttagattaaaaaaaagatttttcattatttatcaaaatacctcaaaaagataacttttttaattttaaaagtcaagcttaaatttatctcacaaataataagtctcttatttccctctagcttaattattttttttcagttgactcaattgtattttcacactaaaacttttctaagaaattttcaaaactcttctatgaaattgacacgtattcttactgattcactctcttctcactgtcattttaggttgttttcttcttaattttgttttatttttaattttttttttttttttataatttttacattttaaagtagtttttttttattatttctatagcaatttacatagcaactcacataacaactaattaaataatttaaattgcaattaaaatccacatagaaactaacataaaaactaccg

SEQ ID NO: 101869 - DNA, 608 bp, Cannabis sativa
tctagcccttgattcatttctattatcacagcagaagagcatcaatcacaagaagatctgaacctagatcttctctctttcagtttggttaactatcttctttcgcactatgattgagtacttgacttgctatgagtggtcatggtactatcactaaaggcttgaattagtgaagaacaatagaaggggttcgaaatcattatagaaggagctctcatttactagttgtctgacagagaatgaaactagcttcagataggttgaatgagaatgagagcatcatgttccttttatagtattttttctatggtttatgatttaattatatggattaaaaagataaaaataatatgcgaaaatcatgcttaagtggcagaccatagtagtgggcttcactagttacaattttaccattttattcaactatttattttttttctttcaataatgccatatttttctgatttccatcttataaatgtcaaaactatttatataataattataagtaattaacaaataaaattaccatttatcttatttattaattagacttaacaaagtctattaattaataaataaattctaaaacttcttttcttcacaat

SEQ ID NO: 101870 - DNA, 653 bp, Cannabis sativa
agggttcagattttatgttaattttaggttgattctaagttctaattattggttttgctgagttgtgatggaattgcataagtttgaacttagaaaccgaagctttgatctttaatggcataatttgattcagtgactttctctatgaattactggttggaagatattttttataccttaattaggtactctggaaggtttggctgcatttcgtggagttttgagtaagaaatgagatgttttgggtgaactggtataaattgggtaaccggttttaccagtacatgtaaaactggttagccggtttttgcagggttcctcgagtgtctcgttttctcaattctcgtccatttcagtgccatagttgggtgtttccctacttcatgagttagcataatccatagtgagtataacagaacctagagttgtgggtttgagtttcccggattagggttttgaccatgtaatttacccggtttcattatgtgattaggacatccattttgcacaagactttccgttcaggtcggacagcacacttgaatctggaaagaaagtaagagttgtatataatgtgtgttatgaatatctgaatgtatgtatatgtttagtgtatatgcatgtttatattttgtgattcatacactaccaac

SEQ ID NO: 101871 - DNA, 514 bp, Cannabis sativa
gtttaaaaatcacgtaatatgcctatgttagttagggtgttacatttattgtctcgaattgtaacattgatttgtgaaaatactgggggactatttaacaacaattcctctattactaaatgtaaccatggtggttactacatattttatgttactattgcaacttgatcctttattttgtgtaatatgtttagtttataaggtaaaatatgcacattataaaatttataataagatcataattaagtggtcaatttaataattaatgagtggttacataattgcattggtaagttcaaaatattaattgtcgattttaccaagaaaatatattgatttctctcttggttattatacccattgtattgtctcatgggcaagtctataaaaactaattcatcccaaattacagatcaccttccaagaacaaaaaaactgaaaaaaaaaattgtataccacttcccaattcaacaaccacggttaacctctacgaattgtatagaaccataagcat

SEQ ID NO: 101872 - DNA, 650 bp, Cannabis sativa
acaaggccttttcttccctgcaaacacctcccccaccatttcagcatatgctgaaaccagtttatcagcttccaatgttcaaatatctttttctgctgatgctaattggggcagttgccaagacaccaggccctccatatccgggtattgtgtattccttgggcactctcttgtctcgtggaaataaaaaaacaacaagttgtttctcggtcatctgctgaagccgagtaccgtgctatggccaacgccacttccgaagtaacatggatccttgccctcctcaaagaccttggcatctctccgaaaattccagccacattatactgcgacaacactgctgctatgcatattagtgagaatcccgtctatcacgagcgcacaaaacatgtggagattgactgccacttcatccgagaaaaagttcagcaaggatccctcaagctgcttcatgtctcttctcagcagaatcttgcagacatattcaccaaagcattgcttctttcctccttctccaacattgtatctaagttgggtgtcatcaatatttacactccaacttgagggggctattacactgtaattagttagattagttaatgctttgttattgtatctgaccattctggtaacaggttggtaatctgttatta

SEQ ID NO: 101873 - DNA, 1228 bp, Cannabis sativa
  modified_base (911)..(925): a, c, t, g, unknown or other
gtttgtaaaaaaatttgaataaataaataaacaaacataacaaacatgtaacagattactggaaagtaagttaagatatttctattttaaaaaataaaatacttaaaatatatcttaactagaattaaaaatttaggttgttagaaaatatttaaataaaaattaaaatctaacaaatctcctaaatatccaaaattctaaatgaaattcaaatatctaactaattttcaaatttgcagtttatttaaacaatataaattaattaaatatctaataagataatataatatcgtaattttttttttaaaaaaaaaatagatatctctaatgttatatttctaatcttataatttaatgaattaaatataacaaaataaataaaattgaaaataagatattttgatggttaggattttatcaattttatttaataattaaataaaacaaaatatcctaagtttgaaaattttatggttacaaaaccctaaaatttctattcaaaccagaagtaacaaacttttcaaaatttcatgttactttgccaaaaataaaatttaattaaaaataaatacctaataagataaaatgttaaaagtaatatttttataatcttataatttaatttaataaaatatatttcaaaactaacaaatttaaaaatctggtatggttagtaaattttgaaatttaactagattatttctaaattttattaatgttttaacatcaaaataagatcatttcaaatttaataataaaataagcaatatctgatcttataattaaaataactaaaataaacaaaaataatccaaaaatttcaaaaattaatcataaggctagtttgtgaaagaaaaatcaaattttcaaatattaatatctaaacaaattttaattaattaaaaaattannnnnnnnnnnnnnnattctgataattagatttttatttgaaaatttgaattctacacaaaattctacccaaatttgaattttatttcaaagaaaaatgatttttgaaagtcataatatcacaaaaaaatggcaaagggagtatgcattgcatactccctgcgcgtgcggatgggagcagatggccgagggagaggctgcatgcagcctccatgtgatggaatttattttattaggacctaaatttactaacaattatgttataaacatcctaaatatgaacttctaaaacgatataaaattaaacacataaaaggta

SEQ ID NO: 101874 - DNA, 556 bp, Cannabis sativa
tttccttcattatagtattgtaataatatcagcgtgttaagatttttagctaatatatatatataccaaaataaattttataaaaaattgcatattagtaataaatatatgaatgctcttgatcttaaatgtgaattagtcacaatatagtacctttttaaaaaaaaaaaaaaaaaaatacgcccattgaattgctcaaacaaaaattacaaagcttaaatgtaaattagtcacaatagtacttgaaaaagtataatgatatttcttattaatatttatctcgagattaattgagtaatttcttatttgcctaaaataatattagttttttttatgtgacagactatttttttacgtagagttttataattaactagttggggtctaacatgcgaagcacgtgagccataatttaaatatattttcaaaattttatagtatgttaattttatcttttggtcttgaaatttttctctttttaaagctaaataatagtttaatcaataataaattcagagtccattagaaatttataagtaaatactaatacctagct

SEQ ID NO: 101875 - DNA, 653 bp, Cannabis sativa
ggtttgggaaacccgagtgcattccatcgattgtgtttgcttattcgtgagcaaactacccaactattgttcctcatggaaactaaagctactactgatgctatcactcatttcaaacagtctttaaatttcaaagttgccaggatgggtttaagtggtggaattatgttgttatggaaagacaatgttgatgtaacttttctttcaacgaatacaaaccattttgactgttatgactcttttgatgatggtcctagatggaatttctttggtgtttatggattccctaaattggttaacaaaaagcatacttgggctctcattaatcgacttgctgatgtatgtcctcttgatccttggttgttggtaggtgctttgaatgaaatattttctcatactcacaaaaatggtggaccattcagacataataaccaaactaatgcttttcaaacaactattgacatatgctctttgactgatatcactccttctagtgatgagttcacttgggcaaaaaataaaagaaatcctgctgcattaaaagaaacactaaactagtgcttcactaacaagatttggtaggatagcttattactccctactctaatgtatctagattattattgtttggatcaccgtgcactttaggataa

SEQ ID NO: 101876 - DNA, 809 bp, Cannabis sativa
aactggatgatattccggtcatcccccggcagctgagcaagcttttgagctctatccctaagagtaagagtgaggggagggcagtgatgtgtaggaatctgctggaaccgagtcttctatgaggaaccgaaggggtaagttccttcactgacgttgacgccctcaaccaggacgtctccatcagcatcgactggctccctagcctcattgtatcccacacagtttaggggtacaacctcttcctccgcctcagagggaccactaggacggacatcgtccagctcctcaatttcttagacctcagtgtccccttcatgatccccttccccttgacggttggatcttgttcggcgctgggcaaagtggcgtgccaagcgcgttgtctttttggtgcgagccatcattctatggctgggcgaaagattcaagggagaatgtctttccctagaagaaggttggctaaaacagaggcgagggtgatcctcgtcctagaattgaagcaattcttgatcgattcgatgttcgctctcccaaaactcacctggcctcatctacaaaagacaacacacaagatgagtgtttggttggaatatcgaacgttaaaacaagcaaatatgccgaccaggagtactcaacagattaaaggataagaatgaacaacgaaaagtcaaaacttaggaagtttgaaattttccacgagttagggcaaaaaatttcatgaagcttagaataaggaagatgaaagacaggcattatacagtttagaaagcaaacattacggactgtaaaaacgcatgaacccatttttc

SEQ ID NO: 101877 - DNA, 782 bp, Cannabis sativa
ttttgttcattcaagagtgtttattgtgtaattgcttacttttgcttgatcaccattagtaagtagtagctaatcttgattttagaaaaactgggattagtggaattgcttaaatgatgcatgaatatcaacttgaaaaagtgtgatttgtaaatagcatagaaatatgttatttaccctgtaaacttagaagaattgagcttaaattggtattcttaaaattaattgggcataaaaatatgttaattaattagagaatcaaatcataaatttacaacaatactcatttgcactattatatcaattttgtatttttaggccaatttaatagttctagcttgtttttttctcatagattgtatttattaatttttacatattctcatcactttattttatttttgtttaaatcaatttgtgagtaattagttttataaattaatttataattttcagtacatgtgaagacgatactcgatttatcactttattacttgttacgattgcatacacttgcgtatacaattttcacaacagaaaccaaccttacctccaccaccttaatgtcaggtggtaacacaggcttaaccagaaaagagaatctcgatggtctaggcagccagcaatcttccacaatacgaacttgttctcctaacccaatacgccacctatacccatatagtataatcaggcccggccttgggcataggcgggctaggcttgtgcctagggcccacctagcccagggtccaaaaaataatttctgcccttttaaaattatg

SEQ ID NO: 101878 - DNA, 901 bp, Cannabis sativa
atttttataaatatatatatttagtttagatgatagatattatagtgttgtgttagtttaattattgtgactatacagaattttaaatatatttagatgatattagcgttacgttaattattttgactatacagatttgtaaaaaaattaaaaattaatgcaggggaagaaattgtagaaaaatttattttttccctattttcccaatgtaacgactaaaaaaaaaatcatcgctgaaaaaaactttttataatgaaaaaatgtaaccaatactataaggcacagtttaaaaccgtcgtctatacccttttataggcgacgattttaaaccgtcaggaagtccactttagcgacggttttgaaccgtcacatattttgcccattttgcgatggtcgtataggcgacggttatagaaaccaacgagaatactttaaacgactgtttaaaatgtcaggaaaattcatttttgtagtagtatatgagtggtttttcagagctaggggtctagtggacgaagtgatatgtatttgacgcttgattttgtgattacttatggtctctctactttgtttatacattttgataatggtgatgagatactttattctaaagctaaccatgtaggaattttattaaatcaagggtcctttgatattagttgttttcctactgggctttataagctcaccccttattttctcccattccaggaactcagtttgatgtcagtggatgagaatggtaccgttgaggaagaaattcgttattagtttagtcttattttacttattaaacttccaatgaaactaattttgtatttaagatggaagggatggtctggataacataaattagctaagtgtcagttagaaacgaggaatgatggatgctagatattat

SEQ ID NO: 101879 - DNA, 918 bp, Cannabis sativa
gcaagtacataacaatttagtgagagtgtacctaaacttttgtaaattgctcaaattaaacaacttacataacttgataaaaaatacaaactgaaaaatttggtaaaaatataactcacttaatcttgatattagacaagttgaaaataatatcaaactgcacaatcaacttaaactaatccgactaatatgattaagaggatttttttatatgtatatatattatatatatatatttatgtattatataatttatataattatttaaaaaattataaaaattaactaatatatttttttatggtggttgatttaagtttaaatttaatctatatatttgtcgcattattacaattaactaatatataataattacatgtaaaaataaaaaataaaaataaatattagtagtcggtttggacgggttaatccgaccaaacccaccaattttattgggcaaattactattttatttttttaattaagcaaattacacttaagtttttgttacccgattatattagattgaataaaatatattataaaccgattaaaccaactgacgtaaactcttacaatttagtagataaatacttcttatgccatgtattttatttttagaaaaattatatatataaagaccgtctcagcctaaaagtttataatttttttttggttagaaaaacatttaaaaaattattttaaatttatttttaattttttaaaataaaagacttattttgtaaattttacccacaatcccttaattagtatgcaagggaaaaatttatattttaatcagacaccatgcttaagtgaaaaacttacgaagctaaaatgtaaacgagtaactgaaaagatgtaaatcatgcaaaaattcttagctaattttgatgattctaaacgttaagaatgcct

SEQ ID NO: 101880 - DNA, 1056 bp, Cannabis sativa
gctttaatcatgggtggaacagaagcttatgaattgaagggcctacctaagaaggattctttgtctctgtttttcaagtatgcatttcgaggtgaagaagacgcatcaaaatatcctcaactgaaaagaattggtgaagaaattgtggaaaagtgtagcggggttcctttggcattgaagactttgggcagtctcctttcgttgaagactgaagctcatgagtggaaaaaggtaagagatagcaaaatttgggagttaaaacaagaagaaggtcgcattttacctgcattacggttaagttacaatgcaatgtctccatcttttagacagtgttttgcttattgctcaactttcgaagaggatactttgatgtcgagctctgaattgattagaatttggatggcacttggaatcctttcttcacctgaaaacaaagaggaccttgaagttattggtgacaaatgctttgtagagttgtgcaacagatctttatttcaacttgatcctcttaaagtttatcctgaactctcccaatactttagagtgcatgatttaattcataaccttgcatgctcaataacccaaaatgagtgctcaatcgtaaattccaatgacgatagagagatttctgatacggtaagatatttaagagttgttatcaatgagagtaacttaaaaaagttgagaaagctaaagaaactaaagagtattcatgttaagtgtacttgggaagagaaggatgaagttgtgcagttattcctttctacatgcatctcaacattcaagcacttacgagtgtttgatttgtcagatttatcttttgaggtgttgcctaattcaattgggaccatgaagcagttgagatatcttgacttgtgcggtaatagaaatatgaagagactgcctgattcagtttgtaagctgcaaagtttgcaaactttgattcttggtggatgtgaggagcttgaggaaatacccaaggatatagggaatttggtaagcctaaggactctttggttaaccacaaaacagagctttttggcagagggtggaatt

SEQ ID NO: 101881 - DNA, 774 bp, Cannabis sativa
tgtatttactctaccaaacaaagtgaaagttagataataaatatgataatgagatgtgaatggaaaaggaaaccgacaaatgtatacagaaaaagcaaaagtaagccatattgtaatctcatatcatatgcttatacttacatgtaaagtgtatgtatatgcatcttcagctttatcagtagtactgtctgtgttttcaaatcactttttgtggcttcatccatttatctttaatttttatatcttacacgcaaataattttgtaaggaatccattggcacggtattaggtggtattatattaaattggattatatattatattttcatataattttatgttaaattttaatttatactaaaaatattacatatttagatatctataaaaattaatattagatatagttttacataaaagtattacataaaatacaatttaatatgatactatacaatacaatactgtgtaatacagcataccaaacgtaccctaatatcaataatgtagttttactccataattatagaaattttatttacagtctaaaaatttataagtacaccttatattaataattttcatttgacataaaaatatatatttaattatatcaatttttttaattttttttttcttccaatacattttcttaaaaaatatatttatcgaataaaaataaattatatttttaatattataacaaaaaattaaaattaaattatataaaattttattaaaaaaaaatagtatatatatgttgactgaggtttt

SEQ ID NO: 101882 - DNA, 788 bp, Cannabis sativa
aatactcaccaacaatgtatctagaaatgacattatcaaaatcaatcttagaagggttagaacccgatttcaagaactgattgtaaaaattccatataacttgatcaaacaaataatcagtagtggtaaccctttggtttaaagtatcatcttgctttatcttcttccttaggtaatagaataccacatctaaatgctataaaacataaaacaaacagcgaaaaaaacatgtattagaaaccggttttgcaaaaaaacgagaacaagattataaactaaacaaacatcaaacacatttaaaaaaattaacagaaaataaaagtataaaaaaatagtttcttacactgtctcacagaaattcaccacaatcatgaagctggtagaaccacatcttctcggaaatttcaataaaagaaaaatccataggtggcgataacaagttgtccgcatcggagtacttctttacactgctcaaaacaaacaacaacaaacacaaaataaagtcaatcacatataaaaaaacataaaaagaaatttgaaaaatataaatatatatacaaaatatactaacccatattcatgacgatgttctcatcaataaaattggaaaacttaacgcactgatcaggaccaatattataaccaatttcatctttaaatggattgattccatgcacaataaatttatcatcttgcacaatcctcattaactcttcctttgaagatgaagacgacccaaagtccacaacatatggcaacaaaataatagagcttggttttggctgcct

SEQ ID NO: 101883 - DNA, 502 bp, Cannabis sativa
cctaacaaagttttataatttcatatacaaacacaagttaacataacaaaattgatttctgaattatgtaatgttttataattactcatgttccagctaaggttcaacatctagtatggcgtgtgatttctggtactctaccaataaagttacagttctctaatagacatgtgcatgtcgatctcacatgtcctttgtgcaataaggcccctgaatcaattcctcatgttttatttggatgcgagtttgctcactcctgttggaatattgcagcagcaactgctgctggtgtaaatgaaagtgaatttttcacttggttctgtgacattttgcagcagggcagtaagcatatagcagaggaaactgctatgattttgtggcgaatttggttggcacgcaatgatatgttgtggagtaagaagtcgactacagtttcagaagttgttcgttcggctaggactaatcttgacacatggaaaaatgctcaaacaaaggtttttac

SEQ ID NO: 101884 - DNA, 588 bp, Cannabis sativa
tccatagctgcaaacattttcaataaaaagtagaataattatgaatctatgagaatgatttaaatcaacaatgaaattttataaactgaaaaattaaaagaaaaaaattataagtaaagtcatataaatagtgatgataaaaaagatgctaaatcaatagatggatacttaaaatgtcccttaaaataaatatttacattaaaatcaattcatactactcttaacttgatacaaaattaatataataatacaaaaatagtatttttctaatctttactttctattatgcttccataataaaaagtgctatttttaattttacacttttgttatgcatcacaacaaaaatgatattgttaaaacacacaattgcatttttgttatattcaggtccaaaaattcaagagagcccaactcaaatttggcaatttaaacctcacaagagtcaaagaatcttcttagttgttgggcccaagagtcaaactcttaacattcttcaatattttgttcactaaaaggagatatgagcccaacaagcaccaaaaccctagtatatatatgttgcccctgaattcgcccaaaatacgt

SEQ ID NO: 101885 - DNA, 2278 bp, Cannabis sativa
  modified_base (2212)..(2237): a, c, t, g, unknown or other
gcattagctgatcagccatgagttcaggagttgggcgaagaatgtacatgttcgggccatatcagaccaagcgggttaagggtctacctgtgatgaatttttgaatctctattttgccgcttgtgtcggctaaaagaaagagacttataataatgtttgtaaatatttttgggatcccaactgttataaattttagattgcaaagtttaaattattacaagttttatttttattccgtttatcataaaagtttaatttccgcaccattttaattagtaatcccatttaggggattagggtttcgtaagtaacttgggtatcgtgcctatttatttagggcgttacacacagccacaaccacaagaagagcctcagtcaccagaaaatgaaattattctcccaaatgattatagaccgggtgatgatgatatgttctgtacatatgacaacacgaagatcacccgcatcagggatactcaagattctgagatataagtgttagagacagctccagaactagtggagaatcagagaaagagaaagcgaccaaggtggttcgatgagtacactgaaataagaagaagtccagggcatcaaagacacttttgaatgtggacccacttagagttgttgatcgaaactgctcttgacttttcacagttgggttctgggccagattaggaacaagtacctgagagagtgtttttctggtagacacgattcagcttggttcttccaactacataatccgaagatatggcttggagacaatgtaagtttttaagactttttacgtctttagtttttaaagactttacctaacttcttttttatttaatctctgacatatttaattttcatgttttagcatttggatgcgacatttcatttgatgaggaggcgacgacacttttatccagaggtttacccaaatagatgtatcatcatgcctcacattttcccatcaggagttattggtcggtggcaagctgtgggtgatgaccacactaactttcagtgggatgacggcatattggatttgatttgaggggatgatgcccaatacttggaaaattggaagaataaaaagagaatatatatggccctcttctttgacagtgcaaagcattgggtgactttagaggtagaccttgatcgttggatgtttagcatatttgactcgagccttggatcgatttcctcggatgaattgaagagtcacttgacattgtgggaagagttattcccaactttaatgctgcagtccggcctattcgagaatcatgaaatgatcgtcatgcctcaactgaatgtcttagagagccaagttagaaattttagtttaaaaggcatcaacgggagcattgtacgacagacggaatcaaggtaacttaattacgattgattttttattatttgacttgaatttaatttgcatacttttatttatttactttttattgtctcatacagcggtgattgcggggatgcatgtgatagagcacatcgagcataaaatgttggaacttccgtttgataatgtgaacgatgaaaatatgaagaaatttagagagcggtggtgtgtagatttgttttaccaaaatttagcataagcaattatgtttttttattggtatttattaagataacaatgtaactagttttttttattggtatgcttatgctattttattagttcataataattttaggccttccagctatgcctcaaattataataatgatcaaaaaataaaataccatgaattctaatgtttaaaaaaaatccaacacgaattcaataacaatacataatagtacaacacatcacagtacgactaaattaaaaatttatttttaacatcagtaggtgcaagtgcttctgttgtgcccattggcaccgcacttgccacaattttgtggtatgataatccttttaccattacaagcagtttggtttgacttaattcttccaaccttttgcttcttgggtcgtcctactagttgcttctcaacaggcactccaactgtcatgttctttctttatgtcatctggcaattcccaatcatcctcgtcaccaactggcataattgaaccttcatatgtactcctccaatattttgttatgtaatatgacgagcatagtgcgtacatgctaatactttattgctgagcttcagcacatgcatgagtgtaacaccctaactaacnnnnnnnnnnnnnnnnnnnnnnnnnnatgctgtgcagctcgttgctaatcgacgaggtttatggaaa

SEQ ID NO: 101886 - DNA, 780 bp, Cannabis sativa
taattttggttaattaacccaaaaaggggtaattatcaacttatccccaaagtataatacaaaagggcacaaatgtaaaatagtcctaaatttttttctcaaaaaaataatataaaatgacctaaaatttaaaaattaagttaatatatgttcattttaaaaaaacaaattaaaaaactagttaaatataataaattagcaaataaaaattataaaaatatatttactacatattattttttttttaaaaaagaatataataattaaattaagttaatataattttttagtatgatattgtttacccaaattttaacgacgatgacgtgtcgggagtagcaacacatggcacgaaaatattgagactaaattaataaaaaatatgtaaagccatgatcgttgggatgatcgttaatcatgaagagtggtcgtgacctttaatcatgaagagtggtcatgaccgttagaatggaacacaggcggtcacccttacccctagcttgagtaaggtgggcatctccaagaaggaaaaacgatggactaataccttcgtaagaggaatgaacgatcaccacaaacctgcgggagtcaaaccagtctagggggaatatactactacccttacctcaactgccatgatctacatggggtttagtctaggggtacatcccttaacctctaaagtgttagtctaggggtaccccttaccccttaaagggttagtctcgaggtacaccccttaccccctaaagggttagtctaggggtatacccctacccc

SEQ ID NO: 101887 - DNA, 702 bp, Cannabis sativa
atggatctttttgccatgcctaatgtaaatgggtcccaagtccgggtcagggtctgggtctggtccgggtccgggtcccggtccaggtccaggtccgagttcgagtttgggtcccaaattctagtctcggtcccggtcccgggcgggtctgggtcctgggtccgggtccagggtcccgagtcttggttccgagtccgggtcccgagtccgagtctgggtccgggtcccgagttccgagtccgggtccaagtttgtgttcgggtctgggtccttgtccgtgtccatgtccaggtccggtgtcttgggtacgggtccgggtctgtgttcggttccggatcccagatcctaggtccgggaccgggtccaggtctgggtccgggtcccgggtttgggtccgggtccaagtcccgggtgccgagtccaggtctaggtctgggtccgggtctaagtctgggctcgggttcaggtcctgggtcccgggttccgggttccgggtcccgggtcccggtccggctccgagtttgggtccgggtcccggtcctggtttgggttcgagtccaggtcccaagggatctgaatcttgaattaagttttttctaaaataaattgaaatcgggtcggatcagatccgatccagaaaaaaattaggcggggcggagtggatctgatccaagatccaataagtatccgaatgtttcggat

SEQ ID NO: 101888 - DNA, 587 bp, Cannabis sativa
ttagggtaaatacttgttgactcggaaatctagacactaacttccaagtcccactcgcttgctagattggcgagaataaaatatttgttaagtaaagtaaagagagacacatcaatttatagtagttcactccctgtattgcacagtaatgaaactatgtctacttcgagtttttatttctcatgagatggtattatagaaaaaggctaagtgttaaagcttcaatttttagagagagaagctctgaccttataggtagttttctgaatttgaaaaatgaactaagggagctcttattttattggtgaaggaggccgcccacaaaaaaaatagggggaaaatacaagttggttattttttaccgtagatgatgatctaactgtgaaaatcaacttctgaagttgatctttaatttttggagtgcaggtcgtgacagcgaaacccgctccggataagcatgagcttattttcataactcacttggggtgaaatttgaggctgatagctttagaaccgcaattgaagtatgagacataacatgatagagaattgaaatagcttcaaaacgcaagttgaatcgtgtcaat

SEQ ID NO: 101889 - DNA, 611 bp, Cannabis sativa
gcagagggtaacttgattagccaaaagtggatcacgaggttcctcctatatattgcgattccttgagggtttgggaacatgcgcgaaacactttgttaaggcaatctcacaggtcacctctctgcacgtggtaccttcttcctagtcttgtgaacaccgttcctaccctggtgtaaacattgagggaatgactattagttctaaaggaagaggaatgcgactctacgtcgtttatctcagtttgaagttgtgcacaaccacgtaggttgtgacctttaggattttcctcttcttgcggtctctccaccctctaactatgatgtctatttgtgttgggaatatttggacctctaccatgtatggggtcacaaattggttgatttaggtcgagtccattgtggtcattatcacatgaacattccctgtaattacgagtcatgttagaatgtttactatgatgcctagtatcattagttacctgattatcaacgcgatgtcagtttgggactcatggtggatgtcatgcttgaacctgatctcttcctgcaatctttacttgtaatgcatgcattttttcttaaatatccgtgtactgtgaggttgtcagttag

SEQ ID NO: 101890 - DNA, 552 bp, Cannabis sativa
aagtgcccaccaagttccatcagtaagcaacctcgccggaaacgatggagaacgacccccgcgtccggggaatggcggcactaccaccaccgctccaactgctggccatggagaaacttgtcaaactgtagtcaatggctagacaactactgggcgtaccaccaatgccattgtcgcaggaggtgacgctactgatggcgccaccggaagaggtaatactagaaattttgtcccacctacagatggtgctggccaagctcagattggccgcagccctggcgtctttacgccacagaatgaacgccatgcagacatcgagggaattgaccccaagatggattagcttcgagacgcgataagccagatgcaaggccagttccaaactgcgcaccaagcgcaaaatcaagctcgagtggccttgactcaaagtctcgctaactaaaggagagaattccaatcttggctggaagatcatgcttgtgagatgaggaggcgccaagacgaccaagatcgtcgcacccaagaggctgccgacttaatacgaagctactt

SEQ ID NO: 101891 - DNA, 505 bp, Cannabis sativa
atacaaacctagaaaatctgagaaaatctcgttcctccttctcttctgcgattcaggccaggggttcctcatcgtcttctgggaacaaggggtgcgaaccaagaggtcatcgtcagcttcaaggaaggcaacattgtcacccaggtcaagacccaggccaccgatggatacgacgccgttcaggtgggataccgccgtgtgagggaccggaaactgaccaagccggagatgggtcatctagagaaggccggagctatccctatgcgccatctttaggagtttcggctgcaatcggtggaggggttcgaggcgaaccaaaagctggtgttggaggagcttttcaaggaaggggatttggtcgatgtttcggggacgacgattaggaaagggtttcagggtggtatcaaacgtcatcacttcaagaggggtctgatgactcatgggtccaaaagccatagagctctgggttccattagagctggaaccactcctgggagagtttaca

SEQ ID NO: 101892 - DNA, 810 bp, Cannabis sativa
  modified_base (480)..(483): a, c, t, g, unknown or other
  modified_base (775)..(776): a, c, t, g, unknown or other
cggtttgatgaacacccctaatagatacattatgattatgagattatctattgttacaatcctaatagtcaaagattctctatagatgatctacatcgaatagggacaaatttaccgttctaccatttaatgtattttatccttaaagtacctataaatgatatttcagtaaattaatataattactgaaatgaggccccaatcatttatcactatcaagccaagctcaaaagaaaacatcgtttcacttctaaatacttatagaagctatagaatatatttatgattagcgctcccacttaattgaactaccatgttctcaagatgtaagtatctgccataactattggttagctttcacggacaacttgaagagcataaataatacaattgagttgaacctaaccatataggattaagatccatagacctaagatcaaccagtgatattaacttatagaaagatataacagtaagttnnnnatatcttatccaagttcaatatcgattcaatccaatgtatactccatacattcgatactggtaaacttttccaacacttatccaaggtgtaagtataccttatcgctgattatcatgtcagtctaaattcagtgtattgatcaatcatgggacttaaatttttgaacatataatcatgattatatttcattataatgacaacactataatcatgaataaatatatgttttgggcttaatcgaatttatacattaagcatataatcatgaaataaataatgtgaaccatgcannataaaatgatttctgatcttttattaattagtaa

SEQ ID NO: 101893 - DNA, 879 bp, Cannabis sativa
atttttattattattatttgtatattattttttatgctattatttttctgttactttcatctggttttcttatgtttttatataatactgtaaaaatgtagaaataaaactttgaaggtaaaagtgtatatatttcactaaaaatagcaatttatgtaattttttcaaatataatatcataataaaattattttaattaaatataatatttatatatatattacaatttaaaataaaaatattaattcagtaaatttataatctacatattttttttattaagataaaaatattcttatacagatttatacattttatagacaggactttaaaaatgtaaaacaaattatgatttaaagattatttttatttgtaactgattcaattttaaacttaattttttataataaattaaaagttattctactgtaatttcacacctataaaaaaaagtccaacattttatatgttcctaggcccatttgtttatattttggatatgcctacttttccattcaattgtttattttttggtatggaagggagttaaaacatcattctctctagttatttgcgtacatacacaagcatttctagcttgccaataaagtgatatgaataaatttttctcacaaacatttcccaaattcaaaatcaaactattctttttataaaaaaaaaattaaattaaaaaaggggatattattctaataggatgtttcccaaattcatggagtaacttaaatctatacttaacattacatatatacataagtaaaagatatattagattttaaggtttaaatatttgacatttgcaaagacaatagaaaccacaattataaatctcactcaccaaatctcataatcaaatgtaca

SEQ ID NO: 101894 - DNA, 717 bp, Cannabis sativa
atgaaggcttttgaaggtcttgtttagctttttcaagctctttcacttctttttccttctttgtaaaaattttccgctacatatcttgcatggaaattttatctacctctttctcactttcaagtgaggtagatataggatcttcttttgtcaacaaagtcatgcagcaatccgacacactgtcatcacaaccaaatgccttgtcctgtaactcttttagtaaaaactcctccagagttactagatttcattttggttgttcgaatttgtttcttttggaaacggccttttgttttccgatccttttcttaatcttttgccctttatatctggtctaccccaaaatttgacttcgaagttttcagatggttttcgagatggaatttttgcttgttttttctgagtacatgtttgccatgtactttccagatcctcttcactatcataccagtcctcccaaatttctagattaggctatgtcatgagctcatacaacgtagcaatatttgggtttcctggctttggcatgtctaagtgggcatggactattgtaacttccttgtcaacttcaaatgccacaaaaattatgtccatttgtctgggatcatttgggatttggtcattctcagttaaggaggttgtatttgtcaccgctttccaaagagaagagtcaatctcaatctcttttctcttgatcatgccttcgataatgttttt

SEQ ID NO: 101895 - DNA, 1073 bp, Cannabis sativa
cgagaatatgaacaggaaactcgtgctcgtcaagtcgcatacattgctgcacttaacaaaagaataaatgaaattgttcttcatttattcttttacgtttattttgatttaatttatcatttattgtaaaattattctaaaatcggtcagttatgtaaaactaaaaggacacgtgctttctatataaaggagtgatccaaatcaaataaactaagctgaaattattgtaatagtagactaagcagactgagatttgactggaccactatactttctttgtgttcttattatttctagtttttattcggtttgttagtagctaattgttgaatactcgctactctatgtgagtattcacacattttaatctaggttatttaatagtatttaatactcgcacaaattttggtgttgtctaaattccttcgacaacacataccccataaaaattgtgtggaattatactgtgtaattacataactttttaattatttaatataattttgtcatatatttttattttcttttttcatatatatgatttaatttttatcctgtgtatgatgttattttataatagtttttttatagtgtgtttttaatttcttgtattatttgtaaataaataaaagaaaaattaacatagaaatatatgatagctaattttttctattaacattattttttgagttctcttttaaattagatatctaaaatatttattcatgacttagcatatattttaattgataaaatacttaaatttattgtattattaatttttaatcaacgtaagaatgtcaaatactcaaatttctaagatcgaaaaactatatatatatatcaaatgaaatagtcctatatctgaaatgtaagagaaattagatatcttaatagatatagaaattcttttaaatattttttataaactattatgaaattttgagagtttattttatgaaaaaaaaaattatttattttagttattattaatagataaaatttattttaaatattttttacaaaatgataatatttattatgaaaaatcgagtttttacaaatgccaataa

SEQ ID NO: 101896 - DNA, 981 bp, Cannabis sativa
  modified_base (429)..(430): a, c, t, g, unknown or other
tttttttttttaaaaaaagcaatattgttttttttttttataaaagcaaaacttattcgaagactcaaaatgcaaacataaaaattattactactgtttagaccattactttctctgattagtaatactggtgtctaacataatactttctaaatttcaagaaaattaacacatatacattcacatgaaaaccttagaatacaattaaaacatatacatttaaaaattaagaaataataattatgcttcttcatcagtcaaaaattcaaaactttagtaaccaacaaattaatttgggtaaatactattttatactctttattttgcaaaagttactaattagatcttctgttttgttaaatgataaaatggactttatattttctaaaattatacaaataggaccctaaactgattttttgtcaaaannaaacttaataataatctgatttagagatgttatcataaaactggttatattttctgtatctgttcgtgttagaaattgttttaaagttgattatattaaaaattaaaattgttaaaaattaaactcagggtcctatttttaccgttttagaaaattttgcggtagatttacattaaattttagcattctactccaatgcacacttacaaatctttgatgtaaaatttaatatataattaatgtctctattaaaaaaaaataaaactaataattttattattattttatatgtaagataacattaaattttagcattctactccaatgcacacttacaaatctttgatgtaagatttaatatataattaatgtctttattaaaaaaaaaaataaaactaacaattttattattattttatatgtaagatacctaaaggcttattgagatttttacccccgaactttgacatgtactaaatcatgcttcctaaactttatggtcgttaaaaatacccccagaactattgagattgttaaatttaagtactttt

SEQ ID NO: 101897 - DNA, 909 bp, Cannabis sativa
tgcgtagttttggtgttattgactgttttttcagtgatttttatcttgttgttgtttggctactcttttgaaacgtcacttatcaaaaaaataattaattaattcaattagatattattttttctaccaaaaaaattgagtttaggagaagcaagttggtacggctccaattaaagagcatctaaaatcattcaagcgatcctacattagaagaatttttgaaaataaatatctaaaaaaaataatttaaattaattttaaaaaataataataattaaaaaataacattaataaattttttaattattaatattattttatattttaaaataaatatattattataatatgtataaaaaaatttaattgtatacaagcagtcatatagtaagagtatataccttacatcataataaccacaagatttaaaatcaacggtaaaaaaaaaattccctaccaataggaaacttttgctaggtcctatcatatagtattaccctatattgataatgtaacttatttttcgtttaattttatagtgctatttttttatttttaaaaccatttgtattgtatatatcccaagcttcaacattttgtaaataaaattacaaaaatacaattttttttttagcaaaaagtaaaaaaaaaaaaaaaaaaaaacacagaattcaacctcacaataattataatttaactataaatatactaaaaaaaaaaaacaacctcacatgacaattataataaactttaaataaattataaaataacaaaaaaaaaataatctaacataacaactataataaactataaaaaaaatagagtaatttgcagcataaatatttaactttaactctcagttgcaaataaatacctaagtttaatttttggcagtaataatacctaagt

SEQ ID NO: 101898 - DNA, 547 bp, Cannabis sativa
attattaagattatgttgttgtgtgtgtgcataatatacagtacatatatatgtatgtattttgtcgccattggttgccagattggagttataaaataaaaatttaaaccttaatatacagtacatatgtatatattttgtgttttattgaatacgtagtgtgtgcatacatattttgtagctgtattgtatttataaaaatattttaattgtattgtatatattctaagtattgtatatgtattgtgaatgagaatgagatagagagttttaattagtttagaaattaagtttttaaaattttgttagtgagagatataatttattatatatgaatatgtaaatttttttaaaagtagatgagaaaaaatagctcatttatttattttttaatttacttattgaatttaatttttttttcgcattcctatttatgtgtttttatattttctactaattagtaactagtttttttttcattcatattcatatatttactaactagttatatcatttattagtaactagttactcataaatgatataa

SEQ ID NO: 101899 - DNA, 816 bp, Cannabis sativa
atagtttggggggaatttttaacacggccaaaaaaatttaggggccacgatttactacatgtcaaagtttaggggaaaaaattactaattagccaaatagtttccattttagaagagctcactgtttaactgatgatatctttgcatctcgccaaatatatgacattatatatcatttggtaaaaaccttacaattttttttttcttctgagatatttttattttgtattttctcatatcttcattacttgctaaatatttacaaagtttcaaatatgtgtatgaatttgtattaaatttatgatttatttctatcaattgataattgtagtttccatgaatgaattaggaccgtctctcccgtcccaagcacgaaggtgggttaggcttttgtctcttccatgatttcaatttggttatccttgcaaaacaaggttggagatttttatgtcatccggagtctttggtcactaaattatacaaagcccgatatttttctcatggtgatttcctttcggctgatttgggaagaaattcaagctttatttggaggagcatctagagtgcctaattcttagtcccttgaccaactattggaatcgattcctcaatcaacattttgaattatccttggctccccgacgctaccaatccttttgtaacttcttctcatgtgggccttgttggccaaccagtcagttctctcttttctgttgatgatagagtgtaggatattgagctagttcatggcatgttcaatgaaagtgatgccaacttaattcttagtttttcgttaagcttctcggcatcgtgtga

SEQ ID NO: 101900 - DNA, 591 bp, Cannabis sativa
ttataacacagtaaaaaaaataaaaaaatatcgcctgacagtatatttgtaaaaaaataattaaagttagtataccatggaaatttccctttgattaatctactaacaattatggggatataattttgtacagctaaaaaaaataaaaatgggttgctgggatggcccatataaaagacagttaaataaaagtaaaaaaaaaacaaaataattatagtcttctctttatcttgtaccaaaagaaaataagtaaagaaaaagaaagaccaatcaccgacgaaatcagatgattttttctcttctcttcttttcttcttttcaaacaggaaataaagattaaagagaaattataaaatctaattcagaaaaaaagtttgtattcaaatacattaagatatgttaaaatttactttctcgtggcactttaatttttctttactaaacaaaaaacaaacaagatttaataaaatatgaattagctaaatctaacaatttacaagactcaaaaagctaacatactaaatagaaaaattaacttaacaaaaaaaatagaaaaattaagatacaaactgttgactgaggttttcggca

SEQ ID NO: 101901 - DNA, 1899 bp, Cannabis sativa
catgtcgtcttcaagctcaatccgcgtcgacgtgactcgtttatttgccactcaggtccgaatgagccgacccaaaacccaactggaatttacaattctgacgaccaaaatacacaaacaattccaaatgaatttaaatataaaaattaagagatccatataagttttaggcaaggaaaatacgtaaaaattagactttaattccaaaacactaacgagtccgaacgtgaatttgaagaaaaatcacacgtttttatgatttttttttacaaattgattttcatgcacgaaatcactctataattttatatgaatgtaatgttgcataaaagattcgaaatatacaccgaaaattaaaaataaaaaatttcttataatacggaccgaaaacttaaaactttcatgtatatatatattcttttacaatgtatatactgcataaaatcatcataaatgtgtgaaagagagtaatacatataattataattttatgtaataaaattataaattcaatgtaaaatatatattaatatatataaatatatatcgaaaagaaaaaatatatatatgtttatacaattatacatgattgtgtatatgatacatatatatatatatatatgaataaatattatgaatatgcagataaagttgctagatgtagagatacacatgcccacccgcatctcggtaatggctttgttatacaacttaatttaatttttgtactacttaagtttggttggactattactagtttctgttagttgacaaaataaacaatgcatttgcagcaaaaaactctgggttcgtttaatgtgaagaggattgcaaaagaacaaaaatggtcaaaacagttttatgaagacaacttcaaaaaatgcgtgatggtacttcatcatatacacaggcttgttcttacttgttaattttgatttatgttaatgatgcatattggtatcgatgtgttcaaataattccattaattgtagtgtcaaatatctgtatggtctgtaatttgaatgtatttatgactttactatttttcttatcaattgtagatatttgtgccgattttgacgctagaaggtccaccacattagtttggtaccgaagttaatatgaagtcgaatgttgtctcatttttggactccatacacaccacaatggatgagaagtatcgtgttgatgctatgaaagaaatggtaaagttacaaagtgtcattgtttgatgtgaattcattgttgattgaatctaactaattgtatatgtttgcagctgtcgacgttggaccttttttccgatgagaataagtcaaaaaatgtgagttttgtggattttggaattgatactaaagatcgtggccttcctcaacaagaaaatgatcaagattgcggtgtatatgtgatgaagtacatggacgttgtggctaatgaggaagatgtagttgctcaggtatacctttgtttatttagttcagaatgtattagtccagtttcattgatattagtgttgtgtaattaaaatttaatttagtgttctactatgtgtaatatgatacgtattgtcaacttgatcagagtttattatattttgaatgttttttttttgtttatgtctttttccacagtttgacccgattgaggcgcgtttagaaatccctgtgtgaattatatctgatgaactaaatgaactgcgttcaaaagtgattgaagatcgaaggagtgtacaaggcagctcatttgcatcatcctcagcccctttgcgtagtccgtcaaagtctccaggtgatcctctgttcaatacggtgaagtctcgccacgcaaacatgtatcctcccttaagagcctctcctacgtttcggtctggcaaggctaagatttcatatggtgaatagt

SEQ ID NO: 101902 - DNA, 712 bp, Cannabis sativa
aaaaaaaaatatatgtatataacatatataaacgtttaattcattcatttcaataaagaagtaataatacaattagtttgtatgggaattttgatagcaagttgataggttcgatcctccaaccaatctcttttaattgttttatgaaatagcattacatgcatatatttttacagaattaaagtcaaaggtactatattttttttataaaaaaagtcaaagatactattaataataaataaaaaatgtttattatgtattttttacattatttttaatactctattttataattttctacaaaaatactaaatatatagcactttataaaatactcttaataattaaatattgctttatcaagatagtttacataataaaaattaactgttatatatattatataaaaaaactaaattgatagtgtcaatttcattaatacttaaatttttataaaaggaaaaaatctcatttttaattttgctttattaggctctcaacatcttaataggtgtattttaatacaaagtttaacacattttaatttaataaataatataaaaaacgagaacctcttaaatatcaaatggcaatgctcatacaaatatattgcatgtgttctcaaatattgtatatatattgcgtgaagcttattgcaccactaatcaatccaaaatattgatatataaatatactagtgagagtatacgta

SEQ ID NO: 101903 - DNA, 816 bp, Cannabis sativa
  modified_base (281)..(287): a, c, t, g, unknown or other
aaaaagagattcgattgatgggatttggtatgatacttatgaaatcgatgatatcgatgagattgatattcaaatatttcttcttagtacctacgggatagggattgagaaaaaggaaaaaatcgaagatttcaaatagtattttttttattgaaaaatcaatctgatttatttggtacatttcgctcaatgagaaaataagtcagatactacaggatcaaacctatggcttaaggaatgatggaaaagaagaaaatcaaaaaagaaataaaaaaagaaannnnnnnaaaaataataaaaaaaagttaaagtaaataaaaatgaagtagaggagtccagattcaaaatgaatcaaaacgtgactgaattggtcctagttactcttcgaaacgaagtggaagaagggaaaggtgctcaaacgaggaaaaagatccaatgacttcaaaagaattgaacgaggagctgtatgagataaaaatctcatgtacggttttgtagagtggcagtaagggtgacttatctgtcaatttttccactctcacccctaaaaaaccaaactctggcttacgtaaagttgccagagtacgcttttttattgtcatgtttggcaagacgtatggtaattactatgtactttaatattatgtaatatttataattattatcattttgtaacaaatatttaaaataaaatttatctactaataatatttaaaataaataaaaatctcttcataaaataaacttaaatttcataacatctgtaacacttggaatagtgtgtacacgtgtgagacaagagagagagagagagag

SEQ ID NO: 101904 - DNA, 1279 bp, Cannabis sativa
tattggaaaagtcaccggaaaagttattgtcgccgaaaaatttactgataaagtcactgccaccgaaaaaggtcattgaaaaagtcaccagaagtagatatctcagatataaataaaaatataaccggttctataagataatgaataaaaataaataacataaaataactcaaaccagttataattgaaatataaccggttctgtaacataataaataaaaacaaataacacaaaataactcaatccagttgaaattaaaatagaaccggttctataatagtgttataatgaataaaaacaaataacatgaaataactcaaacaggttataactaaaatagaaccggttatataacatagtgaatgagtatttttggggtagatataatatgagtgtaattatttagtaggttggagcatattgaatgaatatttttgtttgagttattttattgaattagttttggtgtgtgagtttttatcttagttgctttatggaaccagttttttggtctcaaatttttaattagttgataagtataaccgatttctttatattatatttaagttattgtatgttattatttgtatttatttattttattatggaaccagttcttttcatatttatgccttattttttggcattgatctctacttttttttttatttaaaaaaagaaatatcaccggttttatgaggtattttgttgtggaactagttttgttttttatttatgtttcagtattttaggaactgatttcttctttgttttttaattgcaatcggtttgagttattgcatgttacttgtttgtattcattatgttatataactggttttattttagttataaccggtttgagttatttcatgttatttatttttattcattataatactgttatagaaccggttctattttaattataattggtttaagttattttttgttatttatttttattcattatgttacatgaacaagttatatttcaattataaccagtttgagttatttgtttttattcattatgttataaaaccggttctatgttttatttatatttgagacatctacttctggtgacgtttttagtgacttttccgtcgacggtgactttttcgacaactttttcggcgacaataactttttcggcaccgacgacttattcggcaccggtgactttaggggtgttcataaaatagctgatataattcaatccgcacgatccaatccaatccaatccgcaaagtgcggattggatttgattaaaaa

SEQ ID NO: 101905 - DNA, 887 bp, Cannabis sativa
aatgaagtagtatgagaaaaaaataagtgggtattacttttactataccagtaaatgtgtttttgtatttctttggtacataaaaaaaatattatgtataatttttttttcatataaattttgaataatttataggattaaattattgtttaatcaaatagttgtgcttgtatatatttttattttctcataaattctaagcaaagataaatgtgcaactaactatttaaactttaatttggcattgttcattattaataattttttaaaacctgatgtgtgtctactataactacaatatatcattttaaaaactaataaagaaaaaaaaaactttacaaaagttctccacctattggagaaaaaaataaagctcctaccattgaagctcccatatttattagattaaaaaatattacatataatatgttatatatatattaaatttaattaaccaacaaataaaaaataattgaaagcttacccgaaactagcaataatgcaatacacataaaacttatgatagtgatagtgttaaaagaactcatcttaatttactagtcaatgataaataattatattgatatgatatatatgttttgttgtatgttctcttttatataaatatatatgactttgtgaaagtgggaaaaaaaaatcatatatttatttaaatttactttctatattattgagtatggtttatgtatttagatttagtttctatttataattatgtatattttttttaattatatgctttatatatgtatgtagatttgatttttatttttatttatactttttaaagtatgatgtaaacatttatatttatttttgattttaaaaagatattgtctatctgtatttatattaattttttatat

SEQ ID NO: 101906 - DNA, 659 bp, Cannabis sativa
  modified_base (26)..(47): a, c, t, g, unknown or other
  modified_base (327)..(350): a, c, t, g, unknown or other
tcagggggcatttttaacgaccttannnnnnnnnnnnnnnnnnnnnngtacatgtcaaagtttagggggcaaaaattctaattagcctaatatatatttataggtttagttatatgttttttaaaaattggagacgatttaaagttagatatttaagtttttaattggtttattaaaataatatatagtaaaatataatttatagatttatgctctaataaaatattaaaactgagagaattaaggagagtagagaaaaataactttggaatgattttagagtgacatgtcactgcctcactcttctccttttatatatatatatannnnnnnnnnnnnnnnnnnnnnnnactattcaatggttatatttttattgtaaccatcgtggttatatttttctttgacctgtaatagcatgttaccaataggtaaacattccttttttaaaattaattaattataattatctattttcttaaaataattaattaaatatttaacaagatctcattaacaattaatatttataatatttaattatctatatttaaatccctactataatcattttaactattacgccatttaattataatatttacaataaaatttatttttttacaaaaattaaacttcttttttacacaaattaaaattct

SEQ ID NO: 101907 - DNA, 565 bp, Cannabis sativa
tttcattccttgcctgaaatattaccaacctctttggcaacgatcacaacttcttgcaaaattatgagtattcttgaaaatggaaggccaatagtaccccaattggaagacttttgcagctgttctttgtccaccaaagtgtccaccgtagggagatgaatgacaatgctctaggatgcttgcaacttcctcttccggtatttaacgccgcattattcgatccgcacactgcctctacaagtagggctcatcccaatagtagaatctcacatcatgaaagaatttttttagttactgcctatttagatcaggaggctgcaacccactcactaagtaatttacaaaatcagcataccaaggagtatttgcttgtgttacaacaagaagctgctcatccgggaaagtttcttgaatttgcattttttcttcctgttcaacacctgtttccagtcgagataaatggtgagccacttggttctccgtcccttttctatctcgaatttctaaatcaaactcttgaagaagtagcacccaacaaatgagtcttggcttcgcatctttcttg

SEQ ID NO: 101908 - DNA, 760 bp, Cannabis sativa
aacatatttcactaaataaatcaaggatcataatatactactaaacttgtccctttacatttgttgtctctagaatattttattaccaattatcattagatttattatacaagcaataattctgtagctttacaattatagtcatctcttttattcgctgaccatattttagtattacaaatttgtatgtatttgattttatttaggtaaacacattatcttaaattaaggtaaatgacatgtcttattaagcaaattttctaacaaggtaaacaacacgtcttatttaggtaaacattatgcttcaaataaagtaaatcaaaacataatttatcattattaaggctttattagataaatttcgtgtcttaattaaagtttaaacataatttattattggataggtaaacgttacatcttattaagtaaattttatgccttgaataaagtaaacaacatcttattgtgtaaatatcgtgcctcaaatattgtaaaccaatttataattaggcaaatttgtgccataaataagataaattaaaatataatttatcattaaaaatgtaaattactactataaaatatggtaaacgacaccttattaggcaagtttcctaccttaaataaggtaaattacacaacttatttaggtaaataccatgccttaaataatataaattagaacataatttatcattaaaaaggtaaacccactaccttaaaataagataaacaacatgttttatttaggtaaacacat

SEQ ID NO: 101909 - DNA, 502 bp, Cannabis sativa
acccgaaacccgtgaacccgaaacccgccaacccgaaacccgataaacccgcccgatgttcagccctaatgtcactaacaacaaattaaaataaataaaataaaattaacaaattttaagagaacaaaaaaaaattatataaataaagatattttgaattttattttacattatattttctttataaataaaattaaaatatacatttgatccattaaaatttaaaatatatttgtttaagatatgtattagatttttaaatttttattttttacattaaaatattaattatacatataatttttgttaatatataaaaatgtatgaattgtattaaatcaataatttttatatgctaatcaatatttgatccgtacaagtatgaattttagatttttcaatctaatctaattcacacaagtacagatatctacacttgtgcgaattagattggattatatttgatgctgcatattatattaaattgagtattactattata

SEQ ID NO: 101910 - DNA, 760 bp, Cannabis sativa
  modified_base (726)..(726): a, c, t, g, unknown or other
aagatcaaaagtaaacatttaatattacatataattatttagatcaatatgctaccatactcattagcataactatagaccctaattctaggaggggccaagtgtaatgtttatttttccaatacaaatataagaacttatttagtgagcaaaataaatgaacatggcttcatcttaatacttatatatagtagtaattatttaattatttattaagagatatatattttattatggaaagaaaaaagaacatttaattaaaaaaaataggaagaagaaactacataaaacataaagatgacgacattgataatttgatagaggcacatttcaaaataactggccaaataagcactggtgcaagatctcccataaaaaaaaataaaaaataaaaagaagagatcttgaactagtcaattttatttttagaaatactaatttcttttctttttttaataatttgaatattatttaaataatttttgttagaaataatttgaatagagtgtccagttgaaataattttattggaaataatttaaatagagagtcgggtagaaataattttttaaaaaaatcaaatcaagcatagaatatagaagaatttttttttttttttaaaaaaaaaagctaacctattcattttttaaaaaggtaaaaaaaaaaatgagatcatgcctagattatagaaaaattaaaaataaataataaaaattctatgtgtgntacctcatgataatcaaataaactacaacaaatt

SEQ ID NO: 101911 - DNA, 1019 bp, Cannabis sativa
ttgtggctgtggcagagttaagggtggtcgtaaggtaaatccaccacaagctcctccggattgggagcagaggtttgcagaaaggcaagatcgaatccgccaacaagatgaagaaattctaaggttaagatagcacggtattcttgccgtgcctccacaacaagctgctcaggccattgcagttccagcggtgccagcagaacaacctgttgctggcaaccgtatggagccgttatatgaaatgttctataagcaagcacttctattgtttctgggagatcctgatgtaatgcaggctgagcagtggctcactgtgattgagcaaattctgaatttcatgggtgtggatggtaatgatagggtgacctgtgctacattccagttccaggaagacgcccttatgtggtgggaattggtgaccctcacccgggatgttactattatgaccggggaagaattctgggaattattcaatgccaagtattataatgaagctatttgcagtgctaagcggaaggagttcactgagttagtgcagactgaaggaatgtcaattactgagtataccacaacatttgatcgtttagccaaactcgccgtgggtatcgtgccaactgatttcagcaagaaagaaaagtacctggccggtttgaatttgaagattaaacatgatctgttgatcactaccaatgaagcaaccacttatgcgaaaatggttgaaaaatctcggagagctgagggtgcgattaaattccttcaggagccccaagtgactccgaaagttggtccaacccccacttttcctacacctgcttatggtagggatggtggtgattccaccactgaccaaaacaggaaagttgccccaccatctgctggtttggggtagagcaaacggttccgcgggaaccaagatagaggtggacgttagggttattcttacccagagtgcccatgttgtaagaaacatcatccgggagagtgcaaccggaagccatgctttcagtgcggcatggtgg

SEQ ID NO: 101912 - DNA, 932 bp, Cannabis sativa
actgctcttcagtcttatgattgggtcggagcattggcttaaaccacagtttaatagtatcaagatcaatgtggatgcggctatttttgaaggtcaaagtcgatttggaagtgcttttgttgttcgggatcacaatggtatgcttattgaagggcatacaaaactttacatgggcaacatggtaccggctgttgtggaagctttgagctttcgtgaggctctgagttggattaaagaccattcgcatgggccggtttgggtggagaccgactgcctcctggttgttcaggccctaagaagttcaactcttttgtcttcttattttggttgtgtgattcaagaatgtaaagccatgttggctaatttaagtaatgtttatttttgctttattaagcggtcagcaaataaagtcgctcatgaatttgcacgagcgtctctattttatcctgattgtactttcaatatggaaaatgttccaactgatttgttacctatattggtgacagagtttgaaggttaataaaacttgattttcctttcaaaaaaaaaaaaaggataaaatatggaaaaagctaaatgaatatcaggccaaacttttctcacaagggggtaaaaagattctagtgaaagcggtagtccaagcaatgcctacttatcaaatggcatgttttaaaatccaagaaggcattggggaagagatagaaagattaatagcacaatattggtggggctcagttgataataagcaaaaagttcattggagggcttggcataagatttgtaaaccaaagactgatggtggtttgggttttagacgttctagccagtctaatcaagttcttttggccaagcaagcatggcgcatcttaatgaacccatcatcaattttggcacaagtaatgaaagcaagatattttagaatatctaacatc

SEQ ID NO: 101913 - DNA, 785 bp, Cannabis sativa
aactcgaccccaatactaattacaagtcgagtccgagttcgagtctaggtcccgagtctaggttagggtttgggtccggtatctaggtctgggtccgggtcaaggtctaggtcccggatcttgggtcccgggtctcaagtcctaggttcggattcaagttttgggtctcgatcctgcttcgggttcagggtccgattttgggtcctgggtccccattcctaggttcgggtttgggttccagttcgggtccgagtcccgatccctgttgaagtctggatccgggttttgagttaagttttttttttaatatattgataccggattgaattagatctgatctaaaaaacaatcaagcgggacagagcgaatctgatccaagatctaataaatctccgaatgtttcaaaataagaaataatctatcggatcgaagttccaattcaatccaactaaatgaattctttcaacatgcctatttacacttaacaaagtactaataaaaaccagattccaatatattgatatccattgtgaatattcaaatgatattgagttgtatcattattgttgggtggtgtggggattctaaacattgattactttcatggtcctttctcatggttggattcttgctcataaattactttaaggtaatattttataatgttatgaatccattcacacttgcatatatagtatagatagaggtatcaacttgcatgaaatttttatttaataatatatgtagcagcacagataaataaaacaacactttagtatatgcac

SEQ ID NO: 101914 - DNA, 587 bp, Cannabis sativa
gatggaaatggtcccatgaaatctataccccaacaatcaaatatctcaatcacaagaatagggttcaagggcaccaggtgacgatgggatagagagcctaacttttggcacctcacacatgaacgaaaaaattcgttggtgtctttgagcaaagcgggccaataaaggccacactgtaagatttttccaatagttttcttcatagagaagtgaccaccacaagcatcattgtgacaaaagttcaaaatactagacacctcatcatcaggaatgcatcttcgcatgatctggtcggggcaatacttgaacaagtatggatcatcccaatataaattatgcacctcgaccagaaacttgcgtctatcttgtgaactccaccgagaaggaagttcacctgttactaagtagttaactatgtgtgcataccacggtaacttagtaacagcaagcagttattcatcggggaaatcatcatgaataggtggatcattagcagaatcactgaattcgagtcgagacaagtgatctgcgacgacattctcaacacctttcttgtctttgattgtgatgtcaaattcttgcaatag

SEQ ID NO: 101915 - DNA, 564 bp, Cannabis sativa
  modified_base (269)..(273): a, c, t, g, unknown or other
ttaaacttaccatagaaatatagaaagttttcatatagattgggtttataagtcttaactttcttaactaaacttatcaattgaatagaaagaagagaaattatgtacttacattatgaagtaattataaaataaaaggtaaatactattttggaccatgtgttttgtaaaagttgctaattggactctccattttattaaatgacaaaatggaccctatattttttaaaattgtacgtacaaataggaccctgaactaattttttgtnnnnntaaaacttaataataatctgatctagagatgtacttatgacaaaactaattatattgtttgtatctgttcgtgttagaaattgtcttaataatttttgtttttatcattgttatttttttaaaaaaaaaataattattgtatgtttaatttactttttatccaccaattattattcatcaaataaaaaaaaaagaattaattaattagtaattgataatcaattctcaaataaatatgaatgatatactttatttattattatattacttgatttattattattattatta

SEQ ID NO: 101916 - DNA, 639 bp, Cannabis sativa
tttatatagaatagatatataactaatatgcgaaaaataacatacaattgtttctatttaaagtaaaataacagccatattttaatttggtctttatattttgtagtgtatttctacctaggtgcttgattgttcacggagcttgataatacttggatgtgtgcttcggtggcatactcctcggagaacacattgattaaatttgtcgaggtgaagaacagaagcaagtttaagtaagttaagtctctgaacatttacaatatcaacattaggaatgtttttgaatgccttcacaagcttagcaccctaagttgcatattggaattatgttaagcgtctcacatttaatgttgtaaatatcaacttattccgagaagatcgtgcatgggcaattcatagtataacaattgttctctaaaaagaacttatttatttgaaatgacttttcactctttgtcttggatagtggaacgtcctttatgtgtattgagtaagtcttttttttatggtttaatttttctaagaaaaatttctctaatttgcaattacagtcgtcttttcatcaaacccgtagattaatcaccgttgataaattatcatggaaaatcaaacagtgctcgcgagatatagcttataagt

SEQ ID NO: 101917 - DNA, 506 bp, Cannabis sativa
ggtttggtggatccaattgtctaaagtgattgttcaatgatggaacaatatcactttgattctcactcctcgagttgatgttgtctatggtgtttccacccgttcccaaacctagctggataaagattggccttagaacaacttgctcccaaatggtttagagaggaatctcagtttgtaggttggccaaaggtgcactactaaatggctgatgaccaaaggttggctaagtgggggtgttaaagagccagagatacctagacgatccccacactactacaaatattacattttgcgtcggttatgacattagttatgggcagacgcaggtttagaatcggtttttagagaattagcttcagttgtgcaccgacgcaaaaatctcactttttgcctgagtgcacaaccgacgcaaacttcctaatttttttcttaaaaaaatcaaacataataacgggcttcgggcccatttaagaaaaccctaaccctaaagatttaatactcac

SEQ ID NO: 101918 - DNA, 675 bp, Cannabis sativa
gaagagagttgtctcatagaattaaggtttttgtttcgcttctcatcactttctttatataggcattcacttagagctaagtttagatgagatgagcttaaataaagactttggctgatatctgactcttagggttgaatacatatgggctttgtaatatccggttttcttgaagggtaatttttttaatttttttaaactctagtttattctatttgtcattgaggataacaatcatttcgaatatttatgaatttagtagagtatgagattatttatagtaacaataaaattacttttagttatatatttcttgccatgtgtataatacctagtatatcaaatgattgtgtcattttatttaattttagtaaatattattattatgggtataatgataatatatgttaattttataatataatatggtaaaagaatattcgttattattttggtacactactattaataaaattagtgaatagtattatataatatataatgtactatattatatggtatatttcacccgcgttttattatttttattttttattatcatttagattggagaaatagtatacgtagtgtatacggttatattgttacataactctctaaatttgtgagagtgattcgttctactttcagtttaaagtgatcaattttatttga

SEQ ID NO: 101919 - DNA, 903 bp, Cannabis sativa
attccactctgtcgaacgccttactcgtatcaagtttcaaagcagccaccccctttcgccctgaggttctgttcttaatcccatgaattaattcaaaagctaccaaaatattatcagttataagacgatttggcaagaaggcactttgtgtttcagagatgacacttggaagaataggctttagccgagccactaacaccttggtaatgagtttggagatgacattacataggctaatcggacgaaagtctttcatgtaatgaggcttctttatcttggaaatgagagtgattatggtagagttgagtggtgttcgatcagccccgtcattgagcacatttagaactgtggaggtaaccaaattgccaaccacatcccaattattttgatagaacatggcagacatgccatcaatacctggtgatttgtccgatcccatagtccttagtgcttgttcaacatcaatttgagtaaatggcctgagtagatcatgattcgtgtcatcttagtttattcatggtattattttttttttttatttatgtatattgctttatagatatagatacatatatttagtttatttttttgacacattttttttaaaaagtacaatgatatttttttattaacacaatgtggagtagtagatactaacatattaattatatattaatcattataatatataccccgtattgaaatcttaagattttattatttctattattaatgtaattatttatttaacttttaaaaaataaattgtcatttaaactgttactaactaaacaaggaagagaaaaaacgttgaaaggtatgaaggtgtaacaacaaattccatataaaaaataatataatattacaaaaagataaataaagttgtcaaactaagtaaagaag

SEQ ID NO: 101920 - DNA, 727 bp, Cannabis sativa
acagaagcagaatacatagcttgtacagaagttgtgaaagaagccttgtggctcaaagggataacaagggaactagggattgatcagtagactgtttgcattcattgtgacagtcaaagtgttttacatttcactaagaatcaaatctttcatgagagaacaaagcacattgatgttaggttacacttcatccacgatgttctatccagtggcaaggttcaaatcatcaaagttagaactgaagagaatgttacagacatgcttactaagacactgcctgcagcaaaatttgaacattgtcttagcatcttaaaagtctcagattcttagtcttaacctggtacactttatcagttcaaggtggagaattattaaattatatgtcctgaaacgtgtattcagtttgttatgtgtaatcttttatttttccatgttgtaagtccaactgtcataagtgacatctcgacagttatgacagttggtactccttagtgtttagttagttataaataccattaggctctatattctatcatagagaactaagtgtaaaattctcaacttgtaaaaacacattcctaaatcaataaaacagtattttttcagagctcaagtttgtgtggttgtgtctttggttctatggagtacttgtgtgttgtctttggagattctttgttgtgtgtatgtgcgtgtatgaatgcagatgattataagtgtttctcaacat

SEQ ID NO: 101921 - DNA, 1080 bp, Cannabis sativa
  modified_base (286)..(297): a, c, t, g, unknown or other
tggcaacacataggggcattcataaaccttggtgcattttatctgtgtggaattccaataggtgtcattttgggtttttgggcaaatttgagaggaaaagggctttggattggtatacaaattggttcatttgtgcaaatcattttgctttcttttgttactggttgtacaaattgggaaaaacaggtatacccttctcttcatctctattatatataatatacacaaatatatatgtataaattattgggatagttacgtaaggtattattttttgtaaaaaaannnnnnnnnnnnacgtttaaagattttttttttatatatttttacggtttttcataaaaacaacatgaaaactacaaaaaaataacatgaaaataatattaaagtaacaacaaaaaataacatacagataataaaaaatcagcaacaaattaacaagagtacaacataaaaaaaccttattttctgtaaataaaataaaaaaaaatcataaaaaatgtttaaaattccgtgaaaccgtattttataattttttttattatttttgtgtatttatgaaattatccctaaattattcctatataaggttcggtccaagtgatttggaggccttttaaattcaaattgggccttatgcactcgcccaagttatctaatgtgtgtgtcgaccctgccaatattatcctcttagattaagtggatcatattaatctttcatgtatgcattaatcaattcttaacattgttttttttttttaataatgtttcaggcaagtatggcaaaggagagattatttggtgatacatcaaaaaatggattagaggactagaaatatatttatatatattaaaatttattgttaattttgagaagaaaaaagaaattaatgacattttatttcttttatagggattattttataaatacaaaaaataacaataaaaaaattaaaaaaaattacgaaattttaaacatttttacgatttttatgattttatttacaaaaaaaaaatgtctttttatgtgtatttttttttatgttttgttatctgtatgttatttttcgttgttatttt

SEQ ID NO: 101922 - DNA, 1036 bp, Cannabis sativa
tttttttttttttgcaaaaataaaatatacgaataatatagaagaattgaaagaagagagtaaacataatataaaatatatttacatgaattatctatatttaaaaatacaaaagataaaaattatgaagtcaatataaaatagtaattaaataaaaataaaattatataaaaaaaacttcaaaaaataattgaatttaacaaagaaaaacaataattaatacttaaaaatgtagccacgcatgtttattatcttcttctagttagtgcatcatttagctttatatgagtacatcttataaataaatttgaataatttttcataatcgtaaacatatataataaagaggaaattggaatacattccatcctatacaaatatacattagatggaatcaactttaccatcatcaaaatcttgatagcatcctcctcttcaaatttctcatgactttcaacatattcaatctcaattctgcattttccaaacacaaaaagagattagaaaagaaaagataaaatgtaaggaatccaacaatcattttatactttcaatagtaacatcaaatataatttatgtggtgtaattatttttgttatattgtgagttatgaaaatgaaaagatagcattatttaaataagaatcaatatatcaatataaaggaaggtttaaaatattcaatgtggcatcttaaatgatcttttcttcctaatctttcttctcttattttttttttttgttttatttctctcattttaattatacaaactacatatttttatatagatcattaaattatagtgtctcctcatttttataactcacatcatttattacactttttattattatcattattattcacaccatttataatacattttattattattattcaacaatatatattttttttttatatctttctcttttaaattaataataataatattttttttcttctttttttaccctttctattgtttcttttttcaactttttattatttattaaaacaattatatatatgattta

SEQ ID NO: 101923 - DNA, 674 bp, Cannabis sativa
tgcccaactgcatccaaaaccaaagaaaactcgtagattaaaatattacactcacaataccacccataataacatactattaaacataagatcagcaaactaaaagatgacgtaaatattgtaaccaactcccacctaaagaccacaagtattcaagcaaaacattaaaatgaaaaaaaaccaacctccccaagaattccagtcttctgaaaagagttaatatgaattgcactaatacacaactaagtcttctccttctccttaactctccttatcaaaaaactgctaataatacatatatacttataataattgttggttccatcttaacacataagggtcttttaatatcatataaaatatacttattaacataacattataaacttattctaagcatcgtaatgttttggtagaattgttaaagtaggacaaaaaactgacttctatactccaagaacaaactgaatgcaatcctactaaaaccggcacaaaaatcccactcatacttacgtctaagcgaaccataagcaaatctataaacatccttctatacgttctatccataaaacctagccaaaaaaatatatataataccatattataaaacataaaatataaaaccaaagtaagagcttaaggccacctacggtgcaaaagaaaaaaagatataa

SEQ ID NO: 101924 - DNA, 634 bp, Cannabis sativa
caaagatttaagaagattaagacagcaatcaataacagaactaaaaatagattgcattacaatattgttttcaagtgcttgaaccaccacaagcaaatctatttcaatagtagtgtgctgccaacctttttttttttaaacccaacttagtgcctctttgacaccaattgcctccaccaaacttggatgaacacagtcgactttgtgtaaggagaaggcttcaatcaccctgccatcatttccacgggcaatacctcccacaccataagactgtgaggcagcgaacacggctccatctacattgaccttaacaaaaccaacatcaggtgcagtccaatgctcaccgttactgtatgtatgcaaaattattggttgcggctcaaagcgatttgagcgagccaaattccattggttaaggacagagtgtgcagatacaataacattagctataacattgattttcttattccataggaagtcattcctgtccttccatatggaccaagaaaccattagagcttcctcgaacatcgaaggctgaccacgactcaaaacattcaacaaccagtctctaaaattagtggcagagaccatgccgagggacacaccagatcgattccaacttgattgagca

SEQ ID NO: 101925 - DNA, 604 bp, Cannabis sativa
tagtacggacgtaacttgacatccgtaatactgcctttgtgaaatatgcattgggtgagtaggttgcctcagtgcactctcgcgtgtctcttttcccttgggcgaataatcctaaaaattaagagcactaatttttagggtcaacacttaccccccaatctactagaattcttttaagtgttctggtagactgaaggaattggggagttcgtttggctgcaaggcaattattatccccatcacgcttactgaggatgtgtctactatatatagaggggtccccttctttgagctatcactccacatcattcctttggcgtagtggcaagcctccttccccttgtccaagagttcctgagtttgattcttcctcaggtcacttcttatactttttatttctattattctagcatgggtactttccagtcttgaagttatattatgttggatgtatttttcccttgttattagggtgaggctcaatgattttcaccttggttttggcaacaagcatctctcccactttgaatgtactacgggtcactttgtccaagagcactgcagcaaagagggaagattccctccccaccttaggcactaaccg

SEQ ID NO: 101926 - DNA, 767 bp, Cannabis sativa
aaaaagaaaaaaagaaaaaaaatccttgggaaggcagctagagtaccagttccccttcaccttgaagaagtgatgagtccaccattacttttgtgttgggtcaaagccttcgactatgcatctgtcataaaacgagtgctaagaacgattagcactcggattgtttgcaatcttcctaatgtacgagaatatatccctgaaagatattgacagtcctttcaaagctcctataatgaaagttccaacaatgacatacacggaattgggagtaagatggaaaatgtgcaccataccaatccatgtgacaataatcactattgggggttggaaaatccaaaacttacaacaagagctaagtattgggcatatcgatttgtgaccctccaatttagctcttcctcctaagtaagaatggagagttccatatcatccgagatgtgacattcttgttttagttcttcaagcttcaaagaaatggaaatattcctaagggtaaacgaaaaattactgtttccacaaagaataaataaggtaacagggaatgtgatagcgatgaaaaatctcaacatttatggcaagtctattcactttcctttcgaccactcaataatcgtgcccaaaatgttcatgagaggaaaatgtgtaaggaaatgacgatttccaaaatcatgctaacacctggcccaaaatatgtcttcatagtcctaaataaagctctatttcaatgtaatctctatcatttgaatatcaataaagagacagaagta

SEQ ID NO: 101927 - DNA, 564 bp, Cannabis sativa
tatctttgtaataggatcagacagacttctcaccatctcacaaaaaatccttgatattgtgtaattcctttctatatgttttcccctcttagggtattggattctttattgtttggcaactatatctgtgtcatcaagaagtaacaatagtaattaatctatgactagaataacgccaaaaattgtataaaaaatttattaggctaaataattatctagtcgccttctgggccacttcaacattcagtctcactgatagagttagagacttccattaggcttttacacttctccaaaaaatcactgctctacccccagagtaatcatcattccataagtagactttctagcattaacgcaagtctagaaaactaatttcgtgtagtctaagagtattaaaatactacccttattgactaacatatagctcctcttttgatcttaagatttatttgattgtcttccaatatttttttcctggattaaactgatacctactcataactcccactcaacagcaagtgcctagtctaataaattctagagcatacatgagacctctca

SEQ ID NO: 101928 - DNA, 592 bp, Cannabis sativa
gatgaaggcacttcagtaaacttgaagccaaaaacctctcttttcgctctgaacttgcttagcaaagaacgatggtgaaaataaatttgtgtacaaatgttcactggtattaataggcaaacaacgaaaaagggtaatcatttcaaaagaacctcagacgcctcggttcccccttaaaagcgaatatagaaaatcaaaaataatctagtgcagccgtcaaccgtggtgagagaaaatcggatttcaaaatatcaattgttaaagcatttattagtcgaaaatcgaatggatgcccagtcagcctgacatcgagtcgcgaacagatgcgcttgacatgtgtcacccatccaaatgcaaaagcagcttggatgaagcctacacgcaacttcggaagtcccgtacagactagggggaaaattttatcccaatttttgtactctgacgtggcatcgcatgatggtgacacatggaatcaattccaagtatcttttcacagaatatagtccaaacaggatgcctcatatgcgtgctcgaagtaaagcgatcaacaatccgcgtagaccgaccaacacttagcgaatttagctttcgc

SEQ ID NO: 101929 - DNA, 617 bp, Cannabis sativa
  modified_base (574)..(579): a, c, t, g, unknown or other
gttaggttttgaattaaaatataaaaaaatcgcttcatttgaacaatcttgaccgaaccctatatgggcctagtggatttcaattttgccattttattgaaacttatcttactttttacgaatgccatcttttaattctaactctataaatgccaaatctatctatttaataattataattaatgatcaaataaaattttcatttaacttattgattaattagacctttcaaagcctcttaattaataaacaaaccctaaatcctatttttcttctcaaagaagccctgcttagtgaaactcataaataagacatggtcttattcagaattctaatcaattaattgagtctacaatacaatattatctcaaatactgtggggaccatggacctatataatcaagctcctaataagtagttctagaatttaccaagtaaattttctatcttatcaattcctccttactccactatagatttagaattgcactcttgattatatagaatgctatattcactaagaatagatacattataaattatccattatttcaatctaaataatcaaagatcnnnnnnagatgatttacattgagtatggacaaatttactattct

SEQ ID NO: 101930 - DNA, 869 bp, Cannabis sativa
tttaaagttaatttgcacaaaatatatgtattggagcccaattacaaaatttgaaccataacattaactcattgtcttgagtacaccttgcattaaatatggctggtcttagtgaattgtaccatattattttgttgattgatttcaatcacaattcaaacacataatattttttcaattattaaaattctatcacgtgaataaagttttatagctatgggtgtaatatatatcttaaaaattacttacacatgagcagggcaagctgtaaactaaagcgggctaggattgcacttagggcccacttagcgtaggagccatgtagcctagaggcccatatagcctaggagccaaaaaatgttctctatatttaaaatacacatatttttttattaattttgaaaataccacatgtttcttaaatgaggatctaatttttttaaagcccattaaagtttaggatcatctattaaacaccaactttgtgctcttcttcatatgcatgaggcggccgatggtagcttttacctgggactcccgagtactatgagccgtaacaaatcggttgtgctggggtaccttaaagatagagttcaaaaaaagattacaaagttgggagggcaagtttctgtcgagagcggaaaaagaagttctaatcaaatcagtgatccaagcttttcctagctatgcaatgagtgtgtttttgctgcctctagaaattagtaatgatattgagcgtgccatgaccaagttctgatggcgattcaataagattggcagtaaaggtattcactggatgtcatgggataaactttgcaagcataaacgatgaggaggcatgggctttcgagatttgcgtgattttaatc

SEQ ID NO: 101931 - DNA, 548 bp, Cannabis sativa
cttttacaaaatagaagttcaattttgttatttaacaaaatatatggtctaattagtaacttttgtaaaataaattgttcaaaataatatttgccctaaaataaaaggtcataagaaagctattaatttcttgattatgaattcaactaagcttttcaaaaattaccactccgataactacactaaaatttatttactaaaaaactcaaaggctcaaaagagactaataggtaaacggggcggggcgggcgcgggcattgctctcccatcaccatacccacttcttaaattcacctcatacccgtcccaatacctgtttaaattaagcaggggcggggcggggattacctgacgggagaaggattcccatcgtgtactcattacatatatatttttttttaaaaaaattatgtttcaaagagaattaaaaaaaaataatcataaaaatttagtaaaataataaatttaagttaaatagtgtgtacagttaaaaaaagtataatcaataaaaagcctaaagcatgaagttattttaattgtagtagtta

SEQ ID NO: 101932 - DNA, 809 bp, Cannabis sativa
ttattcttttctaaggctcttaaatatttggtttctaaaaatcttggtaaatagaagtagaatataatgactcattccattcaaatcttttgcttttgattcctatatttagcagagaattatcaagatttgaaccttgatcatctctccttcaatattgttagacacagtcttcctcactatgctaggtgttctttgacatgagtgggcataccctcaatttaccatggactttgaatatttgaggaagaggaagaaggaatttcaaaaatagaagaggctcttttctattttctattttttctaacaaaggagtctgataatgaattgagaaaataagagccatcttattctatttatagggagatactagagttaggtttagaatttaaatggaatttaagaagataaaataatggatagattaaccttaagtggtcggccacattgtgggccccacaggtttcaattttgccatttgtttaactcatctttctttccacaaatactatattttaactctaactctataaatgtcaattctatttatttaatagttacaattaattatcaaacaagattgtcatttaacttatttattaattaggcctgataaagtctctcaattaataaataaacattaaatcatcttttcttctcaaataagcccctacttagtgaaaattcacaaacatgacataatcttatttagaattctgattgattaattaaaactaattaattgagactacaaaataatattatcccagttagtgtggggaccatgtctccatgtcattaagctccta

SEQ ID NO: 101933 - DNA, 751 bp, Cannabis sativa
tttttttaaatatataaattgaaaggaaaaaatatttaaaaaattaatataattaaagatatatcttttatgtaaaataaaaattattgaaatagggtgtatttgtaaattttaaaattcaaatgaaatttccctatgtatactaataaacaatatgcgctttttgatggatatttataaaaatttaaattatatatgaaataaattatctcttttatttaatgataactaagtaataaaattgtatcaaatttttaacattactaatttttcatataattttatttgaataatatgaaaagtaattaggtgtaactaaaaaaatattaaatagtctctctcattcatttatagattacttacaagattatatatttttcatatgaataaggaattttttgatatttaataattatattcttatatttaatatatcatttatcttataattgtagtttatatatttctctaatatattatccattaactacttgtttttagggcataaatcccaacatctctgtcatggatgacagtaaccacaagacagaaattggtcttgaacctcccagtcaatgaaggcttggttaactctgttctgagctcgatcttcatcagtcagaaattcagctagtggtgattctttgatgaacttcaagagtcgattccctttaatgacagcaagaacttactgcttccacagtaggaagttatgatcatcaagacaaatagagatgttgtgattgaagta

SEQ ID NO: 101934 - DNA, 505 bp, Cannabis sativa
aaaaaaattctaacatggataaagttcaggaagcataatttaatacatatcaaaattcgaggggcatgattttgtagatatcaaagtctgggaatacagtttaatacataaacaatcactgaaataataaaattgaatgaaattagataaaagtctttaaatctagtaatctcaataattcaaggagaatttttaacggtaaaaaaagttcaggaacatgatttggtacatattaaaatttaagatgcaaaaattaaattaaattactacacaaatataaatgcaaattggattgtgcacattagattgaattaattattttatcaacactcattttcttaaacttgtggagcccactcattcttggttgatggtgcggtgaatattgcatgtagcttgtacgacatttttttttttttttttaacaaagtgattaaaatcactcatgaatttacgacgcccacgtctgccaccggtgctggaaaccctcgaaccaggatagctc

SEQ ID NO: 101935 - DNA, 1195 bp, Cannabis sativa
ttcactacagaagtgcgacaagctctactgcccaagggattccggttatccgaatccctaaagtataaaggtaccactaatccaatagactatttagaaacatttaatactattatggaagtggatcaagtaccccaacttgtgaagtgtcacattcttgcggcaacgttcgaggagaatgtccacgattggttcagccaattgcccgaggcatccatctcaacatgggagacctttgtcgaccttttcctcatgcatttccaagccacgatgacctataggccaccctataccactctgcctaacatcaagcaagaacccggtgagtctttacaagactattttaaacgatttaatgctgaggtaacaaaagtagagaaggctctcgagtcttcgctagtatgtatgttgataacaggtgtcctgccaagaactaatttttggaaggaactgcaagctcgaagacctgaatcattggtcgagttcttcgctatcgcagaacagcataagaggattgaaaattctctggctgagctagagaagggcaaagacaaacgcaagtcaccagtgccgcggtcacgatcttccaaacctagtgggaaaaattccagaggaaggagtccaagaagacgtagtccacagagacagcaaagtccaaaattggccaagtcccctccaaagaaagaatcctctccgaagaggaaaggtggtccgcgcttcgtgaattacacggagctggcagtacctcgggaccgtatttacgccatcgaggagaacaatggagtcttcaaaaagcctcccccaatcagggggagccgcgataaaagagacccaaagaaattctgtaagtaccacaaagacattggccacactactctggaatgttggtttttgcaggatgaaattgaagagttgatcaggcggggaaaattcaacaaatacaagaagaatgagaaaagtcatccccgagcggatgaaaaagaagaaaataagaatgcgagtggttcgagaactcctcgcaatatattgactatcattggcggacctcacatcgcaggcgattccaggaaatcgcaagagcgatatgcaaaagtggccaaagagaagttgctcaccaacgtgaacaacctcagtgagggaccagagaagttgttcaaaagagaatgcgatgacatcacgttcatggaaagtgatg

SEQ ID NO: 101936 - DNA, 551 bp, Cannabis sativa
ctctcaatttatgcataatcccttggaatcacatttgaaggttgtcaaaaagattcttaggtatctcaaagggactttggactacagtttgcacattcagccttgctccaatctcactcttactagtttttgtgatgcggtttgggcatccgatcctgatgatcggcggtccacttctggtttctgcttatttcttggttctaatcttgtctcatggagttccaagaaacagaaagctgtctccagatctagtacagaagccgaataaaggagcttagcaaatgccacagctgaactcgtatggcttcaatccttattagctgaagttggtctctctaagctcccaactcctacaatatggtgtgataaccaaagtacagtcttaatttctgccaatcccgtacttcattcacgaacaaaacagagatgagagagaatagtttattaactattactttattttatatttatattattaaaataataatatatattaaaagctttacatatatattatatacataaactaataatggtctaaatggtatttt

SEQ ID NO: 101937 - DNA, 528 bp, Cannabis sativa
caactccggatatttctgctgcatttctatctcgagttcccaggttgcctcttctaccttgttgtttctccacaacactttgatcaatgcaattgtcttgtttctcaagactttttctctcctatcaagtacttgcaccggttattcctcgtatgaaagatttggctgaagttccaatgcttcataactcagaatatgagatgggtctgagacatacttctgaagcatcgtaacatggaacatatcatgtacaactgccagcattgggggcatagccaacttgtacgctactgcccctatcctctcaaggatctcaaaaggtctgatgaacctcaggctaagttttcctttcttactaaagtgtttaatgcccttcataggcgatactcggagaaataccatatctctgacctgaaaatcaatattctaacgctttggatctgcatagcttttttgtctgctctacgccgttagcattcgcgctgtgattttatcaactgtctcacttgttctctgaacagcttcagg

SEQ ID NO: 101938 - DNA, 641 bp, Cannabis sativa
atttgcctaaaataagcatatatacatacaagtgggagattctaagattgaggatttatatcattgcgggatagaatatcaggaatattaatcatgtgctgctaaataccataaatggtatcatatcgttattggtttcaagtgccacaaaaaatagtaaaaaataaaaaacccgcataagttgctatacaaaaaaattgtaaaatatatatatatatatacacaaaataattgttaaaaaaaattgtgacaaaaattagtgaaacaaatatataaaaaaaaaattcaacaaaaacaaccctcttacaaaataatatatatatattaaattcaacagaaacaaatctctttacaaaataattataaaaaaaattataaaaaaatcaacaaaaacaagtctctttattgtaaaataaaattgtaacaaaaaattagtaaacaaaatatataataaaaaaatcaacaaaaaataagtctctttataaaataataaaagatatatatatatatatatatatatataaattcaacaaaaacaagtctctgcacaaaataatttttttaaaaaaaagagaaaaaaaaattataaaagaaaaatcaacaaaaacacttttctctattgtaaaaacattgtgaaagaa

SEQ ID NO: 101939 - DNA, 1127 bp, Cannabis sativa
  modified_base (172)..(174): a, c, t, g, unknown or other
aaccaagccctgaaacttgagctcggacctagtccggtcccggatccacactaggactgagacttgaacccgaaccccaacctgaccacgggactcgatcccagagccaaaataagcccctgactgagactgggattcgaacctggtcatggacacgaacccaaacccgaannngaatactaacccagacccaaacaaggatccaaacatgggacctagactcggacccagaccctgacgaagtcctagacccgatcatgggacctttactcagacttagacccagtctgggattcgaaaaacccgtacccggactgcgactaagactcggaccgcaacacaacctggactctgaccctgactcggagtcgatgcaagacaaagaattagaattagaactgtgattaggacccaaacctgagaccaaaatcgaacccaaaccataacccaaactcagacaagaacctggaccgagacattgactaggatcgggacctgagacctgggacttgaacctagatcgggacatggacctggcgtggttctaaaccctcactgggacccaaacaagcatccagaccttaataaggaaccgaacctgagcccggccgaagactgggaccgaaacctagagaaaaacctagactaggacctggactcaaaacaagactggggacccaaacccgaacccggccgaagactgggaccgaaacctggacaaaaacccggactaggacctggactcaaaccaagactggggactccaacccgaaccttaaccctgactaggacctaggtaccggacatcgataggggacctagaccacggacctaggcccgagaaccaaaaaaaaataaaaattcgagaccgaacccgaaccaggatctgaccttgacctgggaattcgacgttggacccagacccagaccaaaaacataccccgaacccaaactaggacaggaaactagacacgaacaaggacaaaaactgaacccgaaaccgaatccaaaattggactcaaactagggacctcaactcaaacccacacctagaatcagacccaaagctagacccgaacctggacccggacccaaactcgaaaccagaacaggatcagaaccaagga

SEQ ID NO: 101940 - DNA, 867 bp, Cannabis sativa
  modified_base (252)..(282): a, c, t, g, unknown or other
  modified_base (817)..(817): a, c, t, g, unknown or other
agaggtaaaaatgatagactttaaaaaagagggtaaaaatgaaagaggacaatataaaaagggtattgagtgtagtttcctcaaaaatttattttttggcccttatgttagaaaaattatggtatttttcaaattcagtaaaaaaactatataattttaaaaggggaaaaaaaaatttggccctaggcctaacccgcatatctattctatataaagtgtgcatatataaccgaattcttggtttatgagaannnnnnnnnnnnnnnnnnnnnnnnnnnnnnnataaaatgatttattattaaaaataaatttatattaagaagcgagaagtataaaacgatgacgtgtcactctaaatttattctaaatgtaactttctattctctctttaattctctcatttatataatttttttaatcataactaaattactaattatttttcaaaaaaataaaacaaataaaaataatggtatacttcaaaatatcacaaacttaatactaaatttattgtttttataaaactaaatcatccgtagcttatttttaatgattttttaatgttttattttaaaaaatatccgtagctttttttaatgattttttaatgttttattttaaaataataaaattaaattatccatcactaacaattcatttttttttttgaaattactaacaattcttttttaaatatgcatcattatatactttttttcttagcacatatccgtagttttttttttaatgattttttatgttttattttttttcttacatttatattatctttacagattaacaataaatttttttnttgtaaggagattaacaataaactttgattctcgattcaaatattatttt

SEQ ID NO: 101941 - DNA, 1173 bp, Cannabis sativa
  modified_base (32)..(32): a, c, t, g, unknown or other
  modified_base (79)..(79): a, c, t, g, unknown or other
  modified_base (105)..(105): a, c, t, g, unknown or other
  modified_base (168)..(172): a, c, t, g, unknown or other
  modified_base (789)..(794): a, c, t, g, unknown or other
aaaataattggatttttgttctgaaattattntggatttttgttctgaaattatttatttttttttttggatagtttgnttatttttttttttggatagtttggnaaaaattaagcaattcattttttgacagaacttgatttggatttaatttgaattagttatgannnnntgaagttttgaaaaaagatagggggtggtgacaccccatacacgcgcggatccaagtgatcactcggtcacgcgcgcctcagacacgaggttgtctgagatttcgcagtctgaagccttagttttatttgaaatctgggctccatgcgtggacaaggctgcttgcagcctctctggctgagttttctcgatcgtgcaccctggtttgcgcgcgcggatggtatgcaatgcataccatccgtaccaaatacatttttttcatttatcttcattttttcatggaattaatttcgaattttttgtgtaattttgtattttgattttttatttttcaaattttaaatctaattatcagaattaaattaattaatatttttttaaaaattaatttaagatattagtgaaatttgaatttaaaaataggtaaaagtctatctttttgcttagtttgttatcttatttttaaaatttaaatattttatcttatttttaaatttaaggtcagatatttaatattttcaattatttaattttttttaataaaatgaccttatttgaaatttaaaataagattattttaatcatgaaaatttaaattgaaataagatattttgctannnnnnaaatttttttattttttatttaaattaaattgtaaaatcagaaaaataatattaaattatcattttattttattgaaaatttaattttattttaaataacatgaaatttgaaaagttgttaccatttttttttttttgaaaaagatacttaggtttgttgaatcctaatttttcaaatttataggtttaattttaattttttttatttatttatttatattccgaaaaaaaattattatttagttattatttttttgaaattattaaataaattaataaaattaacattaagtaaaccatatatccaactatccaacttgttgcaggtttatgtattttatattgtttgattatcaaaacaagttttataaaacctatt

SEQ ID NO: 101942 - DNA, 633 bp, Cannabis sativa
tttggcattaattgtaataatataatttgaaaatgaattgatttgatccacgttttccttggttgttgttcgaaatatctaacgacaatccgacaaggaatgcacccacgaccaagttaataattgaaattatataatttaatgtatcaatctccagctcaacatcaaaagacaaaaaatgtaaaaaaaaaatctataaatattataatgatgtacaaatgtcgtgtttgaaggcaatgagggtagttaatgtaataaaataaaatagaaggatggaaaaaggaaaagaaagagtgtgaacaataattatgttgggatattaataattacattggtagttacctactacttaggttattaatataagtatatggtggacatttagtaaaattagtgatgattacgttaaattattttatatgacctaattacatttggtcattgttctcacccaaacttgtagaagtttccactcaaatttgtatatatatatacagaaatagatataggataagactacaagaacttagaacaccgaacttttatttaagaatattttattcaagaataacctctaatttattataaaaaaatgaagtcccaatttgggccaattataaataagaataacct

SEQ ID NO: 101943 - DNA, 561 bp, Cannabis sativa
ccatgattttaggggatacttgttataaaatatcaatcaatttggtaattaactgccctcctacgtaattatcggccctatgatgtagttataaatagaggcgaggcagtgactcttctaatgatgatggtggaagtaataatgaagaagatatcaattcagagggtaatgaagaagcagatgataatgaagaagagcaagatgttgaagatgaaaatttggatgaaggtagtggtgatgaagaggaggagggtagtgatggagagcaaaaagatgaggatgataatgaagattctgagtccaaaggaaaatatgagaagggcagtgatggtaaatgtgataatagtgagaagaaggtagatcattagacaatgtaactaggttttagttactttgtatgttatattttattttaattccatttagtttatggattagttttttttttatgttgttttatattttggagcctttttatgtattaagttgctactattattcaaactctttttctgtacctcttatatttttagaatcattatattttgattatggttatta

SEQ ID NO: 101944 - DNA, 693 bp, Cannabis sativa
aagctgggaattagtaggaagagcgcgatgatacattcgccaaaggaagatcttgactttctggggaactttcaaattccacattccattccaccaatgagattgggtataagaagaggagccaaatctctcacctgcaacatccagagccaccgcatacccactcttcacagtataagaaccattagaactataatgccagcaccaccgatccgcacacacactactacccagtggaataccaagaatggcctcaacatccaactgtaagaaatgttgagccaaagcctggatattccagagcccacccccaccaatcaactcattgaccatcacattgaccgcaggagccaccgtaattggacgaaaggtccgcggccgaggaatccaaggatcacgaaacgcatcaatagtctgaccatctccaaccaccctccgcatccccaacctcaacagctctaacccccaaaccaaactcgaccacagatgagaggaaccctggcgatccttagcttccaaaattgacgactcagggaagtacttatgcttcaaaatgcgacccggtaacgaatccggggaatgaagtaaccgccacacctgcttagcaatcatagcctgattaaacaggaccaggtccttaaaccccaaaccccccttcactttcggctggcaaacatcatcccatttcaccca

SEQ ID NO: 101945 - DNA, 657 bp, Cannabis sativa
tgatttagcaaaatatactctagaatttgatgaaaatatatgttggatgggtgaaatcccttatcctattttcactattgttataaatgactctaaatttataataatggtagaatttaatctaaaaaaattaatcaaaaaagaataatgttcatgtaaaactaacattaaccataactaaatttaatacaagtttccaaaaaaaaaaaaaatcattgcaaaattaaattataaaattacataactaaatttacatataaattaaaatgtaatattgcacacttcatttaaaattaaaactaattttaaatttaattacaccaattacataatttattttaaaattaaagaacagattacagacactaaccaatcacattttaaaaaatgtgtaatgagacacaaaatttagaggctgtttggctgtatttttggtttttagttttcaattttcagaattgtattttcaaaagtgagaatagagagtagttttttgtcaatttaaaaatttaatagtttttggcctaagttttttaaaaatgaacccatcctactctggacccagagtcggacctcgaattcggttctagaccccagaccctgacccggacttcgacttggacccaaacccgaacacaaacccagacatcggaccta

SEQ ID NO: 101946 - DNA, 1049 bp, Cannabis sativa
tctcactcaaattgcttcatcaaaataaatcttcccttgtacaatgttgtataaaggtgacttaaggaccatggacatatctttcgaagctccaaacacttgattattattatctcatcaatggaataatctagtttattaattctacttttactccatagtctccattataaattggaattacacttgctaacaatataaaattatattttatagaattattactagtagtccattgatataatcaatataagtagttagtcccctaattattagttcataattaaagttggtcaaaatttctattttatccttctaattatctcttgattccttatgtaccattaatttaatgtgaataattaatctataatccaattatagatttggatccaattgttagcactcctagaattaatactataaggaaactaatattcattcatttagaaaaagcttaaatttcattattgtataacatgttccaagttgctcatgtaatatatattaagctcctgaaactaaatttataagaatcatcttttctgaaaaactttaacgagtgaatcaaagaactcaataaacacaaataggagttcatgtatattcaggattcaaactgatctattattgatcatcgatgtgatatgaataactctttcatgataaacatcacgtacgttgatgaaaaatgttattacatatcgatctactcatgtataatcaaattatacataacaccttcactactgtctatccacatatgtgattcgaatcaaaatcacacacactagagtatagtgtatagtttactgtacttagtatttctatattaaagatccttttactttaatacaataccgactagttttattcatactatataattttttttttgaaataaagattgtaactttattaaagcaaatcaactattaacatagcatccaaaccagtagggacaaaccccctacgggaaagacggtcaggacatgaaccagaagaacgagctaaccaattagccgcttggttcccagaccgtttaacaa

SEQ ID NO: 101947 - DNA, 993 bp, Cannabis sativa
tattaaggatagggatgagattcttactggtggatatatcttctttaacaaaaggcctatcattatgaaggcttgggatcccaatcttaaccttaagaaagaagatattagaaccattcccatttggattcaattggaggatttggagctcaagtattgggggcagaaatcattgtttaagatagtaggtcagttaggaaaaccaataatggttgatgaggttacaagggaaagggataagcttctttttccccgaatcctcatagaggtgtcactagaacaagaatttcctaggctgatctactttgaaaatgaatatggggaggatatatcagtgatggttaaagatgaatggaagcctattctttgcaaacattgcaaaggaatggggcattccacggaggagtgtagaaggaaggaagcaaagaaacaagagtgggttgtcaagggtaagcaaaaacaggggaatgatgaaatgaagaatgtagtagatgaagagggctttaagcaggttgtgaatggttggaaacctaaagagaagttaattcctgctgatccatcatcatcaaatcaatttggtgtattgcagaatgatatagctcaaaagctccaggaatttaaagtccgtgaccatgaaggagggctagaagatgttataacgggaggagggggagaacctcctcattgtaatggataaaattctaagttagaacgtccggggaatcaacaatcaacacaagcaacatgaagttaagcaatttattgcaaaaaataatgttcgtttggttggtctcctcgagacgagagttaaggctccaagccttggagccttatatgtttgtatgttttctaattggttctttacggcgaataatgcgtggcataaaggtggtcgaatagtcgtggcttggaatccgttgagttttatggtggatattttgtggtgttctagtcaattaatacatttggctattactactgtggacaaaagga

SEQ ID NO: 101948 - DNA, 701 bp, Cannabis sativa
agggagtctaaacttgtttaagtcaacgaacaccattcagtaacaactgttgagtctcccacattctttgccaaacaaaacttggattagaaccaagcttcactgttaggaaagagcttgaaggaaaataacgagctttaaagatcctggagaccaaagaatttggtatagtaagcatgcaccatcctttttacccaaaagggtaatattaaaacattgattgagagggttaggtgcatgttactaggagctggtttggacagaaccttttggggagaagctctcaaaacagcctgttaccttatcaatagatcaccatttgtgccaaaaaacttcaagacccaacaagagttatggacaggtaaaatcccaaacttagatcacttgaaagtgtttggatgtgctgcattttgtgcatattagacaagataagttgcaacctaaagtattgagatgcatgtttctaggctaccctaaaggggttaaaggacatagagtgtggtgtttagaacctggattcaagaagtgcttgattagtagagatgtagttttcaaggaagatgaaatggccatgaaaacgaagagcacttgcgaagacagtgaagctgtatcatatgagaatgtccagattgaggtggagtaggttgctcctacaacaccaactatggaactgaggtaacagaaggggaagacaatgaaga

SEQ ID NO: 101949 - DNA, 899 bp, Cannabis sativa
tggtagttactctatcagagctgaaaaaatagatttttctaccaaaaaaaatgaagaaaaagctccacatatgacaagagtatgctaatctattatcacttaacattaacaatttcttacatacttttggttatgagtgactaatgtacctaattttcattgacaaggaactaggacactcctaaggatgaatatacacttaaacaagcaaactttttcttttttctaacactaacaaagaagataaaatactgtttaatggatgttgtgtatgaaactaattaacattttctatttcctaacaaaataaaacaattttctatgttaattctttaatggaatcactagttacaatagtctaaaattttagtatatctatattcttaatttacatatatccagtgaaaaaaaaaagaacatttttctatttttatacttgttcaaataaatctcaacttttatactaatttgtagtactaaatgactcaacgccaaaatcagagataaatcaacctcatttagacctaaaatagaaactcctaaccattcgtttccacaaatgtatgaccaaatatagatgaaaatcaagtttttaatatagtgattgaaaatccaaacttttgtttctcctaaactcaagcaaatattgatcaacgcaactccaattatccaatctccaaaaaataaaaatccaaccaactcaacaaatagagatttcttcaatcaaattaaacaatgtaggtcttcattgcaacaaaaatacataaatcaaaatacaaaatgaattgtagccacatcaaaaatgacagatttgaagaaaactaaaacgatttacccaaaaaaaattacagtacaatacccacttcagaacacaagcacggggagagagagagagagag

SEQ ID NO: 101950 - DNA, 615 bp, Cannabis sativa
ttgaaaatttagataacaaacttgcaaaaagttctaactataatctaaaatcattagagtaggaaacactcaaagtgaaagccatcatagtttctaaacaaatttattaagcactaaaaatcccagtgacgtataagatccatttttttctctctctagctctctcttagctcgtgctggtgccatggcaaaaacaagagcaaaagtgcaaggaaaactcattctgtctgctaagaaacggaaaaaaggggacctgattctagttctaatactcgaaaaactaaatcaattgatgaagttctgggaattgaaccaattgtcttctctgaggaggaaggcaaaacaaaggaaaatgaatcttagactatgataactctatggtatatagttatttttagtggctttaaacttgaattatcatgaaaagagtaatgaaagtgtatttgtttgattgactttaactagttttatcttcattttctattcaataagttagtttctaagtcttgtaaaaattgatatttttagttgtgtttatttaattaaatgttctttgtttgctgttaggaaaggagaattatactgctaaggaaaaggaaaggatgcaaagacaaa

SEQ ID NO: 101951 - DNA, 1142 bp, Cannabis sativa
acatatagagtatttatatataactaattctgaatctatagtggagtcgggaggaactaataagttaaagagtttacttagtggtaaattctagaactgcttattggaagcttgattatataggctcatggtcaccacactagttgagataatactgcttgtagactcagttaataattggttttaattaatcaatactaattttaaaagtagactatgtcttatatatgaattttcactaagcaaagacttaattatgaagaaaagaggttttatagtttattgttagttaagagactttataaggtctaattaattaattagttaaatggtgattttatttgataaaattaattttaattattaaataaataattttgacatttataggattaaaattggaaaatatggcataactgaaaaaaaaaaaaagagagataatttgttgaataaaataacaaaattgtaactagtgggtccatttactatggtcgaccacttattgattattttgctattattttcttttttattccatataatataatttaaatccaaccctagatgaaatactatataaaaaaaagatggctctcattctcataacctttaacctagtttttttgtcacacaactagaaaaagacagcctcattctatagtaattttgaaataccttctcttcttcttcagttaatttgaacccatagtgaagagtacatgcccactcatatcaattcaagtactcaatcatagtatagaagattgtgaagaatccgacacctggctggttaaagtttgccctttgagtggctcgctccccttggggagggagtgtacttccctggccggcaagaggttggttaatgggggttgttgttgagcctgagatccttggccaactccccattttgttggttgctgggatctgggtgttctcgccattagaccttcatgggaaggcctatcctccttcggttctctgattgaaccgccttatcaattcgatggcttctatgttacggcgatccagctccgcttagtgaaatcgaagcaggtaatctttatcatccatccatctcaaaaatttgcatctctgctaagcgaatacatcgcaatcaatagcgcgtggttcttcagtta

SEQ ID NO: 101952 - DNA, 555 bp, Cannabis sativa
gagaccccatgccctctcttttatctgtgctaggaatggaatacctatctagaatacttgttcatattgctcttaggagacatttcaagttttatcacgtttgaaggcttgagtttaacacacttgtgctttgcgaataacctactcctattatgtcatggcgatgtgaaatctattatgttgttactaagaagttataaaaggttttcaataacctctgggttgtaggaaaatacaaacaagacatctatatattgtacaagaatgaatgatcagatgtccaacagatattagattattagatgcttttggtttcaagcaaagtaaactccctttcacttatctgagagttccaatctgcctaaaaagaatttcacgtgcagactgtgaggtgctacagagaaaatagtagcaagacttcacatatggagttatagaaacttgttatatgtaggatggattgttctggtgaactcagttctagtagcaatacacacttattaggcacaagttatgattatttcagggaaaaaaaaaaaggttctcaaggccata

SEQ ID NO: 101953 - DNA, 616 bp, Cannabis sativa
tacaattaaataaataaattttatataaaataaaatattaataaaattttattattaaacactatttatttttttttaattttttttcagtaccaatataggcaaaaacaatgtaatttgggtaaaaaaaccctaatttcatcactcccagctaagcttcttcaaccgcagctttgtgcgaatctgatgatcagtcgctctctctctcgtttcctctccttctcgcactctctctcgtttccgatctcctgatctcgcactctctctcgtttcctctcctgatctcgcactctctctcagggatcaatagaacaaccccaggtccgacacttaccacaatcaactctttctgcctaaacaacaaaatcgcaggcacacttcaggctccatctaaggctaatgggttccaagaggggcagggatggattacttttgaaaaaatcaaccagctaaccatttatggtggcggaacttttgacggtaacggtgaatccagctggggacagcattgtaaaaggacccaatattgcagcaaactccccgttgtgagtactatatatttattttattttatttttatatgtatattgtttggataattaattaatggaatgga

SEQ ID NO: 101954 - DNA, 671 bp, Cannabis sativa
ctttttctctcaatgtgtctaataaaaaagtaatgcacaacggtcttggcttcgttcctgtggaatttaacaattttttgagatgtgaagggtgagatttttaagagaacactaacgagtgtaagagtaaagaaaaaatttggtaaaatttaacctaaaaggacgaatattttaaatttttgaattagagggccattttgaccaaagttaacgcgaaacaaatcttcatattcatgtcttaatagtacgaattcattgtgactactagagaaaagtatttctggatgggttcgagacacatttcacaaaagtttacctctataagaaatgtgacattttcactattttgattaaaatgattgttagagcttgaaaaatactttttctctcaacgtgtccaatgtaaaggtgattcaaaaaaactttagcttcgccactgtaaaatttcacgattttttgagatgtgtagggagagattttaggagaacacaaacaagtataagagtaagaaaaaaacttgttaaaatttaccctaaaaagaagaatatttttaatttttgaattagagagtcattttgacaaaatttaacgcaaaacaaatcttcatatttatatcttagtagtatgaattcattgtgactagtgggaaaaaatattccgagataagtccg

SEQ ID NO: 101955 - DNA, 534 bp, Cannabis sativa
ttttgtaatttttttttcttttttgtatttttttgtttttttcccaaaaaataatgaactaaaattgttagctaaatatttgtgataactaataattttttttttgatccacaatgtaatgaatcagtacgagtagaagtatatctaccacccacacttctctcgtctcgtcaatcacatcttatgactttttgttctacaaaatataaaagagaaattaattaaataaataatagatataagtaaaacaaaaaaaaaacacaaaactttatatcaacagtttcttgagaacttttccactagccttatcacctccataatttgcaaataatttgtatttaatttagtattatgtcaataatataacatctactttaagttcaattcaattttaagttagaagaacagtataagctcaatttttttttttctttcacctgttcttcttttggttggctaatttattcttctctggatatttaccataaactaacttttgcccttttattggagtctttaaccttgatcttgtag

SEQ ID NO: 101956 - DNA, 657 bp, Cannabis sativa
tgttcatttatgcttcaggcgtttgcaactcattctaactcaactttgaataatattaatttagagttggtatatatcattttgaactatatcgttctgatatacttcatgctgataacgtgttatcaaataatataaaatagataacaagaaaagaagaagaagaagatgaagagagaaagagaaactgaatgataatttctcaattgtttattctaatggggtgaactcctatttatacaaaaatatgactaaaagaatgagaaactaaatcaatgtaataaaataaaatacaactaaacattaatggtaataattaatttagtaattgtggatatctataaataatattttataacagtgtaaacaatatataaaattggtattttggtaagaaagaatagtaagcgcaacttacataataataattattattattttgaaaaggattgattcataaaaaaaaaaagaatctacttgggaaaggcaagaaattaatattttgtaactttgtatacaattggagatagttaaagcaattttaatggagtaatattaatagttgtcaaaatacatatattattttaaaatatttttttttattttatctcttattcacataaaatttaatgtatttttctataaaaaaaatatttt

SEQ ID NO: 101957 - DNA, 577 bp, Cannabis sativa
aaagctaacaccggagctgttatcaaatgttgcttcaactcctgaaaacatgcttcacatttgtctaaccacacgactcgctgactttttttagttaactcggtcagtggcatagagattttagagaatccctcgacaaaacgtcggtaatcaatgttaaataaaggaaacttcgaatttctatcactgattttggcctcggctagttctttacggactcgatcttgtttggatcaaccataatcccattctttccgacaatatgtcctagaaaagatacctcggacaaccaaaattcacactttttatactttgcatacaacttgtgatccctaagtcgctgcaataccattcgaagatgatgctcgtgctcctcttctaactgggagtattcaaggatgtcatcgataaacactatgacggagttatcgaggaaatccttgaataccctgttcataagatccataaaggcgcatgagcattagtcaatcccaatgacattactagaaactcataatgcccatatctagttcgaaacacagtctttggtatatcttcttcccggattctaagttga

SEQ ID NO: 101958 - DNA, 548 bp, Cannabis sativa
aaactagttaggaattgaagaacctgatcatgataaatttgagcttgtctttgagttgctacaacataggtgcatggaattcttgggcagagttgattgatttcgtcccatattgcagtcaacttggtgaagcatgtactgaccgagtcttccccttgatgaagatatatcaaagattcattgagttcaaagatccgaggtccgtttccttggttgaaacgattgttcagttctgtccacattgttgctgctgtttcaagatacattatgctgcttttgatttcgggtgaaacaggatgcaagatccatgatataaccatctggttacattgaagccaagaactaaggagaggatcttcaagaggaggttgcggaagcgtgccatcaagaaaagggggttttgtttcgagcccctataaagagtttgaagtctcgtttccaggggtgaaaattgcaatccgtgagtattggggtggcaacggccaagtctgggtgatctgctgaactgatatgtaaggactactcacatcttcataggctgggcgatc

SEQ ID NO: 101959 - DNA, 920 bp, Cannabis sativa
ctatttaattataatatttatgattttttttttacaaaatttaaaattatttttatataaatttaaattttgtccttataatgaatttttttacaaggatacaccctgcttctttttttcatgatgtgttcttgtgatgattgtctgagggaatcagtgtagtaaatctaaacttggcataaatgttcaactgtttttgttcctaaaatgctcaatttttctgttttcgtcctatagctaacctctcatccactttcttctttcacaattctcaatggccttcgtaaagtcaacgagttttgaatttaaaattttaatatattttttttacatctaaattgattttttactaaaagaatgttgaatatttcttatttttattttgaaggggtacgatttgatatttgtcaaattttaaggggtaaaattgctaatttaacaaagacatgtgagtatttaaacgaagtaataagatgaaacctaacatatactaattataaaccatttaaatatattgtaaaccaaataatatcaaataatttaatttggtgtaattgttgtaccactagtttattgttgagaagatctgagttcgagaccacttaccttacttttatttttattttagaaaatataatttctctgtgaaataggtgaaaacgcaccaattcttatttactatagtatctaatataataaattattttacatacttaatttatatttaatgtataaattaagaatatttataatagttacttttaaatttataatatttagtaaaaagatttgttttcaaaacctggaagaacaaaaagaaacatcaaagttatcagagaaaaaaaaaaccatgaagaactaaattatatgttctttcttttaaaaataaaaaaaataaaaaacacaaaatcatagattat

SEQ ID NO: 101960 - DNA, 593 bp, Cannabis sativa
aatcgaaatatcatttgttcaattctttacgaaaagatgaattattttaataacttactcgagtgtctgttttagacttctatatacagtttcgaagcttgcaacgagctctacaatatggtttatgttttagagccaaaatatgtattttattttagggtgtttttaccacaaggttcggtaaaaaaaccctagattgttttatgtgagtattaggcagtattttggaataaacacttattagtttaccgttattgtgacatagggctcgggatcgttgatcgttctccatacaggttagccaacatacctaaattgagacttaaggtaagaaaaacataatataccacatgacttcacaggtttcttgattgtcgattatctaattaggcaatggcaatgtgaacgtgatatacgggttcacctaattaggtgatgtaatatatggatgtcaggatatggcatgggcttgcctgattaggtaatatgatatatggataccgatatccaggttgttcttgtgagacagccatgataaagtcatgactctgaattaaaatcgttgttacgtttcttcttgtcaacgatcttgt

SEQ ID NO: 101961 - DNA, 1163 bp, Cannabis sativa
aaccataaagcttgcaaagatgtctcataacatacgataaacttaacaaatatagtagatgatgtgattaaagtctatttaacactttttcaagaaatagctacaccagcaaaagtaaaaatatagccaaaaattaactttaaatcatctacataaccaccaaaatctgaatatgaataaccaacaactcgaagattgtcgatatgcttatacacaagcataaaactattcgttctttgcaaatatatcatgactttcttggctacaaccaagtgatcatggccaggatcagataaatatctctcaagaacatcgattatgaaagcaatgtaaggtctagtgcaaacctaagcatacattaaactctctactacacttgcatataggatattcttcactgcttctctttttaagtcatttttgggacaatgttgcttagtaaatttgttcctttcagaataggaacagaaccaggcttacaaaaagtttatgttgaaccttttgagcacacgattaatgtaaactttcttgacataagccaaaaatttcgattcttatcacgatgaatctcaatctccaaaacaaaaatgcttctccaagatccttcatatcaaaaaatggtagacataaaaattttggtctcatttagtaatgacaaatcactgctggtaagtaaaatgtcgtccacataaagaacaagaaaaatatgacgacccccactaatcttcaaatttttttatattattagtactttttatgtacaaattgattttgggtttattattaattttttaaaaagaagttgttatcaatatctttactaatggcgcatctttggttgtggattttgaaggggtacgggtcctccacatctccacattttttctaacaattgagtgactttaccatatagtaagacctgctgctagtcaggggcggagctagaattaaaagtaggggggccaatatcgaacaacgcatacaataaagttttacattaagattttcagcgactgaaactttatgtatgtccattgaaaaaaatatgataattttttttagttttcaaatatattttattcaataaattagaaaatttacattaagtaatttaaatatagaatgagtgatgtttaaaatattagaaactcagtttaatagta

SEQ ID NO: 101962 - DNA, 721 bp, Cannabis sativa
atttgcatgagcatgagatcaccatcaccttccaccttcttccttcttgttcttgtccttgtcctcatcctcaggtctcaggtcttggaaccaatacccatgtcttgttctctctaagtaagcttaattcatcatccacaactcgagaccactccttcttgtacttcatttaaagcctcttctatactcaatggctctaatatgtcatatgaatgatctattgacaaagcataggcaatcagatgagcttctgcaaaccttgctggtgcatgaatttctcttctggttctatctctagcaagctggtagttagacagatctggttcttcctcagtctcatctggagctttgtctgtgttgtcattcttctcacttgctggttcaaatcctttaagctcaatttcaaactctgccaaatcttccctcttgcgagatgaatctacaaggtaacacactgcctttctcggctttcaagtgaggaaaatcattttctttttaaaaacaatatttctagaaataatcttcttaggttttccattctgctttatgcaaattctataaccttttgtgcctatagggtatcctagaaacatgtctttgacaaatctagcatcaagcttatcatcgggttgatgtatatgtgttgcacatccaaacactctcaagtgtttcaggtttggtatcttcccataccacttgtcataaggtgtcttcaagtcta

SEQ ID NO: 101963 - DNA, 1426 bp, Cannabis sativa
tttgctaaataacaaattagattctaaacattctaaaatagcacgaaatagtatcttgagtttaatttttatcatttttttttatattactaatttaaaatcaattataagaacaaacatatgcaaaaaaatatatataatcagtatggtcatagacacctcaaagttaggttattattaagtttattttaataaaattgagttgagtgtactatttaaaaaaatatagagtctgatttgtcatttaataaaatagaagtttgaacagtaacttttgtaaaacaggattcaaaatgttatttacttttttttttttttaaaaagacaatatatattttgtagaaaaaaattcaaaaattagaaaaagtaatttaaagtaaccgataaaaataatatgattaactagaatattaaagcagtgaagtatgtttaaaattcaccatttaaaaaaaataaatatagggaaatttacatttacaaacataaattgtattctattattaataataacgtagcaatctcattcaatattttttgtaccgttattaatattattgtgccattttttaattgataaactgacaactacttttcttttcttttgtcttttattttttatttgaacgtaggttttataactatatcaaataattatatagagaaagttaaaataaaagcaatatatttttttttctcttatttccaactttaaaataaaattttaaccatattgctagttatttggcctcaaaaataatatcattgcgaattacttttcaatgtgatcatttcaagatatgcgaagcatatgttttttcaccttttcaaaatcaaagtaactatttagttatttaccatatcaattatatactcattagttacatttctacaatatataattataaaaatataaattttttaaacaattaacctattggtattgcgttagtttactaattaaaatatcttggttactaaaatatactttgttattcatattcaaaggttattatatgataactaattagtttctacaataaattaaggttatcaaaatgtatcttaaataatattaggatactataatgtaactttaaaatagctaattatttattaatttgaatgtctaaatattttactaataaattatgtgatttattttactttattgtaacacgttagtttcttcagtaaaattgaaggtaacataaatgttacacaaaagtaacataaaagtatgtattataaataatataatataaactaataataacatatagttttaaaagtaactaatctaaaaatcaaaagttatctatatgagctatttttattttaaaatagattatttaataaaaagtaactaattggtatcttatcgaaataataatcaattggtccaaaaaaaatgtgtcttgtttgtaat

SEQ ID NO: 101964 - DNA, 530 bp, Cannabis sativa
ccagttatattttaattataaccgatttgagttattggtttttattcatagaatcagttatatttttagttatatatgagacatctacttctgatgactttttcggcggcagtaattttttggtgactttctggcgacactaacttttccggcgacttttccggcaaaacttattgttgtttacaaatatgagatttctactttttttttttttacaaaaatatggcataaaaaaactcatgtaaatatataaaaaaaaaataaaaaaagaaagaaactcataaccctatattattatttatttataccataaacaaataaattataccttcaattctcatatttattaaaattccccatatcaatatcaatatatcaattaatagtaatcttaatttctctatttatctatatatctatgtatcttcaacctataacagttagaagattaatgtacattttactattaataacttacattattataacacaactatgttttacttactaaatatactgacacatatttt

SEQ ID NO: 101965 - DNA, 580 bp, Cannabis sativa
aaaaaaaaaaaactaaaaaaactgtatatatatagtaaaaattgcacttaattaagattttaaaagatgtaaattatagcttcacgtttatatatatgaaaacaactcacacctattaacgcaaaaataaatagatttacaaaattttttaaactatcataaatataaattgacttataaaataaataacaattttaataagaaattaataataataaatatattactacaaaatagcctaaatatagaaactgattatattttaataatagaaatagtttaaaataccataactcacgcccataaatacaaatcacgccattaatagcgccatctcgcaagtcatagttgactaggaatgacaacaaattctgcagttcgacaccaaccataccagcttccgaccgtcctgctgatatataaattccggccaaagacgtcgtcaatcacagaacaatgccaaagcaaatgtcgtgataattacggtggtgtggtggagaatgatgaaagcacccctttaaaccttgactatttaacaaaaaaacataacatatatactaatgatagtgattttgataca

SEQ ID NO: 101966 - DNA, 783 bp, Cannabis sativa
agaaaaatagccattaggttgagacaatgattgacccttgtggcactttgtaaaaacttttgcataattggatggccaactttgcctatttatatatttttactttttatgcctcacatcttgcttttgagttaaatatgttcgttgattgcgttttatttcacaatctaagcatttgtatctcaatttaacttaagatactttgatttgcatgtatctccaatgtcattttctaagtagttaataatctaccatatcttttacgagcaatttttaatctgtcatgttttacgcgagcagttctaatctgccttgttatacacgagcagttgataatttactacacacacttttttagagcaaacttataatattttgaataattcacctttggaactattttgaatattctttgattgctcatatgaatagttaatcctctattcataagtttagcttatgtattatttttcaagacacatttgtgtcttgtttataatacataccaaaactatgccaaaaacggacgcccaagtaaaaagttatgataaaaaaacgatttctgattccctaagactttccaaaaatggtctggcacgaaaatcttaaattttgcactcactggaacactaccgaaacatattcagatcattccaaacccacaagacacatatataccatatataatatagtcccaatgtaactgaaattaaaagcgaatcattaaacggaaaatgtcattaaagctcggacttaagctttaaaagtttcaaactcaatttc

SEQ ID NO: 101967 - DNA, 831 bp, Cannabis sativa
atgtctcactcttttttttttatttaaatagattgaaaataaatggttaagcgtcactttttaaagcagttaagtataattattaatatgcatcaccgcatatattttcataaaaattaaaatgtcacattattataatcaataaaaaaggctaaagcatgaagttgtttagattgtagtatttatgattttataatttaaatatatacatacatcatatcggggcggatttaggacagatatctattcttccgctcctatctcattttcaactcgggtatgaatatttaaacccatacccccactcctaaaagtcaactctcgccccgtcctattaaagccaagtacccgaaccctcacatataattatcatccctagattggatcacaaaatttaaattacattttgaataatgccaaatacaacttcctattataacttcttagtcaacctctagctccgaaatcacatgccgaaatattttttttcaatttttttttcatggtgttcgttatagttacagtatcatccttgtaaatttttaaaaaattatgaatagttttacagtaccaaatacagagttcctgatattctagtttaccacgagcgttcaaaaaacttcaaacgtattttcggcattgtaaattattcaaattttttcaaaaatttataaagatgatgttgtaagtataacgaacaccccgaaaattttgaataaaaatagtctgacatgtgttttcgggcatgaaaattgactaagaaattgtaacaaaaaattgacggtaaaactctccctaaattttaaaaagtgcaattaagactatgcagat

SEQ ID NO: 101968 - DNA, 685 bp, Cannabis sativa
acagaccttgtttaacaaaagaatcatgtttttgtgtttgcagtgctctttcaaatgcctttctaagtggcgacacttgttccttgtgggtccctcgcatccaaaacctgtaaaatgaaaaatgagaaggaaatttagagaaagaatgaaggataaaaaaatcattcaatagtgaattagcaattttttaagatgatcatatatggtaggacagcagaaaactatctaatatagtacactaagatacagtgatttactgatgatgcttctacatcactaataagcaggaactgacactaaactaactggcaatgcttctacatcactaattgaattaaaatcaaattaagttaacaatctagagtgaagtacacacacctggacaacaacatccgaagaatctatcactttgtagagttcaccccaaatacgtttactttgacccttctcaaacatattatgtcgaaccaggtctctgaatccatccccttcaccttcgtcaacattgacatcatcaccatgcttctcctcaaaagcatctacacattaccacaaaaaaaaaattatcctcaaatgaaaggaaaagcaatcagtacttaatagaatctaataaagagtagaatgcttatagcaataattaccctgggaaccatcagctttcttgagtaaagaatcataatcagca

SEQ ID NO: 101969 - DNA, 1173 bp, Cannabis sativa
  modified_base (36)..(38): a, c, t, g, unknown or other
  modified_base (86)..(113): a, c, t, g, unknown or other
gctgcacccagtgtaaggtttctttaactttatatnnntttaatttatcgttttagaaaggtcatatttaggatgttaataaacannnnnnnnnnnnnnnnnnnnnnnnnnnnaaaataatttccaacagataagtgctatgatcatccgcctcatgtatattaagcatcccacatatttcatcacgagtttcaacttccgtattatgactgtagaaaatagaagatttgtcaaaattaatcttctgacctgaggctttctcgaaaatttgcagcaaacctaacatgttattggcctcttccacctctgctctacaaaagatgtagctgtcgtcagcgaagaacatgtggttaattcttggggcatttcgagctactttgattccttggagcaggctcttgctttcataatctcttaaaagagctgaaaaaccttccatgcatataaggaataaataggatgatgacaatggatccccttgacgaagaccacggtgagagattttataccttgctgttgtaacacaagccataaaaagtctgacaattctatctgcaaatcccatttgccgaagcatagcttcaaggtaaccccactcaactctatcgtatgctttactcatgtccagtttgactgccatagaacctgtcttgccacttcttttcctcttcaaatagtgcattacctcataagaaatcataacattatctgtgattagccttccaggaatgaaagaactttgtgtttcagatatgacatgatttaaaacttttttcaacctattggcaagcactttagacaccactttataagccacattgcacaacaatgttggtctgagatccgccatagttaccggatgcttcttttttggaataagaacgatgttggcttgaggaagttgttcttcaaaggccgctattgtgaaaaaattcttggccaaattaatcacatctttccccactatactccaaaacttttgataaaatccaggactcattctgtcaggccccggagacttgtctggatgcatttgaaaaactgctgccttcacttcttcttccataatgggctgtaaaagatttgagttttgttccaatgaaatggaaggctgaatacactgcaccacttgatcccaatgagtatcaaaagcttgaaataactcattgaaat

SEQ ID NO: 101970 - DNA, 752 bp, Cannabis sativa
  modified_base (235)..(252): a, c, t, g, unknown or other
ttcttatcctcaaagaattctttgaggctcctttgaatgctatcttctggctcgccaggattgtaagcctcactgatgctaacgagatgaggttgtacgaagtcttctcataacgagacggtcaccttgcttacttgttcttgagttgatttgacttttacacttagtttgttcattgtacgctaaggaatttcacgattgatatgtgtcactttctttggtgcctcgctattcnnnnnnnnnnnnnnnnnntttctcgctaatatactaagtgccagtttgtacattgatttcttgcctaagaccttacagtcagcgggttacaaatattttctgatacttacgtatttaatgagttattccataaaaagtatttgcatcgatttacattccctttatcttgacacgtgtcctccagccgaatttcgggtataacattcataaacattgaattttaaattctaagtatttatgtggtattatccctttgcagaaattattataccatagattttatataataataaaacataaaacacataaattatgataaacatataaatataatacggtatttgttgggaatattttaccaggatctaaatttactaacaagtttgctgaattaacatcctaaatatgaatatctctaatacaataaaattaaaaacataagagtttagagaacctgacatcggttgcagcggactaatatgactccttccgctgagatctctaacccttgttccttt

SEQ ID NO: 101971 - DNA, 547 bp, Cannabis sativa
  modified_base (113)..(116): a, c, t, g, unknown or other
gaaaagaaaagaagaaagaagaagcaaagtgaggttacttaagtttgaaggaaaaaaaaaaacaaaggaaatagtttttttttctctttctctctctttcgattctcttgggnnnnagctgggggtgagaatttgtgttgaatcaagggaattttagtggtattgaagctttgtttcaaggtaatctttctctccatcttttgcttgaagttgttgtagttaaattaggttttggtgtgaattttgggaaattagtggctgttggtttttggaattgtttaggttagtttttggtgttaatttgaggttgttatcctggctatatgctaagctaagtgagtatttcaataattaatttgaatttaaagttgtgagctcaaagtgaagctttaatggtgaagttaggtttatgttgctgtatgaattttgatggtttgatttggtactatggaggttgtttgatgttggttgagttaatttgaattggattaatgggttgaaatgaggtttgagcaaagtttgagtttaggaactcaaacctagctct

SEQ ID NO: 101972 - DNA, 694 bp, Cannabis sativa
cctataaaataataaagaaaatattcagaaatgtttaaagggttaatactattttggactttatgttttgcaaaagttatcgattgaactcttgctttgttaaatgacaaaatgaacattgtattttttaaaattgtacaaataggattctgaactcaatttttaatatttttttaatttaggataattctaacaagaataaatgcagaaaatgtaattatttttatcataacacctttaaatcgagttattaagttttattttgacaaaaaatcagttgaaggtacaatttagtactatttaaaaaatacaaagtccaatttatcatttaacaaaagagagagtccaatcattaacttttacaaaacacagatctaaaattgtatttaacctagtatttttttttttttttttgaaaaaggtgcatttaccctagtttaaaaacatatttcaccatcttcttcatattaatatataaaataaagatgcacaacaactaagaaattcataactacatgtagagaagagtaaaatgcttcttcatttaatattttaatattatttttttcttctctctcctatcaatatatttatataaatttatataaaagagaatttaaaagtgataagatggcatctaataattttttcattgaatttttattattttgtgagatctttaagttttgtctta

SEQ ID NO: 101973 - DNA, 615 bp, Cannabis sativa
taaaccatgtgatgtgtatgctttcgggtttggtaccctgttagcttcgggagaccttatagtatccactaggtggattcagtccttgtccttttggattgacggttgtcaataaactgccaatctaattgagctaaaattgtcttgtttttgacatatacttgggaatggattttatgtctaagtatggggcaacaatcgactacaagcggaagatggtggtgtttgaacctgatagtgctaacctagcagtatatgtgggtaaaggtcaggggatgtgcataccaagaattacacttttaaaagttaaggatctgatgagcagaggttgtctgggattcatagtcattgcagtggataccaaccaacttgtgacatctggacctgagaatacaagattggtgtgtgagttccttcacgtctttcctgaagatctactgggatcgccaccttcctgagcgatagaatttgtgattgaattagttccaggagcagaaccaatatcaaaagcaccgtatccaatggctctagcagaattgaaagaatcaaagatccaactttaggagttactaaatctgggattcattagaccgagttactctccttggggtgctc

SEQ ID NO: 101974 - DNA, 1240 bp, Cannabis sativa
taggttcaagttcgggtcaaggtcgggtcttaggtcccagtcctagttccgttgcacacgtccctatcccatttctaggtccaggtcctacgtctggtctggttttgggtcccagtcttggttttggtttttgtcctagtcacggtttgggtttttgtcttggtctcggtttttatttgggtttgggttctggtcttggtcctgcttcttgtcctagtcctagtcctagtcttagtttgggttcgggtttgaatctaagtctatgtccggatctggctccgggtgtgggttagggtcctgggtccgggttaaggtccgagtccaaagtttcgatctcgatctaagtctgcatttagtttcaactctatatcctgggttccatcccattctgggttcgagtttgggtccgggtgtagctctaggtttgggtctgattctgggcttcggtcagagttcgggtcccgagttcgggtccaggttcaggtttggtcctggtatgggtttgtgtccaggttcctgtgctggtttgggtccggggaaggtttcgggtgtgggtctgggtccgacttctgattcacgagtccagttcaggtcctagtttggattcgactcctagctttagaccttgctctgggttccggggactaggtccctggtctaggtcccccatcaatgtcccgttcttaggtcctggtctgggtccatgtccgggtttgggtcccgagtcttcgttttagtccagctctcggtctggatttaggtccaggttttggtccctatttttgtctgggttcaggtttgggtccttgtcaaggtctggatcccggtctgagtcacgggtctcaggtcccagtgagggtttaggaccaagtcacgtccaaatcccagtctaggtttgggtccaaggtctcaagtcccagtctttatcaaggtctcagtccaggttctggtccgagtttgggttatggttttggttcggttctggtcttaggtccgagtgctagtcatagttccagttctgatctaggtcttggttttgttctgggtccgggttgggttccaagtccaagtccgggttcaagacccgttctcggctcccagtctacttcctattttggttgtaatttcaggtcacagggtactagttttggtataggtttgggtcttagactgggttcgggtttgggtctggggcaaagtcccaaatccacacacgaactacgagttcggtccaagcctc

SEQ ID NO: 101975 - DNA, 840 bp, Cannabis sativa
  modified_base (169)..(169): a, c, t, g, unknown or other
aaatttctttattcaagatataatctagagtgattgtctaagaatttaatgataactcatatccacccctgaatgtacatccatatgtttgaatatagatgatcctacttctaagtagatattggcatattttctctttgtagagactgatcttgtcaaaaccactatnaataagatacaaatgccatagatatattactgcggtaatggtttttagctaatttctaagtctagttacaataaacagttcttagaatagtctaagtagattctggtcacagaatacaaaactcataatccatacattaacatatagttggatccattattagagaatggatattaacaacttgtgaaagtttgactatattgtccaatgtattctggaaactgaaatttaaaatttctatttggaatctaaaatttaaagtcaaagacttacatttgcactaaatattccttgagtaattattctagcttggaccactactactattttaactctaagtttaagttgtctttagtaagcatatacaagtaggggaattttctaagatcgatgatttatatcattacaggatagaatatctagaatatagtcatctgcgccattcattttgatagaagaaaatagagtgacattataagcagatgaattataatccttctttattcaatgttatattatctcagcaatttcttaatgtaagaggaaggaaaaataaaaaataaaggataattttgattaaaataagaaaccaacgatgttccatttacgcgagagtccaagttattctaattttataacttcttcatcatttcattattggcaatatttta

SEQ ID NO: 101976 - DNA, 994 bp, Cannabis sativa
tttcttgggtcgagaataacctcttccaattcttcgattggttttagcaagtttctttcatcttgaactcgaggatcaagatctttgtctttcttcttattttcttccaccaagatcgccatcaattgatgaccggctttcctatgctgtaactctatgtgatagcaattgcgagccagcatctggtcaccacgcaccactcccatgccatctgacatttgaaatttcagatataggtgcttgatcgaactgactgcccctagtccgatcagtgttggacgacccaacaatatgttgtaagccgagggcaggtcaacgactaagaagtcttgcatgaccgtagcaaataaaggtggctcgcctaaagttaatgcgagctcgattatgccaaggctagcgatactgtctccgatgaatccataaaggttcaccatacaaggccttatttggctttttcgagccccattttctttagggtctccttatataggatatttatcgagctccccttgtctattaacactctcttgatccttttattgccgaaggctactttctgctcatgtgcgaggcaaatattttcctgagtttcattaagcttggtataaatagtatacactggcacgtatttgtcatgcttcttttttttctttctctctttcgacgattccttgattccgtcctttctcttcggaccagaagctcacgagttatcaattctcgtggaagcagtacatgttgaaacattgttgggtttacctcccgagcctattttcaacaagttcatttcctttcgggcttctttcttccggacacgcacttgagccctttcattgaactcagtgatgattcttaccgaacgtccttgtaagtcatcccacaactcgccccccgcggttaatcgatcagtagagatccctgcctgaagggctgtaagttgtgtgatgtcatccaaatttctaaccctagcggtagccgtgctaaaacgacttaa

SEQ ID NO: 101977 - DNA, 1070 bp, Cannabis sativa
taattattgcaagcaagcagttttttttatatatatatatttttaataggtatttttcttgtttattcaaagctataaaaagaaaaagttataaaaagaaaaagttataaaagagaaaaaagtaaaagaacgaaagccaacaaaaaaaaaaaaagagaaagaaataaaaataactggcctagatatactctaactaaactttaaaatcaaaatgaaaattttagggaaataattaatatcattatagcagtatttctttttaatgaaaagtcttattattactataaaatctgcatgacagttaaaaaataaaaaaggtacaacctcttcttcaaatatatttgaatggacactctctcaaatagaatagactaaggtgtaatacataagaaaacgtgccttttattttagaacaacaacagaaagattcttcttaaagaaaacatagctaataatagtcgaagccaacataaatctttaacctgtattcattgtttgataattttgagaaagattactattaagcactaataatgtctaacaccactataaggtgacatcttaagaattgttaacgatattctataataattattatattaaataaatctaacgaaaaaaattattatataatttatattaaatcacgttgattatgatatttaattgtatcaataacaatataacattttgagtggtatctaacatagttagcatctgtataaatttttaacaaccagactcttaatttactattattaaactattatttacttctagaaaataccaaaaactaaaataaagaccaagacataaaattgacatgttacaatttttttaaataatatatttgaactacgagctcacatgcaaatcatgttagaccccaactagtattaggcatgtcaaacagatccatttagttggagcgggttggagctccgatccgacgaatcacctctaatctgaaacattaagatacttattggatcttagatcaagatccgctccgccctgcctaatttttatctggatcgaatttgattcgacttgatttcaatttatttttt

SEQ ID NO: 101978 - DNA, 553 bp, Cannabis sativa
agctgttaataaaaccttaaaggatactatcaagaagaagttagacgctaccaaaggaaggtgggtcgacgagctacctcaggtactctgggcccaaagaaataccgagaagacgtcaatgggacacactcctttctcgctagcatttggctcagaggcaatgctgcttgttgaagtggacatatcgactcacagaagagagttttataatcaagaagaaaaccaggaacttctaaaattgtccttggatctatttgaggaaaaatgaagtgagttgcaattcaaaaacacagtataccaacaacgagttaaaagatacttcaacaaaagagtcaagaaaagacaattcaatgttggagacttggtgctaaggcgagtatttgcaaatacgagagatgcaactgcaggaatgatcaacccgaattgggaggatccatctctcaacaattctcttatataaatatatatatgatcatgcatcataaccaaccacaagtataaacgtatatatattttttaaaattacgtgactttttattggagtacaattaat

SEQ ID NO: 101979 - DNA, 598 bp, Cannabis sativa
tatcataatattgtaaataaatctaccttttacaaatccacctagatatatattgaaatgcacactaataactctgttttgacactttaacttaaagtgctccttagcattttccaaaataatattacacttattgtcttctaaatgcgctttattcttttactttttatatatattaggcttatttacttatcaatcagccccctaaaatgtttgtgtatattggtcctctaacttttttcttatgcaaaatggtccctctaactatgatttttttgggacaaaaaatcttatatgtatacccccacaattatgttcattctatgacttaactcacttaatttgtaggcatgtgtacaatgtagaactagaagcaaacaactaaatcagcttagagaagaaaatgctttgtaattaatttgcattgggtaccatttgtaatcatatagctagccttttattaaaaacaaaatagggctagctatgattagaaaaacaaacatttaatcatagtttacatggggataggagtaataatcaaccctaaaacgcgctctttcgatagattattctgagaagcatgtccatcgccatactg

SEQ ID NO: 101980 - DNA, 761 bp, Cannabis sativa
tatatatatttgaaaacccatcctataaacccatcattctcatgttggttccatacagcgatgagaaaccaaacctcgtagtcaaaggtgaagccaaaaataaaatttataagttaaggtgttgttaaaaatttattagggtcataattgtatatataaaatgtgtgttggatcattaaataaataagaaattaatgtgatctagtttaaaataaaatttatgacttaagggcatgattgtcataattttaatatgtaaatatcaattagacaatttctaatttaatgagaggccaaatagaaatagtcaataaatattactaactgttttgtcaggtaatgatccccaatttgcagtatgttatcttttcattctccatcaacaagagacaaaagttaaggagaaagatttcattgcaaaattggaagatcataccattacaaaattgattttatggactccggtatacttctgctatttcttaatcctattttttgattttcatgaattaattagagctaaattcaaatatacagtgttcttacatgtggtatcaagagcatcctaaattaattcttgaagatttatagtaattttggtcttccattaaattattttttgtatttagtgacttgctagatatatacatatggatcatttcttatgggtattacacatgaattgttattaaacaaatttaattataaatattaattttaaaaatatataatcatcaaatttcgatctaataacaaataat

SEQ ID NO: 101981 - DNA, 529 bp, Cannabis sativa
taaaaagatagttcagtactacttaaagctaattggaggaaaacaaattgacatacttatacattacaaagtacggaaaccaataaaccacataagaaaaaggacaaggaaatcaatataaagaaaaggaatatatatatatatatatatatttggtgcagaagcttctgctctgaatacttcaaaaccaaaaggctagatttttaccccatattcgtgccgtgccatcctctgaaccagttataatctgaatattaagaaaaatgagaataaacaaaattcaggaaagtaatgcatgatctctatatcaaggcactccgcttttagagttatcactgtgattaaattttaaagatgtcaaatgacagctactccccctcccccctaccccaccccaccctccttattatcctaattcaagaaattcgtgcttctgttgatgaaacatgtttctccgaagcaatttgtgttgatgagagcagggtaagaagaaaatctattacaagttagcctagtagacgaagctctc

SEQ ID NO: 101982 - DNA, 1023 bp, Cannabis sativa
aaataaacatacaactatagataataaaaaataataataaaacaacaatataattaatttagggaaattctatgttatactctaaaattaagtgtaccaaacactcattttgtattttcgatatccaggtagttttaattttaatttttttatatgacaatgtaaattgtagttttttaaaaaaaatttgcaaacttttaataaattcagaataatttaacatgctggaaacaaggttcaaaaacagtctgttaacttatgcccatttttataattttttttaaaattcaaaaacatttctaggtatatttaatttttttcctaaaattttatatatacttaaatagttagattcaaacgattttatatttacaaactcatatttatgtattgcctaccgaatttctttacttaagtataaaaaaaaaaaaataaagctgcaagtttttcatctaaatcaacaattaatatatttattgatcaaaatatactttaggtaagagtgttttttttaaaaaaaaatataataaaatatataaaaaaattatttaatttttaatttcttttctaagaaacatgctttagaagtagataatgtctgagagaaaaaaatactaattaacaatgccgcatcaaattttagatgataaaaaagaatgatagttaacaataatattatatctactaaaatactaaatttttttaacatggtgtatattttaaatgatacaattttatagtgttgtaagttcaaaaaatgaaatacgaattatttctcaaaatagctatacctaaataattttaagagtcactcacgtgcgaagcacgtgcttccacactagtttgctataaaaataaaaatggcatttcataaaggcaatccaaaaccaagagaactcgaaggctcaaatattagatttttatttgacttcaaattaatttttattagttttattaaaatttagattgattacatagtattagtgttggattaaaaatcctttgtgggcacatatgtataat

SEQ ID NO: 101983 - DNA, 521 bp, Cannabis sativa
aggcacccaaaatttctaaggtgggaataattgggtggggaattatgcaatatttcatgggatgttctatctttgagggtgacagaaggtgttctattaagaagatacacaactgtcttgatcatgttactccaatatacaatgggaagattagattgaaaggctaatgcccgagcaacattgagaatgtgttgatgtttgcgttcaactatagcattttgttggggtcttcctacacaagagttgtagtgaatgacacctttattggtaaagaaggtggatagattgagttcttttgcattgtcactacgaacatatttgatagttgtctgatattgagtgtgaacatacatgaagaaattttggattatttgtggtgcttcatatttggctcttagtaagtagatccaagtgaaccgtgagtggtcatccactatagttaaaaaatatttataaccttcgacagatggtgttggatatggcccccatatgtcgagatgaataagatcaaaatttgcttt

SEQ ID NO: 101984 - DNA, 509 bp, Cannabis sativa
  modified_base (27)..(30): a, c, t, g, unknown or other
actaatcagattgtaaagagttttatnnnnggcataaaacccaacaacaacatagtatccatgcaaatttctgaaatgacattcttttctctccaatattataataatttcatctcaccaagtatcttttaaaattttactataaagatgcttttattggttaaaaaaatattacataacgattacaataaaaatgtaattattgagagtgagtcttacatatataattaaaaatatcctaaaagataactctctcaatacaatttgggtaaatggcggcaaaacccccaatactttgattttggtttcgctaactctgcctttgctatgtgctttgccctataaaactttgtggtagtaactttagagtactttgtatctttaactatctccaagaaggacttgtactcaatggatgggtgtaatctgaatgtgtctatgaattaatctgctagccattgtgcagtaatatgtctattgtccaaaacaatgccacagttctcatgatt

SEQ ID NO: 101985 - DNA, 780 bp, Cannabis sativa
ttttaatttaaaaagtaggatccgcttggaaacacaaactccatagttattaaaatttaatttagtttgacattctcattccctaatggcatgtttacttaaagagaataagtatcaattgtatggtattgatttccatataattgtttactaaattttagaaatggaaaaagtagtgggacctacacatattacggagaaaataaagaaaaaaaaaatttctcctaatttttataaggaatacctttctttttcttaacttattttatttaattttaattttattaattaaaaataaaaagacaaatatgtccttcaaaaattcataaacaaaaaataattgcttgttccaacaatgtaattttgtcaaattaaagcattccagttacattttctagttatataaataaaataatataattctagttttctttccgaataatttaataaacagcataataaaatattgtaataattattttaaattttgaaattgattcatttcttccattgattattccaattccaattacagtttattaaacatgccataagtgtttcaaaatcacatggaactttttttcctaaacaaattatgaatatatcacaaaattttaaaaatacaataaaaaatctaggaggccacctagactccttttgtgctttcttttatatttatgtattaatataaattttattagggtaaattgtagcataaatacctaatattttcgattttatacacttaaatacctaatgtttatttttggtggcaaaaat

SEQ ID NO: 101986 - DNA, 504 bp, Cannabis sativa
acttcaggattggatcaagctaaattgcgatgttaaagtagggcttgatagcatgtgcgcagcagttgttgtcaaaaaccatcttggtaggatggtttgggttcagacgtcccgtgttgacttttctgatgctctttgtggagaagcggaggcctgctgtttggccatttcgactgctaaggatattggtgccaagtttgtaattgtggagagtgactcgagggtagttatcaatgcacttaatggggagtctcactgggttattggaaactatatctcattttgtaatagttactctcatttgttttctagttgtattttctcttatattagcagggactgtaattatgccgcccatactgtggctaagtgggcatttacccacaagaggtttggggttattccgttaacttccattccgataaatactttatataatgactgtgaggtctaatcagttatagctattagagtacgctttttcttcaaaaaagaaaaaaaaaa

SEQ ID NO: 101987 - DNA, 528 bp, Cannabis sativa
  modified_base (69)..(69): a, c, t, g, unknown or other
  modified_base (351)..(352): a, c, t, g, unknown or other
atttgcggaataaatacttaagtttaactttcagttgtaaataaatacttaagtttaatttttggcggnaataatacttaagttatatttttcaaactctgtagttattcgaacgttaaatgtcaagtcattattcacgtgtcattttcttattggtacatataaattatttttcaaaaaaaattaaaaattcatgacttagaccaatcaaggattgtcacgtagtaatttacttaatatttaacaaccagatacctacagagttctaaaaataaaacttatgtattattgccgccaaaaattaaacttaagtatttatttgtaatcagaaattaaacttaagtatttatnncgcaaattactcttttaaaaatatctcatattgcaatatgaggtatgaaaaatgttttaaaaatacctcatatgtttgaaattttggtttaaaaaatgtgtgcaccctatattatattgtgatctaattttgtaaatttttaggtttttaatacaatttatacaaaattttaaata

SEQ ID NO: 101988 - DNA, 647 bp, Cannabis sativa
tgatgacatggaaccgaaaattcggttacagtttggtcggtttgatggtcggtttcgatttttcgatttttatgaacacccctagttatagtagagtaaagggtcactacaagaaattaaacttttagtcacaatattttgttgtgaattaatatgtattagtggtaataaaaactgtaactaaaaatatctaagttgtggcgataaaaatattagtgacgacaaaagttggcaaaaaataaatattagtgacaataaatgttatcaccaatgataagtaatttgtggctaaagggtaattgtgactaattatagtgatatcttaacaactattagtcacaataattagttttgactaaaaatcacttttagtcacaatattatttttattgtaactaaaacttttagccacaaattttttagtcacaacctcgtcaaaaaaaaaaaaaaattgtgattaaaatttttggtcaccaacatttttcacttttaatcacaacttttactatgactaaaagtcaaattttttgtggtgggttccctaaggccaactccaaggaggcggcaaattgatactttggtgttgaggattgatccaaggaggcagcaacatacactgcaaattggtagtttctctacagtgcacg

SEQ ID NO: 101989 - DNA, 603 bp, Cannabis sativa
gacaaaatgtgagctatattttaaatgggcatcacttattaatttacatctccattgaaattgctctaagtttttcttattttttttttttatttttgtcttattcatttgtttataattaatcattttttattagtattttattttttttatcaatttatttagtttatttttaaaaagtacacatgtattaaatatacataaaagtttggacttttttcaattttaaccaaaaaaaagtaacaatattacaaaaatatttctggccaaataaacaaatatacagctcaaataaaaaaaaatacacaaataccacttacagacgccttttacgcatgatccatattttttgggcaactatcgcgcaaccatcacgcaaccacgcagcaacccaacataaccgaaacaaaaattcaaccagaaagagaaccaccattaattgtgacaacttcacctaagaagacgaccagaatcaatcaaaataggggctgtttcgaattcaaaaacaaagtgtagaaaaactactatgaaactaaaattcaaccagaaatccagtttaatttgcacaaaactaatgtcatgacttcaattttcaaatccatg

SEQ ID NO: 101990 - DNA, 683 bp, Cannabis sativa
atggagagcttgaagtctcttttctaaggttggaaattcttgtcagagagaactggagtaacgagtgataaaccgggatgatctgctgtactgatgtagtatggagattgaacatcttcgtatggtggtctgtcaactggattggagtgatgaacaacagagagagatggaagagttgttcgaggagggttgtcagcggaatgatttgatggtggaggagccatgggagcttcaactctggaaggatcatcagaagtagtagcagaacgtgtggcccgagtacgcaccatgattgtggagggaagatcttggttcttgaagctcgaaggggactgcttgaagcttcaaattatttcatccgataccatattagaaacagaggatttcagagaagaaaaagctttattgaattgtatcttatgtcattacagaagtgaaattacatgtatttacaggcaaagaagccaactgtagctttgtaactgaaataaccgaaaaaatagaaaaatcaggaaaataatagactaatcctaactaacacttaacatctacctcctattacaacctcttagtcaacttctacgcccgaaaacacatgtcaaaatatatttttcttcatggaggtgttcattatgcttactgttgggttttgtgccctaaataaaacccatttcaatctaatc

SEQ ID NO: 101991 - DNA, 636 bp, Cannabis sativa
  modified_base (40)..(51): a, c, t, g, unknown or other
tttatttacattgttttagatattcatatttaggatgttnnnnnnnnnnnntggtagtaaatctaaatcctggtaaagcatattccaacagattttggttgtggtttaagatattcaagtagctgaatcccacaacaatctctaccccatatcaaaaggtcccaaaagaaccctaatcatttctttgcacacttacattctagatattcatatttttgcttccctgttcataattgcttacctattcttttttattctaatcttagaaaaatcgaatctttcaatcttcttttggttgaagtgatatatctatatattttataaatgaatctttattagggtttttattatttttgcctttctatatttctaccgattaatttttttgaaaaattatacatttatttcgtttgatagattttattaggttattgaattctcgtaatgttttttctaatgtgtttgtttgcttactgggggtctcttaatttattaaatcaagtttgttgtaatttcaaattcttaaatttagagcattagagtggttggtgttcggagattaagaaaattgaattctatgttcttggggagaggctgaagtaggaagtaattgttggataatcggggtagttgatc

SEQ ID NO: 101992 - DNA, 534 bp, Cannabis sativa
ctgtaagtgtgggttattctttcataaaaattcaatttcctgcttcaggttattacattcgtttgtgtcgtgaccgtagtctgcgtggaaacggcagaacttggatgtatctcttttactcacatccttgttcataggagatggtttcttgtacgggaccatagactgagtttttgcgtatattgtctttaggtcatctgttagggctgaaaaggcagtaacttttgaggcattttctttggggtgctgttcaacatttccaacgaacttgcctttctttccattgccttgcctgttgccgttattagacctcttcccatttgaatttgagttgccaaggtactgtggactttgaacaaatgttcctaccgaggtggtacgttgttcgctcttcttttgtctgacagtatccacacgccgaacaacttttttgagcttaataaatccatatgctcgatccaaaaatttagccatcgaccccacggtcagcctcttgatatccttccacaattctccaagtggctcaatgccccc

SEQ ID NO: 101993 - DNA, 1076 bp, Cannabis sativa
tttttttctttaaagcatttattatttcttctataataatattgattttgcaagacatactattttttatttatttcttttttaataatgtgtattgattttcttagcaagatatattattatttttttttttttgaggtaccacttaaaattttttaattgtgtataaagtgataactcttataactactataaaatgatctttttcagttatgaatatagtaaaaactacacttcgcaacaagatgaaaagtgaatatttaagtaatcgttcgccaatattatatattaaaaaagaaaaattatcaaaaaaaaattagtataaattaacttatagataacttttatgatatggttctacattttaatttaaattataaaattaataaaatattttaaaaatatttctcacctaaatttagaaaatagttcggccccccctaactttatattctggctcctcccctgaagaaccgaagactattgtacaaatgataaaaaatgtatgtaaaattaggatacaaagtgtatggcctagcaaagtgtccatagaagatacattttggtttagtgagttgtaaggaataggaaaaaatcagaccttattttcataaaaggtgctgaatagattgtaaaaagtttatttgagtaatgaaaaatactgctgatttccaaaaaaaaaaatataatcaggttatttaaattatattttgagttattgtgtgtttttatttattttgttatagaaccagttttatttatatttatgcttcagtatttttggaattgatccccacagttttcttttaaaaaaatacaatcgacatttttactaattttgttgtgaaactaattatgttttaaagttatatttcaatgttttagaagctgattttttctttgtttttttaattataactagtttgaattattgtgtgttatttgtttttattcattatgttataaaactaattctatttttaattataaccagttcgaattattgtgtggtacttgttttattcattatgttatagaatcggttgtattttaatttatatatgaggcctatttct

SEQ ID NO: 101994 - DNA, 738 bp, Cannabis sativa
atgccaaaggagcggcgaagacctaatcaaggcgaaactgagacccttgaagaatgggtgtttcttaacttcagtcgctccgtatttggccccgagacgcttgatcggatccttgacaagcaaagcggtaatcaactccctcgcatgaagctcgagctcgcataacattgtgcctgcggggaaggcaagtggcatattgacgatgtttgagatgattctctttcgggattgagccacgaacagtgtacggccgtagatcatttcatagatgaagacaccgtacgcccaccagtcaaccgtgttgccgtggggctcatctttagccatctcgggcgatacgtactcgtgtgtaccgaccacagacaatgacctggccgtcaccgattcggctacaaagagccggtttagcgtctggactccgcgcgacttagggaagtatttctgtatgtatggaaacctatatcaaaaacagaataaaaatggagaacagtaatgtgggaaagattatatatatatatatgcttattatatatatatatatatatatcttagtttttttttttgcattctagggtttggttttgattggttttggggaacagggttattgattctcttacataattcaagtcatgcgtccgggctagtggggaccaagaatattgtaaaattatatcaatattggaatcttgccaatcatattaaaagatttttcataatcttttatttctcaaaagt

SEQ ID NO: 101995 - DNA, 506 bp, Cannabis sativa
acttgtatttgtgtaaatttacaaaaaaaatatgattggaaacaaataaaaattaattatgaaaatatgtaaggagataaaaaaagtgggatgatcataattgatgtgtttgtggtaatgatataatctttcaactactaaaataagattaatccatatgaattaaatgcataaattttattagatacttaactataattgatgtgtttattattaaatcatttaatcagtaaaatttgtactaaaaattaattttaccagttttgagatgtattgtttgatatcatcctcagtgatttttgaaccatttgattttacaacaaatgcaacaggaacctctcctgcagcttcatctttcattctgaattatcataccaaacattaatagtcataatatttttatgtactagaatacgtaatgttcgaaggaatgaaaacataagaatataaatgagaacaaaaatatcgttattagccaaaatagagtacttacggaacaacagcag

SEQ ID NO: 101996 - DNA, 794 bp, Cannabis sativa
aaatcgtctcctccttcctccatcctttctttgaatttcttaggcatattatctatgaccatctcattgagtgtaacaatgtttcttactccatctggaactcttctcaatttcctacaaaaatcaatacttaaataggcaagtgtaggcaatgcactctcctccactttccactctttcaagtaatatagatgactaagctcaagagattcaagtcgagggaaacctcctcttgagcacaccatctcatcccctatgaaggtattaaatccaatcataaggactcttaattttggtagcttttctaatgttggcattggatcatccttaagttggagattactcaactctaacttgatgagatttggggagaattggttgacttctggtaatcttactataggagagtacacactaagcttataaatgtgaggacagcttaatatcaaaggaacaatatctatctctttgtccgaatcagaattcaccactagtaacgaaaacagatgagtgaatgtaagagattggggattgtgtaagaatgtctcaaaatttccattcacacaaattcctaatttcttgagactctccaactgtagaagatcactcagtagaagatcctcggtgtgaatgcctaccaatgtttgtaaatttctagacttagttgacctcaagaatttaccaaattttatgtccctaagaaaaaaatgtagatgcctcagttgctccaacttccacattgaacttggtattttatcactctcgctctctactctcaaagtctggaggcatat

SEQ ID NO: 101997 - DNA, 909 bp, Cannabis sativa
gttgcttggtctgagaaattactggatgaacatttttgttcttcgccaaagtgttatcaaggagatagataagcattgcagattgtttctttggggtcaagctgggaatcggtgtaaagttcacttaggctcttgggaggaggtgtgtaggcctaaacaatatggtggtcttgggttcagagaaggggcgaattggaacaaagctattttggcaaagttcttgtgggctattatgaagaagcatgatgtgttatgggtcaaatgggttaacgttgtttacttgaagggtgttgacatttggaactacaagctttctcaatattctagttgatactggagaaaactttgccatcttaggatcgatttcaatcaacaacaaattttagctgctggtaagtttgacaagttcaaggctactagactatataatagcttggtaacttgtgaggaggataaatatcacaaagcagtttggagtaggtttaatattccaaaacacagattcatattatggcaatcggttcatgtccatctcctcactagagatcagttggctgtcttccacatcaacatttcgaactcagagtgtgctgtttgtgggcgggtagttgaaacacatcaacacttattttttgattgtttgttctcaaggcaggtggtgcatgagattttcaactggctgggttttcaggcttggagcactcaatttggctgctggaggagttttttgacagcaacaggtgacaacttaagggatagagttgtggtctctttgttggctgctgctgtttattttatttggttgaataggaacaaatgtgtacatgatgatagttcttacatggtgacttacattgttaaagagattaaaaagatagctaaatacagattgtatagctataggcaaaa

SEQ ID NO: 101998 - DNA, 694 bp, Cannabis sativa
  modified_base (44)..(48): a, c, t, g, unknown or other
  modified_base (75)..(79): a, c, t, g, unknown or other
  modified_base (106)..(110): a, c, t, g, unknown or other
  modified_base (142)..(146): a, c, t, g, unknown or other
  modified_base (229)..(232): a, c, t, g, unknown or other
  modified_base (333)..(340): a, c, t, g, unknown or other
gtgagtaaattccaacattgtttggatttactcaacataggtcnnnnngtttggatttactcaacataggtcctnnnnnttggatttactcaacataggtcctgannnnnggatttactcaacataggtcctgactaattcnnnnngatcactcccccaagtgtagtaagtctattaaggttcagtttagaatgaattaaggtagaatttgtggtaaataatccactcnnnnctaaacctattttgatatccaaatcagttggaaaatctgttaatttctgttgtattcattcctatttggaaagttggttagttagttaaataactaacttnnnnnnnnttgttaagtgctggacatgtcagctactaacaaataaatattaatctcttgattgtaattagagagaggtaagaaaagagagagacagagacagaaactgagagagaacttgagtgagatcatgctgaagaaactcaagtcaacattggctaaattgctctagttttaagtgttgaagagcctagactgactgagagtgttcttgatgatcttgtactgaaattggtgtttgtaatggcgaattcgtagtggagaaatctccttgggggagagctggagtaggactcaatatttgagatccgaaccaggataattcttgtgttttctctctgtttttcatgttctaattatatt

SEQ ID NO: 101999 - DNA, 584 bp, Cannabis sativa
tttttaacgaccttaaaagttctgggggcataattaggtacatgtcaaagttcaggaacaaaaatcctaattagcgaaagaattttaagtaatctttatattttttaacaattaaatcaatgatttgatagcttttgaaagtaatataattattgtatagtatattgcatcattaatttttttcccttcgatatatattaaaaccaaaacccttcatgacttacgttttttttcttttcgtgagtttgctgtttagtgggatgtactgtgtataataatttttaattttgttttaaaaataaaggtggttaaagtttttgtttttttgagataatagaactattatattaaattgaaatcataatacaatagtcatcagaggaggtgggaattcctccattcaaacacattctttgtccaccgagagagcatactttgctaaagcatgagcaaaggtattagcagatcgaaatacatgcgagatcttcactctacggaaattggacatgagaatagatatgtcatgaagacactatgaaaataagaaacattaaaaactctagaatgcaatcctttgaccacta

SEQ ID NO: 102000 - DNA, 1219 bp, Cannabis sativa
cctttattattgggcttggaccatcaagggcttaaggcccaaattatgtgaaatctaaaagaaacaacaaaaagaaaaaaaaaaataataaaaggctggtggtgtatcgtgagcagtaagcagccaagagaaagaaagaaaaagagagggaaagaagagaaataaagctagagagagaaagggattttttcattttgctttgaagaataagtggttgattctcatccattctagcttaaattttgggtgttgaatccttgcaaggtgctcttcaaacttaccggttccgatttggcgattgtcctctctaaggtgctcttctataagtcccacttggtgagacccaaattttgctatttgtgtatccattttttgaggtgatgatgattgtattggtgatccaagattgtttaatctttattttgttatgagcctctagtattactagagaagaactttgtaatcctattattgaactttagtgatagtggatgatttgagtggactataatcatgtggttttttcccgcattgggtttccgcgtaaaaatcttggtgtctcactgaaaatattttaaaatatttaatcttttatgatatataaaaactatatatacatattatatataagtttttcaatagataaatctatatttttcttacctccagtaatatcaaaataggtcaaggtaagttaatacgaatataataaaaatttttatgtttcgggttagagttgagaaaattagacgcaatttaataacggattgacacatctgatacgaaatataaaagcatattaactaaaatataacatgaacacgataataattttgtcactcctacatggagttaaatccaacattcttataccgttcacgaagtgcaagtcatttcctagtaataataagggaaatttgcggcaaaagtccccaaaaagttcagtttgatacagataagtcaccaacctccaaaaataacagcaatagtccttcaaaaacatgaccttgaagactattgctgctatttttagaggttgagacttatttgtatccaactgaggtacttttgccaataataataaagaagactcaaagaaaaaaaaaaaaaaaaaactaaaaaccccatctcgtgttcgcatcctctgccaaatatctgaagctgtcacaattcacaatgtggcgctctcgcactgtagacgcccatttcaggaccatgc

SEQ ID NO: 102001 - DNA, 894 bp, Cannabis sativa
ttcaggtggcatgttaaagtaaagttcggttcggggaaaaaaaatcctaattagcctaaaccaattagttacttttgcgtaaagaaatattattgttattactgttacatcttttctaacaatataccataaataacatcaatcaactaacatctactacgaattccattttttttttaaattttcttgtattttcaaaagtaacaatttggttacttatagtgccgataaaaaactaattagttacttttacataaaaaaaaattatttttatatcatataaatttagatacaatttgattaccttcaaaacttatttgtaaacattttataatcaaatagttatttttaagttatattattgtatattttttaaaatatatttgggtaaccttaaagtttattttcgaaactaacgagttgttatgtattataataagctaccactttcatgtaccaattgttttatatatatagtatacaatatacaatcttataacatacaaataaataaataaataaatcctaaggtatacaatatgaaaaatgcattcaaacaaacattaataaaatcctaaaaaaataaaaataaaaaaatcattaagcatacaaatcaaaatcacattaaaattttaaaacaaatacatatacaaaaatataatttaacaattttttcttgaaaaaatacactaaaaaataaaaatatatcctaatcatatgaaaaacgcacatatataatagtcctatgtaatatacaaacacttttaaaaaaaaaataaaaaaccctaaaatatactgtatcaaaataacatatgatcaaataaaattttcaaaaaaaaaaatataaatgtagaaatttttttacaaaagtcacatcatataaaatgacatgta

SEQ ID NO: 102002 - DNA, 596 bp, Cannabis sativa
tgcgtatacttgcgtagtgtttataattttcgtaacacaattaatcaaatttaattgaatttttaaaacttatggatgagatataccctaatcagttcataataaatctagtcttggcaattagtttgcctcgctctttctctggaaagccaactgtcttgattatctgagtcaaatgttattttgtcttatcgtaagtgggactcgtatcgacttcgatgtttgtgttcgatctaataataattgctttctctctaattgagtgtgctggttcagttatccaccttaacgacagaaaaaaatgtgattaaaagtaactctatcttactctaaacccatacacactcgactcggccacccataatgtgaatgggtctcatatgcctttgatgggtcatatttcacgttaacatacttgaatcgtattctcaatctgactctagattgagttcagtcttgttttcctcatacttgtcgttttttttttcttattttaccaattcttaatcgacttacattttagggcttttttcataattgtacaacaaaaataacataattacaaaaaatgtgcaaaaaaaaaaattattttaaaa

SEQ ID NO: 102003 - DNA, 713 bp, Cannabis sativa
cgagtcccgatgctagttttgatttgggtgcgcgtcccggtttgggtctaggtttgggtcctagtcaaattccagttgtcggacttaaacccagactcaaactcggagacaggtctgggacacgagtctgggttaggttcaaggtttgggtccgagttcaggtctgggtttgagtcccggtatgggtccttgatccgaacactgattacggatcaggttcaagccctgggtccagatctggatcacggtctcgggtcctaggtcccagtctgggtcctacattagggttcggatctggggtcgggtcctaggtctcggtcccaattttgatgcccgtgttcgtggtccaggtcccccatccacatctgagtcctacgtcccgatctgagtgcaggacccggtcggggttcaagtcctagtccgattacaggttcggattctgatctcagtcatggtccagatctgggttcgagtctaggtcctggttcgagtccgagtcccgagctctgatctgtgatctgggttctgaggtccaggtcgaggtcctatgtgtcgatctgggtccatgtttaggtttgggtcttagtcctagttttgattttgattcagtgactggttttgggtttgggtttgggtttgggtctaggtcggggtctgacccctggtttgagtctcggtcaaggtttggctccaggttcagatcccggtctggg

SEQ ID NO: 102004 - DNA, 833 bp, Cannabis sativa
  modified_base (313)..(315): a, c, t, g, unknown or other
ttttttttttttgtggcaaacccctttatgttttaatttttatacacttaacctctttatattttattttggtggaaaaacccccttaagattacttttctttgcaactttaaagttttagttagatattgccattaaatactaactggattactactgtatcgacttcgaggttttaccgttacatatacacaggtgtatacagtggttatccaattgatatttaacagtaatatttaactggtgtgtcaaatttgcaaagaaaaataaacataaggggattttgccacaaaaaaaagataagggggttaannntataaaaattaaaacataatggggttttgccacaaaaaaaaaataagggagttaagtgtataaaagttaaaacataagggagttttgctaccaaaaaaataaataaggggttgagtgtataaaaattaaaatataaaggagtttcaccgcaaattgctctatttattaaactaaaatgtgtaaaattcagcattaaaatacacccataactgtatgtcaactcaagtgcttgatatggaactttacatatacatttaggacttttgcttccaaactttgacatatacccaaattttacctcctgaattttgaaaactgttaaaaatttcctttgaactatttgaattgttaaatttaaaaatttttgtctaattttagtaaaaatagtataatatagataaaaattcaaagggcattatttgacatatgtcaaataataagtgatatgatttggcaaatacgaaagtccgaagaacataatttagtacataaataatcatcgaattagtaaaattaaa

SEQ ID NO: 102005 - DNA, 538 bp, Cannabis sativa
acattggaacacggtgtttggctattagaatcacatcctagtatttttagtatagcggggctgtatagttagacatcgggaatgtcagaaatactcgagattttagagttgacaaaaatacccataagtgattttatgattgttaagtgtgggcaagggcattttggtctttttgcccattttgtattttgtcgttttgtggatttaattatgtaatacaatcacgtttttaatttgattttggctcatatctcaataaaacaaaagcttatttttattcatttatacaaagttgaaaaaaataagaaaatgactctctctttcaactctattcttctctctcacgaaatccctagaaccagctagggtttgctctaattttcttctcaattcaagccagttcagcaagatcatagtgtatttaagttctaggtaagctcttagtaatctcctctttaatttcttgaattgtaagaaaatagatttttgcatgaaattgtgattttagttgctattgttgtttgaagtaggtttctga

SEQ ID NO: 102006 - DNA, 1035 bp, Cannabis sativa
  modified_base (583)..(590): a, c, t, g, unknown or other
cttactctattttctacattgatgctgtaaaactttaccattgttggtaatcttagttttttacaaccatcgaataggggtttatctacatcacttagaaaattattaaaattttcaggatctttaagaaattcctcctatgcttcatcaagcaagtccaatggatgatcatcgaaataatttccctcaacatcatctacccccacttccctaatggatatggatcatcagctaaatattcgtcatgctaatatcaagtagtataacttctattgaaatctcataaatacacatgatctttaatcattgtaatatttcctttggatctatgacaataatttacacatggacaatgaatacgttcaggtttcttagaattctttaggaaaaactctataaatacatcaaaccctacttgaaatcatagtgtgtctctctcctcacgcatccatgatttatccatgttatacccgaaattcggccatcatttcaaaggatgacacgtgtcaaattagggaggatatgaattaatgaatgtaacggtaattacatttataaatggaataactcattaaatgcaaannnnnnnnagtatatttataacttgctgactgtaaggtcttacgtgagatgaagatatacaaactattgcctcgtggattaacgttaaaccatatgacattggatgtgcaaggcgaggcatcaacctcgttacgcatgagtagacgtatgcaagttataatgactgctaagacacttagcgtataatacacaatatacaaactaagtataacaggctggtaaacccaaacaaccaagagcgatgcacccatctcgccataggaaggcacactcgtggtaccttcactaatcagctccaaacatctttcaatgagattcacagatccgtcgagttaattcttttagaaagaagttggcatttaaatgatgttgattgttgaagttcaccttgttaccaagaactgcgattgtcagatggagcgttatgtcagagagaaagtggcgtgtaggctt

SEQ ID NO: 102007 - DNA, 888 bp, Cannabis sativa
  modified_base (544)..(545): a, c, t, g, unknown or other
aattcccaggtctgtgtcccccatttatgttcaggtcctaggtcccgttccgggtccaagttcgtgttcgggttcagtccgagtttaggtcgtggttttggttagggtcccagttttcatcccaatcctagtcttggtttgggcttcgggtcccaggtctgagtctgtttattgggtcttgggttcggccccggtgtccaggttcgggtcggagtgccgtgttccgatttgggtctgggtttgggtttaggtctgattcctggtctgagtctgggtctgagtctgggtccacgtccggatcctggtttgggtctgggtttaggtccaggttcgagttcgcgtcccaggtgcggttccaggtctgggtctaggtcagggtcttgttacagatctagcttctgagtttcgatcctggtctgggtctgggttttggtccggttgtcagtcttggtctgggtacacgacgtgtcaaggcccgacttcaggtcacggtttgggtttggggctaggtctgagtttggttctaggtttgggtccacgtccnngtcacggtcctagtcttgttcgatggtcctggtcgtacggttcttgtttaggctctattttcgggtcctaggtttgggtcaggggccgggtttgggccttggtctgagtcccaaatcaagttcgggaccgagattggggtgcggttctaggtcccgggcccaattttgtgtcccgagtctagttccatgtttgggtctgagttcgggtccaggtttggcatcgagtgtaggtttgggttgggatctaggtattggtttcggttcgggtctaggtctgggttggagtttgggtcctagttcggttacggttccaagtctaggtccaggtctgattacggttcca

SEQ ID NO: 102008 - DNA, 1164 bp, Cannabis sativa
ttttgagtgtatcactaatcaatcctaagataacatttttaaatggtactaggcaccatcggtgtccaataagaattctctttaataaaatttaagtaaaaaaaaaaataaaacataaaattaatgcttaatacttaatatgaattttctatcttatcaccaaaatatataactattttttatgattttttaattagcacacaaataataataggctacttataatttttgcctccaaactttgatgtgtaccaaatcataccctctcaacattccaggatattaaaaatttcctttaaactattgagattgttggactcgatgacttttgtctaacaaatcggacgcggatgaaagttcaggaggcacaatttggtaaatgttaaaatttgcctgacactatttggtagatatcaaacttcaggaggcactgtttagtacaaaaaaatcgttgccttagtaaaattgaatgaaattttacagaaattcttgaatccaacaatctcactagttcggaggaaatttttatggcctaaaatgttcgaggaaaataatttagtacatgtaaaagtttacggagcaaaaatcttaattatctgaaacaataataatataaactatcaaaaaaataaaatatatagttaaattttatataaaaaattattttaaaattataatttttagctaaaaatttgaaggaaacaactatgtataattatttttatgattttttagcacataaataataaggcaaattattaaaatatataaattttaaataaggaaattattttaaagtttaaacttttaactaaaaattttaagaaaaacaaatacatcattaatcttcaaaataatttgacaaaaagaaaaaacatttaataaataaacaaataaaattttacaaaaaaaaaaattatatatgttatatgcctaattgtatatatatatattaattatatttttcaaaaaaacagatgcaatagcggctatttgaacgtccagtcttgaaaaatcataataaaaaaataacttttatcttccctaaaaatgtgactgaaaagttaaaaaattaaagaaaaaaaatgaaaaaaaattaagaagaagaactgaacaaaaaataaaataaaacactatatgttaatggagagagagagagagaga

SEQ ID NO: 102009 - DNA, 1183 bp, Cannabis sativa
agagagagagagagagggttgaaaaatccaattctattttctctactcttagttgtttactttctgtattcagtatgttattctgatttaggttgttaaatattttaatcctttatttaaaataaaagataaatatctaatttgattaaaattcaaatataaatatctaataatggaatatcaagtatcagtagatcttttattttaataattatccttttaattaactaattatctaataatatatttcattaataattaaaagataattaacttaatttattttaaattattttaatcaataaaaatattaaaccaaattaatcatgagcctttatatgtcatcctacacatatagaatgggcttacacgtgtgggtcatattttaaggaccgaaattgatttcttaattttgccataaataagatttctaccaataaataataattgactaattcttattaatctcttattttacaagaattaaaataaatattattttctctaaaataatacatttctttctttaatattatttagtaataatattatatttaactaattaatatagttccatttaataaaaactaaatagttaaatactattaattatatagtttataattgccataattaatcaaaataataaacaaattactattttgccattaagattttatttcccataaaaagtaattctcacttgaaatttattcatcaaataaaatcttcccctgtacagtgttgtatagaggtgtttcggggaccatgggcctatattttgaagctccaataaacccaagattattatcaatctcatcaatagaataatctagtttactaattctattattactccactataaatatggaattacactctttgacaatataaaattatatttacagaattcttgtggtggtccattgatataatcaatataagcagttagccctccaattattagttcataattagagttggtcaaaatgtcgttttacccttctaatgatctctcgaatccttatgtaccgttaattcaatgtgaacagttaatctataacttattatagatttggatcctactattagcactcccataattaacactataaggaaactaatatttgatccgttaggaaagcttagattccactgttgtataacatgttcccagccact

SEQ ID NO: 102010 - DNA, 517 bp, Cannabis sativa
gtagttttctgaatgtgaaaaataagctaatgggtctctccttttataagtgaaggaggccaacaaaaataggggaaaaataaaaataaattgttttccaccggttatgatgatctaatggtgaaaattagcttctggtggtgatagctaaattttggtgcccggcgggtcctgctactggtaacctggagcttatttttgtaactttgtcgagggtgaaatttgacgattatagcttcataattacgcctgggttgtgagacatgacttgatataacatttaaatagcttcaaaacacaagttgaatcacattaatcggattaatattgagtgagttatggcttttgattgaagacagtttaggtcccagcgcccacgttgatatccaacgcccaagttgacatcccaatgccgaggttgacatctaatgtcaacctggaggctgggtaagtgtaaaacgtctaagggatgtcctttaagatgcctaaataatattttgacaccacttagtccatt

SEQ ID NO: 102011 - DNA, 570 bp, Cannabis sativa
atcttcaacctcaagctttcaaggatattcaacaatggaggtggagtaaaagcttctttgggtttgtaagtatcacttcctatcatatttaggaatttgatttattaattatgaatttttggtggtaatagtgaatattgtgaaaaaattgtttttgatattgggtttgtcgaattatattgtggtattgagttgttagtgatattatttgcactgtctgagtgattttgaatttttgggaagtagaaaattaaggggaggtgctgcccaatttttcttagaataattttgaaataaaataaacaaaacagaaaaaaaaattttgtttctaagataatggagccaaaaagaacaaggcatgttgaagaaggttcgtcgtcaaacccgccagctacgggttttgatttttaagtgaggaggcacataatcgcttcatgagactcaaaattaggccctccattaaagatgggggtattgaattccctgagaaccccttgaggcgtcaacctaggttcgaagcaattcgagctcaaattgagaggatgaaatgtggtagttttgtggatgctc

SEQ ID NO: 102012 - DNA, 1199 bp, Cannabis sativa
  modified_base (48)..(60): a, c, t, g, unknown or other
agtagtataatgttgttcgaaaaaatttattttgaattggcaaaatannnnnnnnnnnnntttgtaataaataaataatttttaaattaaataaataagaaattagacaaattttgttaagacaaaatttgtcaagacaatatttattgagacaaaatttgtcaatacaatatttgttgagacaaaattatcacacaaaagacaccatccttgtcctaaacaagacaagggtaggcgcctctatggagtttgtgtttttgggttaattaattaattaattcaatcagataaatatttgaatttgaaaagtggttatgaatatttcaaagttgttaagatattctctcaagtagttgagagattctctcaaaaatatcagtaaccagttataaatatttatttattcttataattatatatgagttaattaatgagatttaactactataaataaaagcctatttgagaaattaggcactctcttttacactattattttcaaaatatagaaaggagaaagaaattgttttttctctcaattattcttgctcatgtgttgagaactcggcaagaacaattttatacactttatcctaatagcccacactattccttgtgtgtggtgaattgatttgaaagatattggtattagtccaatttcatcaacctcataaactagattaagggatacaacatacaagaagttttgaggatacccttgttgacctcgcttttagtcaacgacagtgagtcaattatgaagcgattagaaatgtaataaaaatagagcaaaaaccaataagtgataaagaacaccagattttgaagatgtttggcccctttagtacggtaatagcctactccccttattagattgtattaactcgaaaataaagaacacagtgttttctctctcaaagctcttacaataaaatctctgagtaattctcttagatctctctctaaagcaattctttcgatccattttatagtgaagttggatcactatttataggggcttaacgcatgagggaaggtttcccttttgcttacaatgtctataataggaaggaatattaattacataaatagaatacacaaaataggggattgagacagcccggcgtatctctctaattcaatcccatgattgtagggactatttgttgggttttgtgccctaaataaaaccctttaca

SEQ ID NO: 102013 - DNA, 787 bp, Cannabis sativa
attataatttaatattttaacataattaaacatcttatctataaaaatagaacttaaaacttacgtaatatgtaaaataatattgtatgtaaatatatacaataaaacttagaataatatttatattattatatcaaatattttaaatacaaaaatacatttaaaattaagatgaatccatttagtgctagaatatatggtcatataaatgacaacactaccaacttttataatttatttctaaaaataaactaaatatattggaagtatttttaatgaattgttaacaaagtgttggatactataaacttataataatcaagagaaaataaacactcaaatatacaagaatttcttttaatgtatactctattgaagaaacaaaataagaaaaaattactaaatcttcatctaagattataattacatattagtaataatttaaaaactataataaaataacttaacctatttaattttttatatgtatagaaaatttttaaaaaacactaaaaataaatattaaccataagtctagtttgtggaaaaatcaaatttttaaattgaaaggctactatatctaaaagtaattttgattaatttacaatttaattttattctgataattaaatttttatttgacaatttggattctacagaaaattctaccaaaatttcaattttatttcaaagaaaattatttttggatcaaagttatcacaaaaataaaattgggcacaggggtatgcaacctctgtgggcaaagggagctcggcgtgaccaggga

SEQ ID NO: 102014 - DNA, 850 bp, Cannabis sativa
aaaaatctctagcgactatccaactcaaaaaaataaaccgatcgaagtagagttgaaaaaaaaaagccaccaaaaacactcaaaaaaaaattaatccaagagccaaagtcaaaaaaagccatttgtgattcggggatagtaagccaaaaattaaaagagccaccaaaaatccaaaaataccgatccaaaaagtagagcaaaaagagccacttatgatcagagatagtgagccaaaaaaaagagccgcttatgatcgagttgtccaagatggtaagcaaataaaatagctaccatcttgagggttagagagtctcacattgctaatgtgtagaaagataatacaatatataagaggaatgacatactcctcctattgccaattggttttgagatagaacctcattcatcttatctccaaataattctaacaataccacaacggtacaacaaatgataaaccacgaccgaggtttaaggtggtttggaaactcaacaaataaataataatcataagtttacatttaaaacagtactctttttttttacagagtaattcaaaccgtaaattgaaagaaaaaagttaaaaaatagtatatggggtaatttccctaataataataataattggagaattccccatatactactttttaacttttctttttttcaaatttatagtttgggtgtacgttgctatatgaatttttgttgcgatttaagttgcttcgttggttgttatgtgagttgttacgtggattttcgtaaaaatacaagaaaaaaaaaaaaaaaaactaatttgaagtgtaaaatgaaaaaacccaagaaattatctcatatacaatttttaact

SEQ ID NO: 102015 - DNA, 594 bp, Cannabis sativa
aaatttaaccaaatgtaaacataaaatttcaaatttcccattggaattaccatgtctctaaattttcccttcgtatatatcatgcatataaactatataataagatttttcatttaatattctatgaaaaatatattttatatttataaattttatagttaggatttcaattttagttcactctaatattaagtttatagtattaaggtgcctaactattgttattaattcctttcaaaaaaaaattattgttattaattaagtttattgtttaattttaatgtgttgttaattaagttttgggggaaaaacgtaaataagagtaagaagagagaaaaagataagtatagtattatattgtaacaaataaaaaatattagaaacctaaaaaaaaaatgttaatattattgtgaaataatattttcttcttttattttatcgtctaaccatgttaattgactatatatatcatactaaacattttaaattgcaatttttttaattaatgtctaacactaaatactatgaacctatatggtacttttaaattatgatttactaattagtgagtacaaaaatttaaaatataaaaat

SEQ ID NO: 102016 - DNA, 577 bp, Cannabis sativa
tactactaccaccaccacctctatatttgccacatagtcccactttcctaaatgtgtgtgtacacaactcgcttctaataagatgaaccataccatgagttagattagatgtgaggacataccactcgtagtttatgagagtgtaaagtgattgtattggctcactttttttttttctaccactttaattcaatttaatttaattaattttcttcgtcatagttcttagttggtctttaagctacttactatttttttctttgaatcaattaagatggtcgtggcttttccttcataggagacaatttcgtaatcgctttgattgcttgctatgtcttaataggatgggtgtatttaaagaatgcccacttcaagactcaatctcttaaacatactctctctcttctttctctctctctctctttctttatggaaacttgtctataaaagcttgtccttcttcacttttcttcatgcattctcaactgaattatggtcatggttacggttatggggagtggctcttgctggagaagcagggcacgtgcaacaaagctatctacaaaaggctcaactc

SEQ ID NO: 102017 - DNA, 1266 bp, Cannabis sativa
  modified_base (235)..(239): a, c, t, g, unknown or other
gaactaagtatgaggcctcaagcgctagtcaatcgataataaaatttgtatatctatctatctatatatctacatatagatataattttaattttctaacatttttttttctccttttaaacttaagagtacatacattcattgcctagtttgtctggttaatctatttggtaatttagtcttatctccctagctagatattattcttactaaatcttttacagtttgaaagatnnnnnaagttttcacttgaccataatttacaaaagtttgaaatgatattactttgaatttacaaaatctcttctaagcacagtgtagttgaactatcactgcaacattattttcttcatgcgctatgctaactttaagattaactcaaatatatattgaaatacataatcttattataaagacattttctcaatatagtgtacttgatttgattcgagatttgcaccttgccagaaaactttgttaattattttttaaaatactacttacaaacatattttgagttaaaacttttgtgaagttgtggttgactttttacaagaagaatatatgcgtaaaggcttcaattctcaaaggattttgccggacaactcaaggcccaaacaagtctcaaaggactttgcccaacaacaaactattctctcaacaatactatgagtacactctaaaaggaaagtgaccactttttatgaatatttgaaaattatccaccaactccatggctatcacaaaatattttattggatgtttatgaacacaaatataaaagatcataattagaacaagcaataagttgcaaaacaactccagaatagagttattatgtacctgatgacgacacatcatctgatgcacactatgtataggcgcttttgtagattctgagaaaatggaggaagtcacgagctactttgtaagtggtggggcccttgtaggaaataatgatattatttggtaatttctttatgctctttttagttcttggttacttttgcaagcaataaattcacggagtaaatttgagttttgcttaattttatattattaatggccttagatatttttttcaagaatataattaactcttcatttgttactgctagtagtatggaagaaagaaaaaatcaatttgttttattttgggaaattaatatatacttgccctgttataatttttacttatttatttgttttcttgtgttgaaatgtagaggagttgttatattattaattcttcaacgaatgtagcca

SEQ ID NO: 102018 - DNA, 764 bp, Cannabis sativa
ggctccatacggttgccaacaaaaagttgttctgctggcaccgctggaactgcaatgacctgagcaacttgctgaggaggcacggcaggactgttccctgaactcatagagctcttttacttcaacagttaaattagttgttgtttccaaatcagcctggtgaagctcctctgaagaccttaatttggtagtgagttcttggacctcttccctggaatctcgaagatccctccgggccgcagctataatctcgtccctggccgtcaacacttcccgatggtttttctccatgagggcctccttcctttggtcttcgtcctagatcaccttcttctgctcctccgactcccgaagactcttcgtcacctcctctgtgccaccaaacttagacatggttaacccatggtcgatcaaagtctttgaaagacgaccagcctctgcagcaatctcgtagtcaacagggaaaagttagaaccttgtataaaaagacatgtaaggaatttaaaaggtgagaacatattgcagtaaggactacactcatgtcctgaatttggtacatggggttggcaaaagcgcaagttgcatatctcttggtgggaagttgggttagatcggtagcaacatggctcatcatctccgaggcaaggtgaagctctaagatttattgatcgaatttgaagaaaccgtgggcatgaaggtcgtggagaacttcactcatctgaaaaaggaaatctagcagttagctcccaaaccaaaccctaaga

SEQ ID NO: 102019 - DNA, 1020 bp, Cannabis sativa
tctgaacaacccacccaaaccaaattgagataatccaacgaaaatataaatcgaaaaacccgacaaaaacgtaatgtacccaatctttatattaggcaggttgaaaataatattaacccgaccaacccaattaagagagttttatatatatttattatatataatctatatattatataatttatacacatatttataaaaaaaaaaaaaattaaaagttcaaactactacattttttataatagattatttaatctttgaattaaacttttatatttgtctcattatcacaataattaaaataaaacaaatgaatgtgaaaataataaacattagtccttgatttggacgggttaacctgatcaaaccgaccaatttattgggcaggttgaatttttttttcttaatttggcgggttgccttagatttttgtaacctgatcattacattaggttaaataaaatgtaacgtaaagtgaacaaattaaccgacctacacccctattttttaaccctgtacaacttcactacaagagatatcacttttaccagcacaattcgctactgcactggtaaaagtaacttttaccagcgcaagttttaccaacgtacatttacagttgttaggatatttttagtattaaatttaggttaattttagcacttttttcggtttagtttaaattatgtttggagcatttttacgcttttatcttttaattttgcagatttaaaatagatgaagagtttgaaaatatcggtagaaaaaggataaaatatcgcataaaaatatcctgaggaaaatatcaaattcggattcggaaaaaagataaaaacatgtggaatttggagcagagagccacacaggccgcggcatggttttagcatgccacggcccgcccacatggagaagcacgaaggagtacttcacttggccacacgggccgcggcatgggtttagcatgccgcggcccgcctctttgtcaacagagaaaaatatctggcgtgaggtttcccaaaa

SEQ ID NO: 102020 - DNA, 555 bp, Cannabis sativa
tcaaccttcaacccattcaacattaacctaccatcagaccttatatcgggcctacatcggacctgcatcgggccggtcaggaaaaaaatcacagattacccctaaacttagattcgagcctaaaaacctcaaaaatcacatattatccactaaaaatacagatctaacactaaatctaatgctttaaccctaaatcatgaaaaaacaaaataattacagttttaaaaattcatgaaaaaaaaaattagagattatctttgacgaagacattgtccgtgttgggtggtggtcgtagtggtccagtcgagatggtccgtgggtggtgtggtcatgaggagttggtccgtgagtcgtgggtcgtgtgggttgtctgattgtgtgttcctccgtgtgcgtgtttacagagagcgcgagagagaagggggaaagagagagagaggactgttcaaataggaggggtagaatgggttttaggaaaaaataacttattctaccaatattgaatagtttaggtttagaatttttttttggcccaataaatgcataattagtcaa

SEQ ID NO: 102021 - DNA, 561 bp, Cannabis sativa
tttgaacggtttgatgaacacccctaaattttaactattattactatcaaaaattaaacttaaatctttctgtgtaatagatatttatgctgcaaattgctctttattattttcttctcacataattcagtaccaacaattaaattttaattttagcttattaagaattatgtgaccacatttaatacttttaagcctattaaaatttgatcaattatatattaaatgttaaattttgcgaactatttttatccaattaatttcaattatttgaactgatctaacattagattggttttatccctagaatatatttcatgtatacttattagattagttcaaatttattcgataattttaaacttaataatttttggctcaatttgaattcatcattagacccaattcaattttttggattgaattccatcaaatgttattggatacatctgatacaaaataaataaataagtaagattttaatcctaatttttatatagatatatatttttggcacgtttactaaactgtaattggaatcagaataatcaatgaaagaaa

SEQ ID NO: 102022 - DNA, 1528 bp, Cannabis sativa
aggcaagtctaaagctgatcccttcggttaaagagacttagctgatttatttaacgctaaaccctttccatctacgtgtcatcatccggttggtccacgtattttgggcaaaatgaggggcagcacattatattgtatgttgtgagctaatttttaaggtttcgaataatttagtgttgatcgaattttaacttgctataagtatatacattcactaactttttgttattataatttattatcaatgcatgcttagtggagtttgaatatcttagatattcatttgtagtgaagtaggttctatgatatattatactacagtcagatgagtgtaataatatgcatggcagttgagtttgaatatcttaaatatccaatcatagcgaagtaggttctgcgaaaacatgtactgcggttagatgggtggataaattttgtattgttaatgttattttgtttgttttttattgttttacttgttttatttgttattttatatatttttaaaaaatttgggaacgttcaattacatgcgttatgctaccaaaatttctgtagaattaagataaattttactaaaaataaataaatattaaaggaaaagtacatagcacaaataagtaattaattactagctagttgtaagaaattaggtgacataacacaaataattatatacacatttatataatttaatcatcatattctatataattatttatgtctaaccatataaaaactacaattagtaaaactctaatagtatttgaaaaaaggtacatttgacaaggaatcactttttacctcattttgttttgaaacaaaaatatgcacaaatcataatcaacatgactctcatcagtataaccaaaagcaggaaaataataagaaaacaaaagagcatatttcctttttattttctagaaaattcggcagcataacgactatattttgaatcaacccaaaaattataacctgcataaatatttgtacaaaaatatatttggcactaagtgccccagaaaagtccagaaaaatatgcagattaagtttttaatttttcaaataatttacaaatcataaaaattggaatatggataatgtttttcaacacataaaatcaagtccaataatcaagttgagttctcacctctctcaagttgttaaacgttgtccaaaaagatgatcctaagctctcaagtcccgagctctaattgtttagtccaatcttagatatcgctttcactaaagtttgaaagtccttatccgtacaaacgtccgcacagggacttgggggtaaaatgttatctcaatttctatccacgtgacgtggcatgtccatataggcaagattgatgcaacatggagtacatcttgtcaataagaagctcaagtcaccatgcacaatgtaccagttgacgaagagtccaaatacttaatcaggacaaagagacaacgaattggccaaccaaaggggtctcgccgaatcaccactggccagccctagtgccaacataggctggccagc

SEQ ID NO: 102023 - DNA, 516 bp, Cannabis sativa
aaacatgcaaaattgtgtaattacctccaattatatacaaatccaattacattgtgtctttccaaactcacattaaactatacaagtatgtagcataatttgaaagtattaaaattgaaaggaaaaaatgtaaactaatctttaaagatctttaagtagaataataaataattagttaaaaaggtaataatataaacagtaagaaatataaattaatatgagaaaatagtagttcagtcaaaaagattaaaacaaattgataatgtgaatataaaatattagttaagtagtttataatttgttgtaaaacatcaaaaattgtataagacattttgtatgctttaattttgaatataatttgttatatagaagaacatgttggactttagaaattggatgactaaactgtcaggggaatttggaaaaggtgtggatgaattcattactacagaaatgatatattaggatgcatttgttcataaatgacattcaacaatattgtatgatattatcatg

SEQ ID NO: 102024 - DNA, 575 bp, Cannabis sativa
ggtattgttgggattaaagatgtttggagggtattatttttacatttttttaagaagcatataaaaataatttatgctttttttaagtatataatgtcaaatttccctactataatgtagttttcctaatttcaaaatttcttttttcactttccaaaaaatctcaaacttattcggtaaaataaaatcaaaatagcaaacagcctcttaacatttttaattaccaaaagtgtacataaattattggagtatcacttatgggggatgcttgctaaaaatatctctgacaaaattatttgcattggccactgaactattgagaccacatgataattgtgatgcattgagagaatgctagtgacgtggaaaaacatgtttggaaggaacttagggcttctcaaggagccatcaaaacactaaatatgtgtgaaattttcatagatgcatattgccgtttgtggcacggcatatatgcagtgcactgtagtacactgcattttttttttctcatttttttatatatttaataattatatatattattatttatatttataaaattacaatatattttt

SEQ ID NO: 102025 - DNA, 854 bp, Cannabis sativa
  modified_base (825)..(828): a, c, t, g, unknown or other
gaagattgataaaatggtcaattgaactggggcagtttgacataacttatcacccacgaacatccatcaagggccaagccttggaaaatttcctaatagaaagaataactacaaaggaaaatatgcatgttcagcgagacgtgaatacttggaaattatttgtggatggtgcatccattaagaagggctcgggtgcaggggtgatattaatttcaccagaaggctttaagtttgattatgccttgagatttcaattcgacgcgtcaaacaaagaggctgagtattgattggtggcttgaggatagctgaagcgttgaaggtcaaaaatctcatatgccatagtgattcacaactgatagtaaatcaagttctcgggaatactaggctaagggcttgaagatggccaaatatctagagaaagtttggaagaacttggaaaatttcaattatttcaaaatcgagcaaatcccaagagaacaaaactctaacgccgataccttagcaaaactggcctcacagaataatttagatgaactaaacttggttctggtggaaatgctaaacgagccaagtatatatgaaaaggaagatgtcgagatgatagatagcttgcccacgtggatgactcccataatcaactatctactcaacggacaatttccaattgacaaaaacgaggcacaaaaactcctgtattcagtgcctcggtacacaatagtagagggcgaattgtatagaaggggctatccaatgcctctccttttgtgtgtattacctgcagaagcaaacaagatcatcaagaaggctttgttgggttttatgccnnnnataaaactctttacaatctgattagt

SEQ ID NO: 102026 - DNA, 839 bp, Cannabis sativa
  modified_base (59)..(59): a, c, t, g, unknown or other
atgactgaattttgatgacgaaagcttcgagtagcttcaatgatgagttatctcggcancttcgattagcaactgtacagtttgttttgatttttgttaatcaaagcttttgtcaagctttaatggtgttttgtttttgcaggttcgaaagttgcagagcttcaatggcacgggttgtggaggtttgaattttcgaaggtttcttttttattttttattttttttgttctcaaatcgttatatacggtttggcagtacgatacgcacgggttgatcccattttttctcattcggtaggaatttttttcctaaatttcggtagggatatacatatatatagtatttttgttttattcgataactgtaagattaatttgttaatttggtatattagtaaaaattgctcaatatataatgatacaacaactttaaatgatcaggatataaaaatgatcattaagaagaataatgtttcatattcaatttagagaaatttgcggcataaatacctattttgctgtttgttgctaataagtactcaatttctaaaaactgcggcattaatactcaaaacttcattctttaaacttctgttggtacccactaacttctgttagtttaatagacacgtggacagtctagattattccattttttttacctaataattaatttaaaataaatatgatttgttaaaaataaaactaaatctgaaatctaaaaaccacaacttcattgcatcaccggagaaacccttcccccaatcacacacttgaaatcaagtcccaaagccataaattaaatctcctgctgccaatttcgaaaaaaaaaaaaaaaaa

SEQ ID NO: 102027 - DNA, 607 bp, Cannabis sativa
gaagagcgagatgcgcaactagataaccttatagtgcacttgcttcgagctcaacagaaaatgaaggatgtggcagataaaaagagaagggatgaacaatttgcagttggcaaaaaggtgtttgtcaagctcgaatcttatcgacataaatccttgacttttcgacgcaatgagaaactgtcacctcgtttttatggactatttgatgttttcgcacgaatagggactgttgcctacaagcttgcactactagccacttcctcggtgcatcccatgttccatgtttcacagttgcagcgtgcccatggggtgactcactcttcttcattactaccaccataactcaatcctgatttggatatgatagttgagccagctgaagttttaggtgtacgaaacactcaatctaatggaatgggggaaatagaggtcttaatcttatggaaggacctaccaatgtttgaagctacttgggaaaactacaacaacttgctacaacaattccacctcgaggacaaggtgaaagtttgggcagcaggtaataataagccatcaattcgtatacctatgctagaagatctcgcagtaattgagatgagttatttag

SEQ ID NO: 102028 - DNA, 517 bp, Cannabis sativa
taggggcgacgatgtcgctcccaaaagtcaaatataacaattctgacaacaccttttaggggcgatattttgggtattaggggcgacattatcgcctctaaaaataaaaaaataacaattcgtgttttacttttaggggcgacagtatcgccccaattgtcaggggacttttttgtcgcccctaatggtatttttatgcgcgaattttagagacgatcttttaggggcgacatgtcgccactaaaagacattaggagcaacttataggtgttttaggggcgacaaaagttattcctaataaattgttagcgcaatagtccatcagtgaaagttggacctttcccgatgacaaatgcgctgtgaaaagcgccttgaataaatgacagggttgacttatctcaacggtgaaatgctacatgaaaagtttgcatttaataaattttaactaatttaattttaaattatatattaatggaaaacttacaaaaatactagaatttgagttaatttttacaaa

SEQ ID NO: 102029 - DNA, 823 bp, Cannabis sativa
atgagtgtaattatttggtgggttggagcatgttgaatggatgtttttgtttaagctattttatttaactggtttttgtgtgtgagtttttatcttagttgctttgtggaaccaattttttgtgttaaatttttaactagttgataaatatactgtttctttatattatattgagttattgtgtgttattatttgtctttatttattttgttatggaactgattctttttatatatatgcctcaatattttttgaaattgatctccatttttttaaaaaaaattataatcggttttatgaggtattatgtgttatgagattttttattgtagaactagttttatttttaatttatgtttcagtttttaggaactgatttcccctttatttttttaattataatcggtttgaataattatgtgttatttatttgtattcattatattatataactagttctactttagttataactggttataatttaattataattagtttgaattattttatttataatttataggggccaaaccttcctcaactctaatggaacccaacacttaactaagtaaagatacaagatggttactttttgatcctactacctataggagtttgataggaaacttatttatttaacataacgagacctgatattttttatgttgcgttatttatttatataacataaccagttctacacttcatcttgagggtgttagaacagaggatttcagagagagaaaagaagtgttttattgatttgcatcttatgaatttacaagagtaagattatacttatttataggcaaaggaattg

SEQ ID NO: 102030 - DNA, 528 bp, Cannabis sativa
ggggcagtttgctcggtctgggtactagtggttccagtttcttgcacacctggggtgaacccagttagaggggtagtcactccttgccctactgtttgtgggcttgttggcggctgaggattagtcggatcagggtccgttcggactggatctctaggatttgcagatgtctgcacgttaggatcactacgacaaaaatgggtattcgcgacggttctaataatattttttttggggaaccgttgctaaaaaaattgagtgtttaaaaccgtaaggaaaaatagagtattctcaacaattttaaactgtcgggaggtataggcgacagtttttaaacgtgccttaaaaatctcatcagctatactatagacgacggttttaaaccatcggcaattcccatgcttcaatttcacgcatttcagatctaaaattttatttctcgcatcttaaatttcaaaattttatttttcccattttaaattttatttccctcctctcaagatataaactctccccccctcccccccc

SEQ ID NO: 102031 - DNA, 594 bp, Cannabis sativa
taagatcttggtaaaataatatccaacaagaacttggggaggtaaacaagaagcttattgctgccaacaccaaggttgatgagctgaccaaagagctgtaagatatgccctcggtcgcacaattggaggctgacaatgtttctttatcccaaggggtcaatagcctcaagatggagggagagtctccagactcttcttacaaaactggaggaggatgttaagaacaaacagaccagggagcgggaacttgtgaaggaggtcggagacaagaagtctagggtggaggagctcaagaaggaggtggacgtcctagagacagctgcacttgaggttttctatgatttttagaaggccaatcccaaaggaaactttgattaccttggtgatttcaagagaatgtatcttaatttctgtgcggttcaggtggccagagaaaaccccgaggtgactacctcttctgctcctaccgaccagagcactgaagttcttgtcgtccagaatgttgatcctccagctccttcaaaccaaatcgatccttatcaagagcctgggactcctgttgtctgaacgtctttcttttctctctctctctct

SEQ ID NO: 102032 - DNA, 745 bp, Cannabis sativa
agagagagattgggtttgaattttgtaagaagaatcttctgtagatgaagacgattcttgagtataaagcgtgagagtttgaaaactttgtgagaactcaacaaagaatctcatctcgactatttagtacattttcttgctcaatcaataaagaaggattacaggggtgttctagaactggagtagagccatagatcacatcgatctatcggacttgaactagttgttgatttctttatttttttttgaattttattattttttggtttacatactctgtttgcccctattttactgtcaattgttgtgctcgatctattaatcttgtctttgctaatcgtttgattgtttagagtttcatcgacttgattttgtacctttatatgtaattttcccacaataaataacttatattacattataatatgaactaataatgacaaagttgaaaatgattggagaactcagatgtacaaagagaacaatatgtcataaaaatttaaaagaaaaaaagtagtgctaatttattaatatgcttttgattcaacaatactagagaacgacgctttcatggttttctcttcttttccacttaagtcatatccgagtcttgctttgctcagcactttctagctcatgcacaacagttgatgccttcttgctttgtttttaggtcaaagagaatatcaaataagtaaaattaatagagaagatatataactggtacttgttgtgctaaaaaaaa

SEQ ID NO: 102033 - DNA, 736 bp, Cannabis sativa
attaataataataataaaaaaatacagttgctacagtgcactgcatttatgcattagcactgtagcaaagactgcatattgtccatcaaaatggtgctaccttggagaagattagccattgcatcctcaaatttgaggaatccttggagttgctcttatatattatttattattagaaaaattggtaggcaaagataaattgaaaaaacaagtaggcaaagataaattgcaaaatcctaaacataacaaacagtaggcaaagataaattggaaaaatatatattaatgtatattaacgtgtaagcataataaacataacaagcagtagacaaaaataaattggaaaaattttataaaaaataaatatacacttttcttttaatctttaaaatggtttttgttaaaaaaaaaatagtttgttagttttttgtacgtgttgtttcacttctttaacaacaattttatatataatttagttttctattaatagtgtcatttattttaagaatgtagagaaaataaaaaaatcaaacaaaaaagtgggaaaattaaaaatattaatttttaatatttaattaatggttgattcaaaaaaaatatttaattaatgattataaatatcaactattaaatttgatttaatagtcaataataaaatacccatatataagtaatacccattaaaaacatacctatatatacaatatttattattaggaaagaaataaaaaaaaaa

SEQ ID NO: 102034 - DNA, 1205 bp, Cannabis sativa
  modified_base (402)..(405): a, c, t, g, unknown or other
tgcaactcgttctagtaccacggtattggaatgaggaacatttaagaaaatattaccaataaaataccaggtcggacgatcacactaagtactgaaacaatatttacaattaagtaaatgaactgctgggcagactacgctcaaaggtttcaacaaaagaaaaaaagtactcaggtcggatgactaccatttaaagtacaatttcttatttctgcaatttgttttatttcatattaagctaaaagatcagattagatcaaatagccctgatgtaagttactacggtaacaaacacatgttcgatcaataaatgaataaagatgtttatttcaaaattcaaatttagttgaaatttttaacatgttgctaatttcccatccagtgcgtacaaaaggtttggtnnnncccaaaaccctgaacagataaaaagtatacttgtaagaaacaagtaaccaagagttataagtctgctcggtcacttggtgggcacctacacctgtacaaagcatttgataaagataaaacacccacaattgcacgatgattgtaaacagagaatgaaatccattaaagataaaaaaatcacgtaatagtggggttaaaagctgcccggtcagcccgttgtctgtaaaatgaaaaataattcgaagtttaaagaccgattggccggtcatgatgtcttaaaaaaggccttatgtcccaggctctcggttcagatcttctgggcaggtaggagctggaggatctattgtttgaacgggaggtacatcagaatttttgccggaggtagaagcagccgcctcagtttcaccataaaccacttgggaagcacagaactcgagatacatatctttggcttcacccaagtaatcaaagtttgcctaagggttagccttccaaaagtcataaaagagctcgagaccggctgtctctaaggaatggactttctctcccagcctcatcacctcagctgtaagctcctcctccttacacttcttctcctcttccacacgacgaaggacagctcgaaaggatgtcctttcatcttgaaggttgttcacttctacagataaggtctcgatggtctctccaagtcggtcagaagactagagatccttagtcaactcggttattttcttctgagtagtaaaaagcttcttgttgacttcacctagctccatccgaacagctccaagttccaccct

SEQ ID NO: 102035 - DNA, 521 bp, Cannabis sativa
ttttgaacaattaatttgtatgtttgtagttgtaaaatatagaataatgtatttatagaataaattggatcattttttttttgtaaaaaaaaaagtacggtttgggtggtttacaccgaccaaaccgaggttcaaaacggtcggttttaagataggttttggattggtcggtcggtttttggattgcaccaatccagaccgaaaaccgaattttggatttttatatagaaaaaaaccgaccaaaccgaccgatgatcaaccctatgtgtgattgagattttttttggctgtgatatatttttttttttattttgattttttttaaaaacaagagcaaagaggaaagttcatgtaatcaaaaaaattattttgtaaaattaattaaaggggtaaattttgaaagatgttttattatacagtagaacctctatttaagaataccctattcaagaataacctctaatttattataaaaaaatcaagtcccaatttgggcttatttataaataagaataacctct

SEQ ID NO: 102036 - DNA, 769 bp, Cannabis sativa
  modified_base (167)..(170): a, c, t, g, unknown or other
  modified_base (376)..(378): a, c, t, g, unknown or other
acctcatcataataattataattttgaaataaatggaattaatttttcattggattcttttaaaataaattttgaaaatacacttggtttaaataaaagatcctagatagtcatttttagtaactaatttatattttctaatattaattaagtagaaaaatatattnnnnttgaaaattaatttgttaattaattttagaccaacttaaattaggatatgtttcttacaacttaaatagaattaataattaacttgattttattcaagatacttaattatttatttttatttcatgaaatttaattaaataagcaaaaatatttaagttgaaaattaatgtgaaaattaaatttggaccaacttaaattagaatannntcttagatattaaattagaattaaaaatgatgttaattttattcaagataattaattatttgtttctattttaatgaatttaattaaatacaaaattatatttaagttggaaaattttcattttcagatcaacttaagttagaataattttcaaagcttatttaattttattatattttaataatcattttccttttacataaatttttgaattacattttttttttaaatttagatatttcaaaaaaaaatttcaattttggaaattatatttaagttgatgttatcaaaaatttggcactttgacgtggcatcacgagaatggtgacacgtggactccactttgagcatttgctcggaatgataagtcgagcaggacgcctcgctggca

SEQ ID NO: 102037 - DNA, 506 bp, Cannabis sativa
  modified_base (28)..(38): a, c, t, g, unknown or other
atcaatttttttttttatgcattttaannnnnnnnnnnttccattcctattcctatttctattcccattcctattcctgtatttttattcctcccaaccaaacgcctcctaaaaagaataaaaatggaaatagtcatctaaaagaccattcggaccttactgtactgtgaattagaaaatattttaaataattataatatataattattgtataaataaagtataaatagagtatcaatgctcaataaaaatacaatgaattatgggtgagtaggagagaaaatacataatttttagtgtttccccaatgtacccaaaaaagagtaacaatgcatctctactgttttggcatcgagaaaaagatttagttagtttttttttcgctgtgtatgttatacttattttaagatagggtaaatagcggtataagtacccaaagttttgagtttgtaagcggcatttacccaatgattttttttagtgacataagtacctaatatttgtaa

SEQ ID NO: 102038 - DNA, 715 bp, Cannabis sativa
tccctgtgtcaacagataatcctaccaacaccatcacccgcactcaccctatgaagactcgatctcaaagtggaattagaaaaccaaaatcctatcttgccactaaacatccactccctgaatctcttctcccaactgaaccaaaatctttaaagtctgccctcaataacccaaaatggctagctgcaatgaattcagaatttcaagctctcacaaagcaaagaacatggacgctagttccctatgagaagcatatgcaagtcattaccaacaaatggatacaccgaattaagctcaacaaacatggttctttaaataaattcaagtctcggctggttgcaaggggctttcttcagacacctgggatcgactacgaagatacatttagtcctgtagtaaaaccggttacagtcagaatcgtgttgtctctagcagtcaatgccaagtggtctgtcaagcaactcgacgtgagtaatgcatttctaaatggagatctcaatgaagtggtatatatgtagcagccaccaggttttgtcgacacatccaaacctactcatgtgtgtcttttacacaaagccatttattgcttgaaacaagcccccagggcctggaatgagaagcttcgccaaacgctattacaatggggttttcatggctcgaaatctgattcatctctttttattcatgcctctggtgacacattggtgtatctttt

SEQ ID NO: 102039 - DNA, 578 bp, Cannabis sativa
agaaaatcaaatttcccttatgtaatgtattttttttttttaatttttgaaatagagtttgagattttaatttttaagaattttttttagttattattagatttgtgtgccatttgaatgtgattatacatatatttatttttaatttttttttaattaggttttatatttgagaatgcatatattgtaatttactatattcttagacaaaactcacataaacaaattagaatgtgtctatatataagttggattcgtaaatttgttataaaagtttttttattcgcaaactttacgaaaaatatagtatgtaaatcgatttaccataactaaaacagaaaacaatcaatttcttattacaatcatttaaatataaaataaataataataaaataaaaatatggttaaaatattttaaatttaatttttttatataaaatatctacataatttttctttttattttagtttaaaactaaaccaataaatttaaaaatatcaataatattttaagtattttaaatttaaatttctctatataaaagatttatataactttttttttttaaatatatata

SEQ ID NO: 102040 - DNA, 631 bp, Cannabis sativa
gtttaacttaaaagagcaatttaaacgttccgattatattacttggtaatgtaaacaagataaatcattattatttcatttctaaataattttagtaataacatattacaaatattatttttgattattcttcatttattttattacatttttttattaatttattttgattctgtgtagtaaacatgcttatcattgtattgaaaaccatgagttgttacaaaagttaaaaaaaatttaaaaataaataaaaatctaattcaacattagtaacaggttatttttaaaaaataaaataaaaaaatttgatgtgttagtaaccaattactactatcaatttcttaaaataatgggggaaaaccataaactgaaaaaaaatgcataatgttcaaagaataaaaattccatatatttgttttttgacacaaaaaggtttatatttcatgtaataacgaaaaaagaaaacgcattaatattatttaatcaggacagctttataggcctggattgaagttcatttaggatattgggcttagctaaaagcccaaatatattttgtttgaaccattctaatttaaatagaaaaaatttacacaatatatacttaaaatcatatttttttttacattat

SEQ ID NO: 102041 - DNA, 539 bp, Cannabis sativa
tgttctaaagaaaaagaaccaatgagctctcctttgatgattccgagaccaaatctgtgtctattccgtctaaaaaagagcttctagaagattttgctgtctcctctgacagtgatgaaactgatctcacacctgagtctctattgaccaaatctgctccagtaccccctcatgcttcttctgcagccaaagtcactactgctgccaaaggcaagcagcctatgcaaagttcatgttggtaatatttctccatctcaagcgataaattccagattgtactgtcatgataatcagcgtgattagaatccttatgctacccgaaagtttgaaagtgagaggaattatgattttcatgctcatcgtgtctatggtattgtaaagtttgtgcaatataatcattgggaaaatactctaactggttttgagagatatattgatggaatagtcgaagaattttatgataacatgtttgatgattttcttgatgagatttccgaattctttcgtaaagtgtatgttcgaggacattggttttcctt

SEQ ID NO: 102042 - DNA, 569 bp, Cannabis sativa
tgatctttattaactagtaaatttcattatattgaaatgggttttctgatccttattaactagtaaatttgattatattgaaatgggttttatttagggtaaaaaccccgaaaaatatcttttccatatgtttaatttcctcatcaatgttaggggcctgtgacctagacaatataaattgttgtgttgtttgtgttgaaaaaggtctggagtctgagaaactaaacctatctaagatctttgttatgtagttgctgagtcaacattaatgttcttttggctctgtctctagtgatttcaatccccaaaattcttctagcttaagcaagatccttcattttgaattctctactcagcagtctattaacattgttgatctcttctggattcttgctaacaattaacatgtcatctacataaagcaagaggtagacaactgagcttaagtttttgatgtatacacagttgtcatacttgcttcttttgaaacaagtgttaatgacaaactcatgaaatctcgtgtaccactgccttggtgactattttaatccatagagagattttttaag

SEQ ID NO: 102043 - DNA, 525 bp, Cannabis sativa
ataaactcaaaagcaaaagaaatacaaattacaatcataaattctaattaatattaatactcagttacatttacaccaaacccaacctaatatataacacgaaagaacaaataaagtgatacaattttatttatttagaaaagaaaagtcatgaattgtggctgctatgaagattaatttcattattattattattatattaacgataattaattccatgaaatgtttggtagatatgtgatatttttcaaacattaaatattgtgtgaaaattttacaatgcattgcgtttaggagtatataatagattgcttcaatataaattttcacattgtaaattatttaaattttttaaaattttacaagatattttaaataattaacatacataactatatatagaattactccatatactattttttttaatttttttttctaaatttacggtttaggtttctaaagtggttgcagcactcgctagttgcaaaaaggtttctatgtagaatttcgtaaaaataaaaa

SEQ ID NO: 102044 - DNA, 1327 bp, Cannabis sativa
  modified_base (908)..(910): a, c, t, g, unknown or other
  modified_base (984)..(984): a, c, t, g, unknown or other
ctgaatggaaagtctcgtgctagatggatgccctaattacataataaaactgggtaaatcacatgatcaaaaccctaatcctaagaaacccgaacctacaattttaggttctgctatattctctcgggattacatcaactcaggaaatagggaaacacccaactacggcactgaaatggacgagaattgagaaaatggagcattcagggaccctgccaaaaccggctagccagttttcgaggtactggtgaaaccggctagccggtttccaccagttcaccccaaactttccatttcttgctcaatcctccaccaaatgcaaccatactttccaaaacacctaaacaatggacaatcaatatattccagccagtatttcacagaaaaactcagtaaaactcaacatgccattagagatcaaagctttgagctcaaagctcaaacttgcacaaaaccaattccaaacatcaaaaccagctacaagaagctatattcaactcaaatgaacccaaaaattcaaaccctaaaagccactaactcataaaatcacaaactcaaactaaagaaaaagctccaaaatacaaattcatgggttctagggttttacctttgcttgattccctccaaaatcttgctgaaaacacaaaatgcagcaacaacctccttggttcagggctgattcgaagagagagaggtgaagagagagcttttgtcaatttttggttaaatgccttattttccttattttcccctaataaactaaagcctaggaaattaattccttgctgaaataaaagaaaccacaagtcacctcccgaggcagccaccacaccaacaccaaagaaaagactaaaatgccctccaagttaaaacttaggcattttctaaaactaggggtaaaatggtcnnnttccataaccccgcttaaccccgataatttattttctccaatatttattccactaagaaataagattctaaacntacccatgtgatcaaactagtcatccatcgcatttttcgttgtcgcccaacaaaaattacaaaaataaaatatttcatatataattcataaaataccccaagagtttaataaaattcccgaaactgagaaattataattctagtgcccatttctaacaatggggcccagaaataattaaactcatactcataaaaaattattataaaaaaaaatgtcagaaattagtgctaattgccttcactaatccaaattagtaaagtggtcattacaaaggatatcatcgtttcacttctaaatacctatagaagctacagatttcctatctatgattagcgctcccac

SEQ ID NO: 102045 - DNA, 1114 bp, Cannabis sativa
gaataccgacctagacccagaccgggatccaaacacgacacctggaccaagacccagacgcagacgcatacctgaacctgggacccagacccaggacatgaacctacaccttatctatgaactagacctagatcaagatatgaaaaactcgtacccggactcgaaatcagaccgagaccccgtccccaatcttgaccaagacccagacccagaacaaaacccggacttgaactgtgactaggacgcagaccttagaccagaccagaactgaaaccaaaccataacccaaactcagaccagaacctggaccgagaccttgactgggactgggacttgagacctaggacctgaacctagatcgagacccggactaggacctagaccgggacccagactaggacctagacctgatttggtcctaaaccctcatcgggtcctcagacctgcaacccagacaaggatccaaaccctgacaaggagccgaacacgaacccggaccaagattgggatagagacctagacctgaacccagaccgggacctagactaaaaccaagactcgggacccgaacttaagacctggaacccagacccagaactaaatctaagactcgaaactgaaccaggaccagacctggacccgagaatttaaagtcgaacccacacccagacccgaaacctgccctggaccaaaaccaagacaagaacttcgacacgaacccataccaagaccaaacccaaacccagacccgaactaagacccagacctagaatagaacccaaacattgacctgcacccgaacccaaactcgaacccagatcgggatcggaaccaaagactttgacccaaaactaaacatggactcagatcgagatcaaaacctgggactcgaacctgaacttggacccagactcaggaccctaacccacacccagagcctgatccggaccaagatcgagatctggacccaaacccaaactcggatacaagactcgagcagcgacccaaacttgaaccccgaccaaaacttgaacccaaactcgaactcaaaatcgctattggaacgagaatcggactaggactaagaccaggaccaggaccaagaccgagaccc

SEQ ID NO: 102046 - DNA, 508 bp, Cannabis sativa
aaaagtaggcttttaattattacttttgcaattatgaagatatatttgaattttgggtgtgatatgtataaaatttcatgattttcatatttttatgcccagtaacagtgaaatgcaacgtttggcctataaggtcacttagacaaggtttggtatcttagttttagtggggcaatatagttagataattgcaatgtcgggagcatctagagttatgagtttggaccatattacccctaagttttaaatttacttcatggtgaaggaaaagggcaaattggtgattttgccttagttttgtctttagtaaaagtgagtggatttggtattaatcctttaattgattattaaataatgagctaaataacaggaatatccctttgattacatatagtaaaaaatcacaaaaattaaaagagaaccgatctccttctctctcttgtttggccctaaggagacccaagaaactaggccttttctttgttaaattctgagtatttcagcttga

SEQ ID NO: 102047 - DNA, 581 bp, Cannabis sativa
atataataatataattcctccgttatacataattatctggttagggttttgctaatccatttcttaattctgggtattacaggcagtgatgccttctaaacctggtatccgtctatctaaggaatagtgtcccactaatcctcaagagatagaggacatgagaagggttccttatacttcaatagttggaagtctaatgtatgtaatgttatgcactagacctgacatatgttatgcagtagaaattgtgaacaggtatctgacaaacccacgagaggaatattggactacatttaagcatattctaaaatatttgaaaagtactaggcattatgtgttagtctacaagggttgtgctttaaatcttgtacgctataccgactcaaattttcaggcatgtcttgatgacaggaagtatacatctgggatggtttttactcttggggtggagtagttttttggtgaagtgctaagcaaactgcaacatcagactctaccatggatgccgaatacatagctgccgctaaggctactaaggaactggtctggctaagaaagtgtttgaagttattttaccagga

SEQ ID NO: 102048 - DNA, 813 bp, Cannabis sativa
taatatgaaaattaagtaagtgagatatgacaagtcactaaatagaattataattgttttaaaactcaagtgaaaaataccttatccgaagtaactggagacggtactggtggaccagatgccctgacggttgttggtgatcgtggagaagaacagtccctagcatcaggtggtggtgatggaacagaggtagtatcaacacgaggtagtccaaacgatggtggaggtggtggtttgtggaggcggcggttgttggatgccaaaaataggatgatttttggctatgctcataatacttttgagttgttgtataacaagttaagacatacatatcgtgttaatgcttcctcattacaccaaccattttctgcattccagtgggtgttccaatgggtgaagtgtgtatgtatctaagacattcctaaaaaaagcaaaggttgtttgttaactgcgtccccaattttgttaacaggggagagaaaatcgttaaaatcacccattaaaagccaagggttgttataaacagtattaccaagacgatggaaaagttgccacgtgttagagcgatttttgtggtactgggcctcatagaagccagtgaaagtgaatggacaatgattaggaaactggatgtaacagcgaaagtgacttatattataggaaagtagagttacatcaacatcctgagtccataacaaaaggaagccgccactaaggctgacccgagggacttcaagaccattagcaaaacaaagcttagatctaaatttattaatagcaccaacagggagtttagtctccataatatacaaa

SEQ ID NO: 102049 - DNA, 622 bp, Cannabis sativa
tatttttcatgacattcgcaaataggcatggagagttgacgatgaaagaacacctgagcagctaaggttgtgttgggagaaaaggacatcacagatttatccaaatttaaggattggcccgaggctttatgatagagatccaacactcttttaatggctaaacaagaaccttcatcagcttggtaaaacaacaaactgtcatccgcaaagaataaatgagagactggcggagcattccttgttaacttgaaccctttcaaatgaccggtaagttgttcatgatgaagtaatcttgaaagcccctcagaacaaaccaaaaataaatatggcgagagcgggcaaccttgtctgagcccccgagtaggagctagagtcccagtgacttctccattaattaaaaaagagaaagtatttgttgtgaggcagcccattattaaggatatccatcgctcggcaaaacccattttcctcataacagcttcaataaaacaccactccacccgatcgaacgctttgctcatatcaagtttaaatataccatattttttttttgtaagaaaatgtaaaaaacttttaaagtgtaactacctctatacacaatgaagtagaattttaattatct

SEQ ID NO: 102050 - DNA, 572 bp, Cannabis sativa
ctttaatgtacttagcttccatgatatgtctccataggctatccttgtccgttagaattttccaagcccatttcatgagaaaaaccttgttagtagcctccgttgatctaaagactagatctccatgaactttaggacaacacagtttctcccaagcaaccgagtgcaacatgtcaaaatgatagtaaaaaaatatatacttctcatatgttcaaatgattaccttgaaaataaattacaatggtatcattttcaaaccaaaataattagtagtgtaatgcgaaaaaaaaaaattgaaataatagaattgattgaaatagacagaaaaaaatttaataaaatattatagaaagttataaacccatatactttcttcacatgtggaaagagaaaaaaaaaataacaacgagacgaattaattaactgaacaagaaaaaaaataaaagggagagattattttgatttagcggtaataaaagtacgctatatagatcaattaaattgccttagttattttaatattacacataaaattaaatattcccttatattatattgagtattcactcctc

SEQ ID NO: 102051 - DNA, 770 bp, Cannabis sativa
tatgtggcaggcactcttgactttggtttgcacttacaaaaaggttccactctggatatcacagcattttgtgatgctgactgggcggctgacccagatgacagacgctctacgacagggttctgcatctatcttggtcccaacctcatcacttggcagtctaagaaacaaactactatatccaggtcttcatctgaggctgaattcaggagcttggctgctgtcgttacagaactcacatggcttcaatctctcatgactgaactcaaagtcaaacctccctcagctcctacgatttggtgtgacaatctcagttcagtcatgatggcttccaatccagtgttgcatgcctgaactaagcacatagagatcgatctctattttgtgcgtgataaagttctcaccaaacaaattcagatcaaccatgttccctctgaacatcagctggcagatgggttcaccaagcctatttccagtaataggttctctctaattcgtgacaaactcagtgttcatagctcttcctcactgagtttgaagggggctgttagagaacctataccaaactgtccagctgtcacttgaagttgtattcagttaagttagttagttggttttccaactaactttctgttacattgctttgctttgtttgtgtataaatacttggttttggcatctgttgtaaattgtaacagaattgaataaacacttctttcattctttcctcttctttcttttctctcaattctgttttctaagtttcttca

SEQ ID NO: 102052 - DNA, 643 bp, Cannabis sativa
atgaaattaattagtaaagtatcaacgattacaaatgtaattgacttaaataaatttagactccctctagtgatttgccgcaaatatttataatctaccttgctaatttgatctctgaaatacactaaatagtgaactctcttaagcttttgacgtgttctcacttccttccaaagtgagttttggaaaactcttctcctgaaaatatgttctcacttcttcccgaaattagacttagaaaagtcttcttccgaagactaccacttgctcaatgattcttttcaacctataatattttatgaacaactagagataattaccaccaaaatttagttcaacactctatgtttttagaaaaaaatatactctcctcgcaaaactaaaatatagaaatatgaaactagaaaaaataatagaaaaatttactctttaagttctatttatacacttattcaaagacacttgcaacacatttttactgttgtagattttttttttttaaaaaaaaaacaataaaacttaaaattttctaaatttgcagtaacagaattgcaagctgatgcgacagatcagtcaagatcatcttttgtttccatataagtctatagtcacaattttagctccaaaatctatcataaaaaga

SEQ ID NO: 102053 - DNA, 639 bp, Cannabis sativa
aattacaatggctttcaatcaaaagaaataagtacttttttttgttccttcacaaaagcaaaacaaaagataaaggatagacggagaaggcagaacctgggtaacgagaacaagtgagcgaacgaaagagacgccattgaaggagctagagagagctaaatctcagctctttctcttctgggtaatcctctttggcaacgaagagcagggagatagtgtgggtttaagacgtgttttagcggtatgatgattgagtctctgcactgcgggggctttactgtattgtcaaatgacgaaaacaccccttcgataggattcacttccttaaaatcaacggtctctaatatgccacgtttcttagtacttttagtcttcttcttcttcccacgcagcagtgttgtatttctatctataaattctctcttaaaaaaaaagttataaatgagttacagttgaatcaatatttaagaatactctatttaagaataacttctaatttgttataaaaaaatcaattctcgatttaaggtaattataaataagaataacttctaaattgtaattaattatacattttttaagtaccctattaacaaagtatacctctatataagaataattacatcttaataaaatata

SEQ ID NO: 102054 - DNA, 875 bp, Cannabis sativa
  modified_base (809)..(838): a, c, t, g, unknown or other
tgatagtatttatatcgcctaaaataattatttatattctataaaaaaaatctaaatgaatttgtatattattatatccattaatattaataatggtatctttgaaatattatataaatggaatattaaaaaaaataggaaattaattaaaaaataaaataaaaatagatttagtgacacttggggagagttcgtattatcttttagagtctgacaatttgggactataaaattctatagtgatgcactttgagaatctctaatacgttttagtgacgcgtgttgagcgtcactaaataatacatttccagtcacccacattagtgacgtgcaatggagtgtcactaaaaatatttagagtctctcgaggcgtgtcactgaagcccatttttgtagtagtgcgaaaggagtgaagcaagccatcaaggagctgtatcaacatgtttggccggccaagagaagcctataggccatccagggtgagcttgtatggctggccagggtgagcttgtatggccggccaggatttgggcgcaagttggccagctaaaaggtgactttcagaccaagagagcttccatttgatcaagggaacctagcgtctacaagaaaaaggtgtacaaagctagcctcaacttgcaaaaggttggcctcctcttggtaaaggtgacagtaacattacctaccagaccctggaaggaacatgacctgccagaccctagtagggacatgacctgccagatcctagcaggagcatggccgacaaggagtgacctggcaaagtggtgttgggttttttgccctaaatnnnnnnnnnnnnnnnnnnnnnnnnnnnnnnattaataaagatcagaaataacaagatcggaagagcg

SEQ ID NO: 102055 - DNA, 756 bp, Cannabis sativa
atataaatttggaaaattactcacaaatcaccaatgtgggacaaaactagtacggtaccaatataccaatgctttgattcaacttgtgggggagcggtgcccattacttttttagtaatgacatgattggttagcaatattctttaaaagatattatattaaagagaaatgctaaagagcaccagtggtgcctaacactcttctatgtgtcaatatcgctattggtccaattaagtatcggatcccatataatttaatataatagcttttaaggagtattgctagtcaatcacaatgcgacatgtcaagaaggtgctaggcaccactggtgcctaatagcatatagaagacgatacttaattacaccaataacgatatgtactaggcttcagtagtgcctttaaacattgagaaatgttaaaatgtaccattagtatctagacttttgtgagatataatattataattagtgcaatttattattaagtttcatttattttaatttaataaattattaaacaattataaaatatcattttatagtggtatttggcaaggtgcccgttggtatcattccaatagttgtccaagagtgaagagtgaagaataatgtctaatactatttaaaagaagtgacgttttgtgattagttagcgatattttataaaaaaaattattgcattaaattatataaaatttaatatttaattgtatcaatagtaatatatcatattagaaggtattaaacactaatat

SEQ ID NO: 102056 - DNA, 637 bp, Cannabis sativa
aagggtagaatttgtgttccgacagatgatcagatcagaagagaaattcttgatgagttccatactactccgtattccctacacccggggacaacaaagatgtatcatgacaccatggaaatatattgccggccgagaatgaagagtgatattgttgaatacgtttcaaagtgtttaacctgtcagtaggttaaggctaaacattaaaggttggcaggtttactttagcccttgagaatatctgaatggaaatgggaagacataactatggactttgtagtggggtttcctaggactactgggttatatgattccatatgggtgatagtggatagatttaccaagtcagcgcactttttacctgtgcgagtgacttatactgtggaacagtatgttgaattgtacattaagtaaatagtgagactccatggtaccccaaagtcaattgtttcagatcgtgatcccaaatttacttccaagttctgggagagtttacagaaagctatgggaactaagttgagattcagtacaacttttcaccctcagacagatggtaagtcttagagaaccatttagatattggaagacatgttgcaagcatgtgtaatagattttgaaggatcttggaacaagttcc

SEQ ID NO: 102057 - DNA, 925 bp, Cannabis sativa
ccccaatgttaactttaaaaaggagaacattcactctgtaccaatttgggttcaattgaagaatttagatctgaagtattggggagaacaagtcttattcaagattattagtcaagtgggggaaccggttatggtggatgctttcactaaggccagggagaaattgacgtaccctcgaatactcatagaagtctcaatgcagcaagaatttccagaacaaatctggtttgaggatgagaatgatgaggagactgcagtccttgtttcttatgaatggaaacctacgacttgtgcatattgcaaaggaataggtcatgagaccaaggattgcaggaacaaggaggggaagaaggctgaatgggtagttaaaaagcctactgctactgctcatgtgcgagaggaaagagcagatgaaaatggtttcataccagttaagaaagtgtggaaagaaaagaaaaagactctagctactaaagtgcaagttattaattctttttctcctctgcaggagtcttttgaagaagccacagaacacctgaatgcagttgattcaggtataaccagacatactacatagcagcaggaaagtggaggaagagacactattaacattggggaaacaggaggagggggagtacctcctcttcccaatggataaaatagtgagttggaatgttcgaggagtcaataaccaacacaaacaacaattggtgaaatagtttttagcgactcaaagtgttggtttggttgggcttctcgaaactagagttaaggtttccaaacttggagccttatactctaatgtctttcaagggtggtgttttacctccaacaatgcttggcattctggagggcgaataattgtagggtggaaaccaacaagttttatagtaaacatattgaagtgttctagccaatttatcca

SEQ ID NO: 102058 - DNA, 536 bp, Cannabis sativa
ctcttttttcttccaaaccatttcatttcgcccatcccaaatagcccaacatagagcatacattagtaacctgttggccgtgttttccccagtaaaaatgagtacaaaccagtcataaaaactgtctataccttcggttgagaggcttccattcgatgatctattcctggtgccaatacccactctattccacacaacctgcacctttggacatgtaaacaaagcatgaagtatggtttcttcatctccctggcagactggacaagaagcataaatataactctttttgttcgaagctgacagagagtaggaaggcagtttctacatgctctccaaaccaggtttttgattttggggggtagtttaagacgccagaaagaagaccaaaactttgctgcagcatctgggttgtcatgccatcttccatgatcaacttgcaatagattatacgcacttttgacggagtaaatacctgaagactcaagcttgttggattttatgccctaaataacactctttacaatctgattagttat

SEQ ID NO: 102059 - DNA, 750 bp, Cannabis sativa
aaagcctgcattaataccttcctttagctttcaaaggtaggggctgcatctgaacaggttctaagttgtctttattattattattttttttttttgaagactagtttattcaaagaaaccataactcatgtcttgagatcattaatacacatcagcaaaccagctgagaaaaaggcataaaaaatagagaaatgctacagggcaccagtagtgcctaggaccctcctatatgtcaatatcgctattggtctaactaagttttgaatcaggttttatataatttaatataataacttttagggagtatcattagtaaatcgcaacacgacatatcgagaggatgttaggcaccatggatgcctaatagcaattctctaaaaaatattgtttgtgtttcctgggcaaaagtggctaaccaattagctacttgttattcagtatgtaagtatacgtaattaaatcaaattcaataatataatagtaaaatattattttcacgattgattattaattaccaaataattattttttattttatttgattaaacaaaatttagggtttttagcaagagataaaatatagtaatagaaagacaatcaaaaattaaaaattagagaaataacaatgagaaaaataaagattataatgattttcaactattttttttaatttttaaagtaattattcaaaaattaaaaattagaaaaataacaatgggaaaaatgaagattataatgattttcaactat

SEQ ID NO: 102060 - DNA, 745 bp, Cannabis sativa
tattagacttttaaattattatttctttacattaaaatgttatttgtatatataattttcttatatataaatatgtgtggattggatttgatcggttatttttatatgttcatcaacattcaatccgcacaagtgtggattttaaattttccaatccaatccaattcgcacaaatacggatatccacactttgcagattggattggatcgtgcggattggattagatcgggtattttatgaacacccctaaggattattaataaattaatatgagattattaccttggattatagcatgtcaatggtgagatcaatttttttttattgaaggaccgaactccgaaggtgtattttttatatagtaataatgaaggaacaaataaagttggaaaaactataaattcctactacaaagcctctagtatcaaggaatagcaaatattaaaaaaatcttaaaaaccaataatgctagcaggatagtacactgctttaggatatatatttaaccattgcttttggttttcacaatttgagcttatcattttttgtgaaagttttgaataatgcttgcataagacagatcctttcagactcttcttcttctccctctcgacatgcacagtatgaacaggcttccttcctcctctgcaatgcgttcacacgcttcaccttcacgttcccactctgtggaacctttgccaagccccagatccctcgatctaggtggctccgatccatcttcca

SEQ ID NO: 102061 - DNA, 763 bp, Cannabis sativa
tattttatttctttggcatatataatcaatttctctacaaaataaaacaaattaaattaaaactcaatatttccatatactagaaaaactaagtgtgcgtttttctatttgagtttgtggttgttttgttttttgacactggtttggttttttgagtaaatgactccttataaaaaaaattggaggagtttagccttttttttaaaaaaaaaaatacattcaacctattttaatttttactttaaaatatttaaataaaaaaactaaataattaagtgtaataattttaaattaaagttataggtataataaaattttaattatgaaattatatgtgtataatttttaattataaagagttttgctataaaaattttaataatttaagggcaaaaaaattgttaaaagattcttttttaataataaagtatgaaaaattaatttaattttaaaatataattaatcttcattaaatttttataacgaaataaattattaagtgactattaagttataaattaattattatttatttttatttaatttccaaattaatcacaatcattcaataataatttaatggctaaaaaaaatataaccataatgattacattgaccatttttaatgtaactattaaaacctcctccaatatatttataatgttagtaaataaattaggatgttaagttttcatgtgatttcaagatatatttattattatactcttgctatattttattttttatttttatttgtttaatt

SEQ ID NO: 102062 - DNA, 636 bp, Cannabis sativa
atatatatatatatatgtttaggatttttattaatttggattgtggcttagtgtatataatatatgtatatacttttattttttttgcttgggctaggctgaacggtgcgggttgggttcattgggttagaaaaataccaagccgaaattaacccaatagcagcgggttatatttttatcaacccatatgtatttcggccataaaaaatgaccatgcttcggcccattttgggttgggttggccgggttggtcggcccattgtcaacccatgctcagccctattcaaaagtttaagtcccatggtttgtcagttcactggatttagactgccatgataattggcgataaggtatacttaccccttggataagtgttatgtcctttccaggatattggaaaagtttaccatactcaggtgtatggagtatacattgaattagatcgatattgaacttggacaagatatcataaacttacagttatatctttctaagtcaatatccagttactcttgttcatcaatctgcgagccatcatcaattccacctcgcgagcattggaaatgatcttattttaagcaaattgaaatatatttttaatgaacttgacatcttatatatattttcattgcttac

SEQ ID NO: 102063 - DNA, 1159 bp, Cannabis sativa
cggtgctgctgcttgagcagaatcctctctacaatgcggtggtgatggagtagagacattggcagcacccgacggttgtgctataggatctggtggagtatagacattggcaagacccggtggttgtgctactaatcggaggcaaggtcaacatgggagttgttcatttgatgctcctccaacaccgaaaccagacacaacactgcaatgctgggaactaataagatgaatgagctcattcactttatcctacaactttttgttgctttcctctatctcacgcacgcgtctctccaaatcagatgatgtctggtttgacccatcggtgtttttccttttagggcgtggtgtgttgaaatatttggtttgggtgatgctgaaacctattgctcgaacccggccacaatgctcatctggccccagagccatgtcaacacgtccattttaccttctacttgtacaacaccctctttcacttgcttactatatacgtcctataaacataacaaatagagttagaaataaattatgaagcataacaattaatacaaatcaaattaaactaacttacaatccgtttaatgatttctgcagctgggccctccaccttgcctttcgtgttcatgtgaagtcttttccaaattttaaatctatcaaattcagtaatttggtggcctgcctctttctccatttgttcttgaaccatccttacaccacctcgtctggtgcaatggttgtaaatattataagccctacttttttgggcctttttcctcttcacctcaaattatggacttaatctcgaagcgacaaactctctctattattgcaaatcaataattttttataaagtttgggtggcttatcgagaagatggggagccacatctttaaatgtaaaaaaaatttctgttagggtattttccaatcttttcacctctctccacttttagaaatggttaatttcctatctgtgttcggtacatcgaacgcggcctatcaaattgacaatcgtaattataagtacaaattataattagtagtaaagaactcaaataataaaattaatttcaccttcatgtatttccatagttggtttttaatgtcctgagtcactctagaccacgaaatgtcttgaagtggaacattaattcgcaccc

SEQ ID NO: 102064 - DNA, 814 bp, Cannabis sativa
gtatctaaatactatgttttaaaccttggtcgctctgataccatgttgaaatgccctgactctcagggatgccacgtgtgtgtgcttttacaaatttattattactaatcatttaatttagtaaaagtgtggtttaattaaaaaaaaaaataattgaatttaaaataaaactttacaaatcaaatactattggaatatgagaatcccctgctaataaaatttttttacaactaatttacaaaacatctaatacaaaatcaaagttatatttccaaatataaaaaaaaaagaggtcaatccttcttccccgaagccaagacaccacggctgatatgtacactgctgggagacctctgactcatagctgaacacctttgctatacttcttacctgcaccatgaagcacctgtgagtcacaatggctcagcaagaaaagctactagacaatagtatagtaagtactagcattacaacataatatacgtatcagtggatcaatgcatattcaacatgcgtatacatatcagtacgtctatacgaacaccctcataacacagtgtaagattaatcatacagctcataattaataatttcacctttttactaagaatacattcatttaatccatagccatataatctcagtgctttgtaaagcactctagtcatacatcattgtaattacataatttcgatactgcactaagcactctacttaaacaatttgattgctatgttgatgacttagcctagaaatttcagactaagataatatgtcacaactaggtattccccaaaacaatagtaagaggtta

SEQ ID NO: 102065 - DNA, 810 bp, Cannabis sativa
  modified_base (758)..(767): a, c, t, g, unknown or other
ttaaatataaataaaaagtcacacccattaatttctcataaaccaagaatttagttatataggcacactttatatagaataaatatttgtaggtcttttccttatatatatttaattgagacttttgcattgtaataattaaatatggccactgagtaaaatcttaaatttggttttggtttctatctcaaagtgtaaacgcattgactaagttaccctgcttatcgtacgtcctcgtgggatattatagggacatataatataatatataaaaataaaatattaatagtcctttaaatatgcgagagtgaccttctaaacaaaatctatttacttatttgacaaaaattgttgttttagcgatccttttattttttttattaaaattaacgtttaaaattaataccattaaattaattaattatttttaaaaaagctaataatttgaatatttattaaatttaatttaaacatatcaataaaattaaataattattttttatatataaaaagtttaatttaaatttgaattagatgttaatttaatttataacaaatttattaattatattatttcagatatataaacttatttacttattttattatttaataaaattagttaaatatattttttataaataaatttgaaatcaaataaaattttatatatttaaaaaaaaaataattaaatcctattagatttaatacaattttttttaggctaattagaatttttgcccctgaattttgacatnnnnnnnnnnatgcccctgaacttttaaggttgttgaaaatgccccctgaact

SEQ ID NO: 102066 - DNA, 612 bp, Cannabis sativa
gagtgcgagatctttgccttggcttaagggttgaagtcatgacctgaaaggtcttacttgacactgccttggtttagtgtcgtgagttcccagattagggcaacaaatagatccattgccattttgcagataagatagcggagcgcagttaacattcagaaagaaagtggtacttaaaatcctacattaagaactctactatgcttgaagcctaacagaatttgcatagtgattccatcaaggaatacaatttacagaaatatctgctttttatctttatttgtgagatcaagggtttactttaggcccttactttataattttcatgttctttactgtgttgcaatatgaaatatttttaagtagggtacttagggagtagcatgtatgtataaatagggagaagcataaggttttcactcttctctataccatcaccacttctgaaatgcacatagcacagacctttggcatttgatggactcacataccattactctcaattaaataccacgtaccgtgattgcaaactttctgaccactaagagtatctccaacaagggttgcttggaagagtgcttactgatatggcagaatgcttggagagagcta

SEQ ID NO: 102067 - DNA, 652 bp, Cannabis sativa
gatcaccattaaatttgttcgaagacttgcatgccatccttgtccttgacctttttcctgcgagtttcctcccacttcatcctctcaaagcaatccttacttcgttcaaagatttgtagacggaattaccaggcattgccccaagccctaacttcaaacagtaagttgcttacttctttcttatgtttgttacactgtgtggatcagttacttgatttgtttgtatcgttatcatctcatctggttttggtagttttttagggtttaaactgttcatactagggttcaggcactatgtaggttgttttaagatctctaactcattaccttccagtttgataaaattctctctagggtctgggactggtttttgattgcagcaatgtcccactctggttcaagaatttatcgtccaaaagttttagagtttgagttcccttcataatcagccatcccatataaactcaacccttcacaacccacctccaaattagagttaaacgatgctagggttagggagcacatagtaagaacccaacaggaagataaaattcctcaggatcgcaatgtcaccttcgaggctgagttgatagaatcaaaggcgcgttctatctcaggctacacgggagagatgctgaaaacctgtggaatc

SEQ ID NO: 102068 - DNA, 1039 bp, Cannabis sativa
ataataaattatatatatgtataacaaaaacaaacacaacaaccccccaatatcgtcccctctctctctttctctttctttctctctcttcaatccacaaaagaaaaccacaagacctcatcaccggcgtgactccagtgacccatctccagccaccattcggccccacgcgtcggaccattttaatctccaagagccggtgacctcaacccccaagcggtgccactcctttcgccgccattagccccggatcacaagttaaagtttggcagttcaaactttgaacgaatttttcggccacctccggtgtccctttgacgagccgtcttcactactagactcagctcatcaaggagaacaacctacactaagctattttgcccaactcgctactttttctagtgacatttttgtagctccacccctttccggtgactttctggtgatatcgtgtaccgtgttgataaactgttggcatgggtgtgatctactcatcgaggtggtcattttgatatatgctacaaaaaaataattggcgacatttccagtacactgatttttatcgccactgatagttaatgtgcaccgcttaggtgaggtttcggaactccaaactttaaatatagtcatattatatgtcgttggacttgattttgaatgtaaaatgcaatgattataattatttagctatttgatggtataggtgagagtaatatctaagattggactaaacaattgaagctcgggacttgagagcttaagatcgtcttttggacaaaggttaacgactagggagaggtagggactcaacttaattattggacttgatttatttatgtgttgtatagcattagacatattctaaatttttatgatttgcaaattgtttgaaaaattaaaaacttaatctacatatttttctggactgttctggggcactgtgagcttaatatatatttgtacaaatatttatgcaggttatgatttttgggtttattcaaaatatagtcgcaatgctgccgatttttttttttttttt

SEQ ID NO: 102069 - DNA, 698 bp, Cannabis sativa
tataaaaaatatgacctcccatagtatatttgtgggggattagtttatgtttatatatatcattaattactcaatttacataaaagaaaaatgctaaaatatacttatatatctaacatcattcttagtgtcatattaataatagtgtaattaagtatcgaatttcacataacttaagataataacttttaaaaaaacattactaatcaatcgtaaagcatcacataagtggtgctacacaacactggtgcccaataaaaaaaatattaaaaggcactactggtgcctaacactttcctaagtttcatatcgttcttggtacaattaagtattgggttcatataattcaatgtaataacttttaagaaatattgttaaccaattgtaggatagaattaatgcccctctagaaggtgttgaacaccaatggtatccaatatcaatgctctgagaaatgttaaagggcaccatatgatgtctagcatccttgtaaggtgtaatattaattttagcacaataatattaagtcccaggtttcatatcatttttggtacaattaattatcgagttcatataattcaatgtaataacttttaaggaatattgctaaccaattgtaagatagaatgcccctctagaaggtgttggacaccaatggtatcaaatatcaatgcttagagaaatgttaaagggcacca

SEQ ID NO: 102070 - DNA, 507 bp, Cannabis sativa
aaattattattttggccctgtttgactagttctataaataataagtataaatttttttgatttatttttacctttggataattattatattggataattattatatgaaaatttttttttaatgaaaaatgtttttcaaattatttagatattattaaaaaaaaatattcggtaactaaattagaaaatatgtaaattattttaatttttaaaatgtacttttgaagaaaccacaaattctatttttttaaaaggactttttatattttatccaaacattctttgaaggatttttttcaattttaaaaactttatagaatgtaagtcaaatagagttaaaattatataatttttgaaaattcatgattggatttgttatttaataaaataaaaagtggaattgataatttttacaacacttacttttacatttaacatttttattttttagatagggtggacgctaaccctatatgtgggtccgtccctatgtatatataaattata

SEQ ID NO: 102071 - DNA, 652 bp, Cannabis sativa
agagtggttaaaaaggtgtgggagagagtaggcatcggcactactctgactgcagctgtcctttgtgcgtgaatgttttcacgcctttgacagcagaaaaacaaggtctggctgctgctctttgttgggcagtttggggagcgaggaatgatgttgtatgcaagggaaatcgtttaatagttcagctatagtcgcctctgctaaaagctatcttgatcaatggaaatacgctcaaaaaactcaaattgagtcattatggtctgatcttcaggactatgatgggatggagcattggcttaaacctcaggacaatagtatcaagatcaatatgggtgcagctatctttgaaggtattgatatagtaacagaatatggttaagtagttagactattagaggttctgttagagagttagttaagtgttagtgtactcatgttattataaatatctacacttgtattaaaccaattcagtacagaaataaagattcaattcattctcttctactacttcatttctttgtttcattaactttgttttcagctcaacttggtaccagagccgaaggtgaatatccatggcgtccttctccggtgaagcatctcatcagtccgtagttccaaccacgatgttcgttcctccattacgact

SEQ ID NO: 102072 - DNA, 588 bp, Cannabis sativa
caaaatcgcaatagctttagcttttcaaatatatgtagaatgtttcctactgttttgaggtcttatgcaaatgttgaaaatggggttcgaaattaagatgactgacctccttaacagtctccgcaagctcaagcatagtaaactcacctacaaaatcaaaatatcagtagtgaaaacacaacaaacaaagccaattcgaattatgttgtcaaagatctttctggaaaacctggatttccaatgttaatgggcccagtgttgtctccttccataagtctaataaggccatcaaccttcaacacaaacaaaagaaagaaataaatacaaaatataagtaaacagaaatcacagcaatgaaagattttgttattgttcacaattaaacaaaggataaataaagcttgcataccatgtctgacacgtaacagaaactacgtgtctgtgttccaggtgcttgaacagtcaatggctcaccactatatacattgaaaaatatattagacaaattggatgtgcccaataaataactatctgagagagcagacaatagagatatatgtgaagcattggttaagaactaatgaaacg

SEQ ID NO: 102073 - DNA, 546 bp, Cannabis sativa
agttgttatttcagcatttggattcgggtacttaaaacatacaagagttcctttgaatgtaaaagcatagaacttgcccttataatgcgctacatcttcaaatcctttaggaaattgatcatctttaatctttttccatattgtgtctttcccaatatctaatgcaagccaattcaaacagttgtccatatatcacaacaacaatgtactcatcattattggttaatggactagttgtaattaaagccttaattacatgatattgctttcctccataatagtaatcttcattatccccacccctatcaccaaggttgttatttgttttcttgccacttgtactctgttcttacaaagtttgttattggcttgcattgataagctttattgttccagttaggaattgcattgataagcttctgtttcatagtatcaaagccatattcctagcgggctttcgatccacacctatccagatggttagctagccgcacgagatccagatggtgcaaaagacacttaagatccgaacaaaaataagcgagc

SEQ ID NO: 102074 - DNA, 550 bp, Cannabis sativa
ttttatttactaaaatacctcttacacatgttatatatgactatttcactcaaagttttccctttttttcctttttttttttttcatttttttagttttgatattttgaattggattatactcataataatattcagcttctccctcttaatttctccacacgatttcaacattgatctttccatcatctcaacttcctccccacgatttcttacatgttttgttgttcttctacaattttctatataatggcaataactgatccttcatcatcttctccattcctgctgcaaaaaaaaataaaattcttgttaaacatccaaaagctccagatatgggtgtcaaatcggttggaaaaaaaagttagacgaaaataattttgttgcactcttacctaaacagaggaaggattctggttgatttctgatggtaaaatgggaaagaaacaagctactcatttgaatgaggtttgtttcaagttttttttttctgctctaattttgtttctatcacttttagatgttgctaatgttttttattcacgttgttt

SEQ ID NO: 102075 - DNA, 635 bp, Cannabis sativa
aaaaagtatcaagtacctttcaataatgtttgtcttatatagggagctaggctggcctcagcctactccctatgagatcggatattattttaatttaaatttttcattgaagtagaataggtttgggtacttctacttcagtcagatcggtcaccaatggttgggtgacactaatagtgtagccatgctctaagttggtgggtacgctaagaagtactttattgcttatggccttcagaggattggacactacgagttctagtgggtgcaattcttcaaaagctctatcctcatattgtaaatgagggatagggagaaccacgtcatgtctctgttagtggagcagaggaacatactccagttgagcagtgtcgccaacttccaaaagtatggtttgtatcctcctacttttggagttgcgggagtctcaactgcagagggagcctatcctagagatggataggttccttaattggatgatgatgtgcctttgtcttgcattgcatagaatctagagaggaaagagagggccttccaccggtgcttggccagcagcggtcttgttgcttctctccagatcgggcctagaggcccgacttttgagggacctgctcgccccttgcctacatctagag

SEQ ID NO: 102076 - DNA, 702 bp, Cannabis sativa
gtctcatgacacccatctcaatcactatcttaacatcattctatgtgattgtcctggcatatgcttcttaatctgggtgagaaaataaccatctcataacaatcaattactgttgaagaaagaaaacaaaataaatgttagaaccctatcgaaaacatatcgacaaccaatcgaaaacctatcaacaaatatacataacacaatagaaggaaataaaagttatcaatgatattaacaaaagttaaacaatacaataataatagaaataaaatgtaaacatgaaacaaaaaatgcaatactaaatcctatcgagaacatgttgagaacccatcgataatcagtagacaatcaccaaacatgacagctaaaaaactaattcttaatcctatcaagaacttgtcgacaatatatcgataatcaagcaacaataatcaacataacaataacaaaataaaattctcactcttatcgaaaacctattaataacccgttgataataacaaaatttctttttttttttttgtaaaacttgaactatcgataacatgtcaagaacttctcgataaccagtcaataatttatcaataatcaagcgagagtaaccaacataatgacaataaaaagaattctcactcatatcgataatctatcgaaaacctgtcgataatcaatcgataataaacaaattctaagctttttttt

SEQ ID NO: 102077 - DNA, 1081 bp, Cannabis sativa
caattgatgatagaggaccaagcattgtacatgaagataatggggtctcaagtgatcttgtgaaatctctgaaggtataaatttccgctgagaacaaatattcattttagtctaacctatttgggtttatttatgtactcagtcagaattgcctcttgctgatactctgtgcttttctaggtgaacaatttagacaatccaacacgaactgaaaacttgtttgccacagcaaatctagaaaagtcatatgatatttctccatacaaatgttcagatgatgaagaggaagaagatgatgtacccaacacaaaatttgttccttcatgggctcggtatgcaaaatttgctttgtctttggacctttttcatttattagtcatatgattgaaaaaagttcacattattttttaacagaaaatctagcgtggctctgattgtttcctcacaagaaagagtggatccactgaccatattccccccagaaagcttttgcagtatagatgaaggtaatgaacatatagtaatatgtttagtattgttgttgagtgtttggtattgataatattgattggagtaaatgacaaagacatttttgtttttatagttgttttgccaatgaagatttaaattaagacaggtatgaatccattaagtttctttcccttttcttctgccagttaaaaaactgaaagatcaacctcttgcttttatttttttggggggtttaatggtgatgatggttttttttgttttacataacagattcccagagaaaattttgtgaatgaagattctgtacatgttgtagatataccaagagcttctctttccacatttctaaattatggactctgaaaccaatattaatccaggtaaaatgccccttaacttattgttagttcttctagctttgaatctgtacctgtataatgtatatattaagatgatttgatctgatagggaacactttgtatgattttttttcccttaagaatgacttgacttattctttgaggccaaaaccagtgtgatcttatttgttcccaaaagattttgtcaaatgttggaaaaatcaaatctt

SEQ ID NO: 102078 - DNA, 500 bp, Cannabis sativa
tattttcacatgagaattactatattatcttcacttatataatttaaaaaaataatttttaaaaaatatcattaattaattatagagcatcacttataaaaaatattaaacactactattactaatatctcctaataatgttctttatttattataaccaattttgtttggaaaagaaaaagacagagaaagagccaaatatgaaaaagaaaaagtatattcatcccaaagcaatattggtggtcccatagcaaaatgggtataatatgatattttctaagataatatttcttatttagtattttaaagcctttaaaccatactcataatatactttataattagctagtagtttttttatattatttattaaattaaaatagtgtaggatccacaggtttttgtaacattttttgatagttttgttaccttttacggggcttatgtgcattttatgccttctgtgccatttattatagattgtccctatttgtttagag

SEQ ID NO: 102079 - DNA, 586 bp, Cannabis sativa
gactaaaaaaatttgtcgggtgccgaaacaaataggaatagattcgtacattacttttaaaaatgtgcattataaaattttccaaaaaataaaatataattttacaaatacaataatataaatattaactaaattaaaaaaaataaaaaaaaaatgtcgtgactacagtgcacggcatatatgccgtgcactgtacataaaacatcaaaatgctgcatgatatgcagcctccttggaacatatatacacaccataccacttatttgcagcctccttggagctgctcttatagttatttaaaatatatattttctaaaattttaagaaattttttgaaaaaaaaaaatacgctgaaaataggattcaaataatgtattgcatgcgtgactgttttattttatatgcatatgaaatagattattcgaaccctgcaatctatattgtaaattatttttaattttttaaaattttatataatatctttaataactctaacatacacgaaaaaaaaatagattataaattttttttaaatatcaaaataaataaaaagatgcactagtatattcattttaagaaaatatat

SEQ ID NO: 102080 - DNA, 666 bp, Cannabis sativa
tgattgatgtttgtgaaattttggaaaaaataattgattttctgtttctagaattatttttattggataatttggaaaaaattaagtgataggaggccatcgctgaagggcaatgtgtactagctattttataaattcctgctcggtgaaacgatagaggatcatcattacaagttggctagtgattgtagtttccgagatgttctccattctagtgtttttgtagaagagtgacctccaagttctcattgtacttgccaaccttgtgtacacttttctttttatctggcaactttgtgcgagccttttcaatttggtctaaacatgcttgctataggatccttgttgtcaaggaatattcttagcactaagtctcttacaaagaatttcctctctttgacttttttaattaagcaccttgaaactttttgttggcaaacatgttgctttaagttggatttgtctcttcttttgtccctttcgtcaagggatcctgctaaaaagatgtggtgtacttcttggtcatagtagaccaaaagtgtgagagtagactgttggtaaattaggcctgccaaggtacagaccaggtggctagccatgttaagggagcattgcttggccagttgggtgaggccatggtcggctagcctacaaaggtagtggtca

SEQ ID NO: 102081 - DNA, 1665 bp, Cannabis sativa
gaaatctgccaaagcttggcccttgatggatgttcgacggtgataagttatgtcaaactgccctagttcaattgaccattttatcaatgttccagaagtatctggttgtgataaaacttgtctcaggggttgatcagttaacacattaattgggtgtgcctagaagtaaggtcgtagcttgcgagatgtatggattaggcataatgcaagtttttcaagagggggatgcctcgatcgtgcccctagtaaccttttactaacatagtaatcaggttactggtgctttccctcttctcgcactattgttacgctgatcgcattctctgagacaaccaaatagaggagtaatgtctttccagttacttgttttgccaaaactggaggtgtcgacaaatataccttttaatgctcttaaaggcttcctcgcattcctctgtccattcgaatttcttgttgcctcacaatacattgaaaaatggtagaaatttatcagttgacttcaaaatgaacatgttaagtgcacccttccttcctattaaggcctggacttccttaggcttggctggtgatggcatatctatcaaagccttaattttctcagggtttgcttcaatgcccttcgcgttgactatgaatcctacaaactttcctgaggaaactcctaaggaacactttttcaagttaagcttcatattgtacttccttaatattttgaagcactctgcgaggtctgtagtgtgacttccactctttatcgactttacaaacatatcatcgatgtaaacctccatgttccatccaatttgattcgcaaacatttcattcacaagttattgatacgttgccccaacattctttaacccaaatggcatgaccttatagcaatagagtcccatgtttgttacgaagcttgtatgttcttgatcaaggatatgcatttttatcttgttatatccagagtatgcatccatgaacgacataagcttgggcccaacagttgcatccaccaactggtcaatccttggtagtggaaagcaatcctttggacacacattattacaactagagaaataatacaatttctcaaagtttcattgggttttgggacgagaacaggattggctatccatgaaggataaaacacctcgcggaagtcattgaccaacaacttatccagttcctgttgaagtgccccttgtctctctgaatctaagggcctcctctttagtatctttgcttggtagtttggatcggcatttaagtgatggcagataatcttagggtcagtccctatcatatctccatgtctccatgcaaattgattctggtttgcccttaaaaaacttattagctgctatttcaattgttcatctaggttcttcccaatgtaaacacactttgtgggatttcctgggtccaaaacaacctcttccagctcctcaattagtttcaataaatttctctcatcttgaatctgaggatcataatcttcatctttcttcgtgccttcttctaccaagactgccattagctagtgaccagcttttctgtgttgtagctctatacgatagtattcatgagtcagcattttatccttttgttagcgagctagatggtgattaccaatgggtcgacgtgaggatacctcacgtctttttcatcttc

SEQ ID NO: 102082 - DNA, 1308 bp, Cannabis sativa
  modified_base (1098)..(1098): a, c, t, g, unknown or other
tactagctcaggtataattgacctccttaattataactatattataggtcttatatgcttgcaaataattatgtaataattaattcatatattgatctgtgttttttttcccctgtggatacatatagatggaaaaggaattcagcatgaccgtgaaagatctagttaagaacctaaggaaggcattattgaaaattatttgatgtatattatgtgaggttctatgctgaaaagtgtcgagacatatttttaattattaataaagagttaatattttgatatacgcattaatgttaaattattaatatttattgattgttaaaatttttatataaatatcagaaaatttcttatctcagtcaataatatattaaagttatgaaatttttaatcaatagattctagtatggtttaccgatgcccgtttttcagaacaagtaatctcgatttgaattactaatgtagtattacatcaaagtgaaagtggtgtatataataaagattacatatgataatgaccgatatgaataaaactatccttatcaaatatgtatccttaactataaagacctaattcatataataacaatatagaccgacctaaatcttgagtaatcatgaactactgttcatgttattagtttctttgattcatttgttaaagtttctcaaagaaaatgatttttacaacttttgttttggaaatctaataatgtggatggttgggaacatgatctacaattatgcaatcctaactttactaatggatcgaatgttagttccctttaagtgttaattctggaaccgaaaagttgtgtacaaatttaaatggaataatctaaattatactttcactagtgaattaacggtactaaaagataaaaaagtaattagaagggtaaaataatattttgaccaaaattaattacgaaccgacacaaggagggctaacaactagaattgattatatcaatagacactgcagtaacactcagtaaatatgtgagggtctatgctttgaaaagcttctaaatacatttctaattattaataaagagttgaacattttgatatatgcatgaatgttaaattattaanatttattattgaataatttatataaatatcaaaaaattctttatccatatatgtgactgtgacttgtagctatatagagaactaagatcacttacactatgtttggtagaggggagagaaggagggagggagaggggtggagggagagagatagagagattggagaattcttttgtttggcaagagagagagatggaaggagagggtctc

SEQ ID NO: 102083 - DNA, 944 bp, Cannabis sativa
  modified_base (763)..(763): a, c, t, g, unknown or other
cccttgaataacttgtgtgatttgaacccgtgcataatcatttgaaattatgtcaccataatatgaaaagaaaccaaccgcctcaattatgacacaccctcagccacgacattgtcaatgttatccgaacataattttacacattgacttacacattgacttacatcctcatagtccattggttgttcttggtgttcatagttgtcggtcggttcttggtcttcatatgccaagggttgttcttattcttcatacaaactggtctgttcttggtcctcataatagtcttcatgtcgctcttcatctctatattcattgtctaacttttgaagctcttctgtttgtgcatttctttgtgcttttagcctcttaatttcagcttttaatctcttgatttcagcgacatgttcactatcgacatcgacctcaaattttttctttctttacattctaccaaacacggtagaaatcttggcaaatgacctacaacataatgtaccaacttagtatccctttaaatatagaaaaaaaaaagaagtaatatgactcaattaaagaaacatcatacccaacaactctaacacgacctgggtgctcatgtatgcctaaagcttacgttaagatatcattccgacccttagcttcgatttcaccagtattaactttctcttttaatttattctgtgaatcaaaccagtgacgaagttagtaacttacatattgttattgttcattcttaccataattgacatacttactattntctgctcaatttccttgtcatattctgcgatcaaagtattgttctttgtccgcactctcatccagagttgatatctctcaacattatcaacactgagttcttttttctatatataagaactatattaaattcagttggcgtgattaaaacttaacagtgtaaaagaagtgatacaaactac

SEQ ID NO: 102084 - DNA, 561 bp, Cannabis sativa
caataaaatttacattatcaaactccaaaataacaatttcgcaaccaaaaaaaatccagaaataacaatatgcattttaaaacacaaacaatcaaactatatattaccaaaaaaaaaaactcaaaattacatttgtatgaacacattagaagaagctagccaaaattagtttttaaaattcattatgcatgaatatgtattgattctctaataattatatactaaattttagaaagagagaaagtatagggcccacacaaattagtaaaaaaaataaataaaaaggttctctcccatttttatagggaatattttttgctttgctaaattattttattttaattttattaattaaaatacaaatatgccctttaaaaatctataaacaaaaataattacatatttaaattctaataatagcaattttgtcaaattaaaacatcataattaacttttttagttatataaacaaaataatataatttttgttttctttccaaacagttagtaaacaacataatatataatattagattagattattttttattttaaaccgat

SEQ ID NO: 102085 - DNA, 503 bp, Cannabis sativa
agtgcaccgacgctatttttttttcttctgttatggaccgaagcaaaaaaaaaaatgtggaccacagcaccacctctgccatcaccaccatatttatactagttacggattcctccaccagcacaacatcataaatcacaaaaaataccaaaatcaccacagtccttttttcaaccaccaccatagttatatccgaaccaccgtgcacgtttccttgcaacaagaaaaaaaatttagatctaaaactatttagaacagagaccaccaaagagaaagagaaagtgcatgagagagagagggagcatgcaagatatacaccaccggagccgaaaatcaccaaagatgagagagagtgtgtgtgtttgagattgaaaaagagaaaaagatgtgagaaacatacttgggtgctgttgatcggggtgtggctactgctaggctcggtttgatgtcgttgggtgtggtcggttgttaggcttggtcaccgagagagagagagagagaga

SEQ ID NO: 102086 - DNA, 626 bp, Cannabis sativa
accaatcttgtaggctacattgcagagagcgattggttgcaagtctcccatggtagaaaagtttttcttttagggaataagaaccagattagtagtgttgagttcgctaggaaaggcaccagtgtcaaaaaatcagttactaatttgacaatgtcagtacctacaatatcctagtgttgttgatagaaacccggtcccataccatccgatccaggagcattatcaggatgcatttggaagagagcttgctagacttcctcagcaagaataggcctaaggagatcttcattttgttcttgagtgacagagcatcgaatgttctccaccacactgttacatatagttccagcagtagaaaatagagcagaaaaataatctgtaataaccgcattcagacctgaatcccaatccttctagtcgccgtttgaatcatttaatctcataatttggttgctacgtttccttgtgctggctgaggcatggaaatagttactttttttgtctcccgaatgaagccaatgttgtttagacctttgcttccagtaaagttcttgttgagctaaaatctcaaaataattgtttttttcctcatcaaattcaggagtggcaaaatggttgcttgaatt

SEQ ID NO: 102087 - DNA, 1326 bp, Cannabis sativa
  modified_base (378)..(382): a, c, t, g, unknown or other
cttttcaattatagatagtactaattctatttgtttgttttagaatcttatcttttcttttcaggttctttagtttataagaagtcaaagtgcaattgtcacattacttgttgatcctgaaatagagaaaacctgtaaaaagaacaaaagaaggaaaaaattagaaagaaaaaaaaaactgcaatagagattgaacaagaaggagtcatgactgacaacactagtaatggcaataatggaggagttgtagaagaccgggctaatggtcacaacaacaacgaccgtagcctgagggactatttgcttcctaacttgacagggggtcgatcttgtataagaccacttgccatcgatgccaacaattttgaaatcaagccnnnnntactgcagatggtccaatcttcagtccagtttgagagactgccactagaagacccaaacatgcacctcgccaacttcgaagagatttgtcagacattcaagatgaacggagttagcgatgatgccatcaggctaaggttgttcccatgctcactacgggagcaagccaagagttggttagtatctttgccaacccactctatcaacacttgggaggaattggccttgaaattcttttccaaatactttcctcctacgaagattcccaagctaagagctgaaatcaacaacttcactcagcatgacaacgaatctctttatgaagcctgtgagagattcaagaatttattgagaaagtgtctgaaccatgggattaaaaagtggttacaagtgcataacttctatactggactattgaacaacacccgaacacttgtagatgccgcaactggtggggcttttatgagaaaaagtgctaatgagacatttgaattactcgaagagatggccataactaatcaacattggtcaacagagggaggcccaactaaaaaggtcgcaagaatgtatgaagttgatgcaataactaagttgacagcccaggtagaggcattaacaaagctggtaactgcacaagccaaataagctcaagttgtctgcaagctgtgtggaggacctcataccactgacacctgccctatagatgtagacagtttgtcaatggagcaagcccaagccattagaaactaccagaataattatggtttcaaccaagcggttcgtcggcagagttttcaaaaacagtttcctaatcagcaacaacaagggttctacccttagaaaaatcaattgcagcaaagccaacagtttcaccaacaacaagcttctagtggagggtctgattcttagaaagatgcgtttatgcaattcatgacagagattaag

SEQ ID NO: 102088 - DNA, 536 bp, Cannabis sativa
gaactactataaatttgttgtgtccctcttataattacttaactactttttcattctcgtcaatctagcgagcaggtgtggcctagaagtctagtctagatctctgagtcaataatagtaattgaagatatgttaatttggacagtaaatccttaaactatatagaatttagcaagttattgttccttatttttttggacaaattggtcataaaatatatagattttggtaaattagtctacaaactttattttttggcaaatcggtacccaaaatttgatttaatttttttttgctgaataaacctctgagattaacttaaaatgaaaacatgatagccacatgagaggctatctcctctaactatccaaaacgagaaacattataattccttgcccaacgtgctaaggcatcagtaggaaggttactatctctactaacaacgacaaaagtaataacatcaaaagcaatacatagattcaaaattagtttcgtataagggttttatgaattagaatagttatgaaggttctgac

SEQ ID NO: 102089 - DNA, 689 bp, Cannabis sativa
ttaatataaagccggccttgagattttgagattgggttggttttagaaaaaaggtaaaaaagaaaattattgggtagcctgcctaaactaaatattacatcaaaaagagtgtgaaagagtgaaattctaatccaaataaatatataataacaaaaagtcataagtaataattagtctaaaacctttcactaaaaaataggaataaaaatatttctaaaaaaaattaggaataaaaaaacataaaacaaggacttactaagctcatgaaatgctaaaaataactaacaaaaaaaagaatgattacataaggctctattttttattttttatttttgtaaaaaaattatatttctacgtttaaagaaattttttttttatattttaatgatttttcataaaaacaacacgaaaacaaaaaaaaaaaaactaaataaaaataatatgaaaataatatctaaataacatcaaaacaacaacaaaaaataacaaacatacaaataacaaaaaatcaatactaaattaataagagtacaacataaaatgaccgtatcttcattccataaaatcttatttttataatttttttgttacttttgtgtatttgtgaaataatcccaaaaaaaaaaaaaaaccctaagcttataaaatccaacagcaaagatcagaaaaccacgaaacaattagttaat

SEQ ID NO: 102090 - DNA, 581 bp, Cannabis sativa
aataagattgtaaaagtacacacgtggcgttcctgagagtcagggcgttacaggtcacatgggaactagtgcccaaggaaaaacccttaatgcttagaatgccactgctatacccgacaactgagtaggcactaggcaaacactaggcatggagacctctcggagggaaaatacttttgagtaagagcccaagaggactcaagctcgaggacgccaaataatgagccttccacctgatgttgaactacctcgaaacaacgagagaaccaacatgactcctccacgaagtccttctcaaagttctcatgaaactaggtctcaagaacgtgcaagggaaagagacctgctactcaagctgaaggaagtagtaggagatgctacttcaaaacctgaggctacgagatccgacgagtaaggactaatgaaccacctcatactcaaaagtactttcgagatgaaagtggtgaattatgtcgttactttgcccgtggccccgatggccaacagtatgagtacttccctagagtacatgaagaggaattgaacctgagcaacctatttaattctcttcacacttgtga

SEQ ID NO: 102091 - DNA, 805 bp, Cannabis sativa
gtgtttaaggaactagtgttatgggtgtgactttgctgcaaaattattgaggcaccctctgctcttcgctggctacttggtggcagtgtggaagttgatctcttgatttttttacagaaaagaaattattatatataattcaattacaagtcaatgtacaacctgacaaagtctaaatatagttgtcctacggttgggttaatcatttaagacatacaccatataaagcaggagtattgtacagaaatataacatatatactaaaatgacagaagtttattgaatagacaatggacaatgaggcataatatacataccagaagacagtttaatgacagtagaaagtttcacaactgaaaactaattcaagagatgtgcaagaaaagtaaaataaaacgagttctagaaaaatagcatcgacctctcgaaacaaaataaacaaaattgggactaaataaacatctgaacaagtaaaattctacctcaagacaagcaaaatgtaatgcatagaaacaagttggattttaaaaaaattaaaatagaaatgacagtatcaaaccatttaaaggcaaaattatatatttagcaataaaaatgaagttgctctcttgattaagcaaattactggttaggtcgtcgttctttccaatctacaagtaaaaaaacttcacatagaagcatacctgtaattgtatttttgaaaaaagcccaattaaaaatatatgtggagaatatacttaaaaatctattaatctatttttaaataaaaaattatacctaaaaataattaaaccacaaatgtaga

SEQ ID NO: 102092 - DNA, 612 bp, Cannabis sativa
acatgttaacataaaccacttcaaaactcttaaattgataactaatcagattttgatgggttttatttagggcacaaaaacccaacatttatccccagaggaatgaaggtattttgaagctcgtttagccaagctataatctcgtttcattgaggctctgctcatacatatcagactacagacttagtagccaggctttttcaggtacgacatcagggcttatcccccatgataaacaatagtacagagcatgcatgtccaatcattcctgcttgaatgatccgacgaccattgataaaggaaattcaaaaaggaggaccttgaaacgacatgtgtgcgatgcttgactggtacaatctgacacccttaaatgccatatggtgaaaatgtcacctaccaaaccaacggttagatctcgtctgaagatgatcaatttaagttagcgcatagagggaagcaggcctataaataccccctccattccttacgataagagagagatacttgaaagataaaaataatattatactatctacaaaaaactctacaagaaaattcctgttgagcttcctcttcttcaatagaaacacgagaaaaatagagtttcggtcc

SEQ ID NO: 102093 - DNA, 904 bp, Cannabis sativa
gaatactcttcttgcaatccagcaacatgtacaacaggttcttcaaatggaaatcaaaccatgtcatgagcgttagctaggcttaccttcttattcaggaagagacaaaaaaattctttttggagaaattaaggataagctttggaatttattatcagcttggcaagagaagctcttctccattggcggcaaagaagttttactcaaagcggtggcgcaatccatcgcaacttacgctatgagctgttttaaactctccaaatctcttattggtcagattgaaaccatgtgcaacaaattttggtggggttctaactcctcctcatcgggtattaattggaaaacatggaaggctctaacacaatcaaaggttcaaggaggtatgggttttaagagttttgttcattttaatcaagctttattggcaaagcaagcttggttaattttttcaaatcccaattctcttctatcccgtatactcaaacctcgatattttaagcataattcctttcttgatgctactttgggttcttacccatctttaacttggaggggaattgtttggggtaaagaacttcttcaaaaagggcttcgctggaaggtcggtaatagtgaaaacatttgttgtgcatcaagtccttggctgcctggaatcacttcatttaagccgttggttttcaatgggacaaatatcaatatgaaggttgctgatcttataaatgatgatcgacaatgggaccgtgacaagctttcattgctatttcttgaatcagatgtcaccaaaataatcaggttgccattaacacttacttctcagcaagatcaactcatatggcatcatgattctcatgggttctatacggttaaatcggggtacaaacttgctacagatttggaagaacaa

SEQ ID NO: 102094 - DNA, 550 bp, Cannabis sativa
aaaattttagattgagcaaccttcctaatttcaagactcatatttctggctgaggtaaaaactcaatcaaatatatttctatttctattcttccaaattatatagatagcaacagcatacacatcatttatgattttgtagaaatggacaatgatgattttaccgcctccatcctaagccctccctcaatatccataagggtaaaaaacagccaaggaaacaagccaactcaaactcgactactcctcctcctgccaaaaagacactctttcccttcttactcccattcattgcattgctccttcaacatctcctacaaaaggcacaaaaaagagtattcaaggagcagaccaaaacaactccaaaaggacctttgggtcatctgttcgagctatatatcccttttcatgctaaagtgagtaaagacaggccttctctagcttttgacatcctaactagagttgctcaattcatgtgtaacttgggatcaaaagattggacattcctccaaacttttcctcaattagatccaagggaacatcgagaagtt

SEQ ID NO: 102095 - DNA, 838 bp, Cannabis sativa
  modified_base (263)..(263): a, c, t, g, unknown or other
actattctaacaaagcttatatattgaaaagacaaattattcccagaaataaaataataaaaaagaaagcaaatttaagtgcagttttatcataacaaataattaagcttaatgaatatagaaattatatatttatatataaaaaaaactcacctgagaaaaactcattattccaatgatcaatataagcttaccctcttgtgagtttttgttgtagtacttcttcttccagagccaaaatatatagatatacatatatatanatatatataaatatatataatgatgacattgaaaaataatgaaatggggtctgaaattactgatgtaattataaaacacaaaaaggggttttggaaaggaagcttttctttctttgtttctgctcctaaaaaaagcagcctaggaaaatttcatatgatttcaaaattttgtctaatataataataaaaaggcttatataataagtcaattgacacgtgtcagttacctattggtggtggaaatctaggtggaaggagttgttctaggatattgaccggtagattaccggttagagactgccagataggcagtgaagactaaccaaacattcttctcttctacttattattaatattaatatgtattaagtactatttttaagttgttaagtgttaattaagagctaaaaaatatatggtaacatatgttttagtaacacaaaattgtaaattaaagtaaattttttttttattaaaattatatgtgtaataattataatattaaaagagtaaatattcctattaattaagtatatctaagtatatgtatgtacttatatatatgacttgttatt

SEQ ID NO: 102096 - DNA, 557 bp, Cannabis sativa
aaaaaaaaaaaaaaagaaaaagcataacgtgatagaagataaaaaatatatgtctcaaagtttgaaaaaaaaaaatccaaaacaaaaaaaaaaagcgtaaccaagtatagtatcatagtctcatacctctcaagcctcccaacaaattaaaaagtaaataaagatgaaactaagaatcgagaagaaaatatcttcacacttgtaatccacaatgatcaccaattcactactatcattagatttttcataatttaaggatacgatatataatatcgattatgaatgataatcaaaataattttgattatcgatgatatatatacactcatatatatatatgttaaaataaaatgaaaactatatatatatgtgtatgatatggtgtgaataatataaccccgcccccgttctatccccgcttcaagtattgaaattgtccctcaccaccgctccattaatggccaagaccgagaatccccatcccattaggggcgggtcccttgggttacctatcaccgcggtataaatttttatctctaaataccacagaccaaatc

SEQ ID NO: 102097 - DNA, 776 bp, Cannabis sativa
aagccctactttcttcattatcctggacaaatattccattcccaaaacaaacaggagaggagacattgggtcaccttgtctcagccctctcttttcctcaaagaaactgtgcctggatccattgaacatcagagagaatttaggagttttaacacaaagcattgttaagttgacaaagctagctggaaacatgaaagccaaaagcatttcttcaatgaagtctcattccactgtatcatatgctttttgcaaatcctactttatcatacaatttgccttagctaattttcttccataatgtcttattagatccggacagaccattatgttatggccaatgaatctcccttgaacaaatccactctgattctgtgaaatctaatctgttagtactaacttgagccttgaacaaatcatctttgtagtagctctatacaacacattccaatgctattggtctgtagtctccaactgagtttggatacttagttttgggaataagtgtcaaacagtagtgtttacctcaaaatctttccagagtgcaaaaaggaggttatggcttcatgaataccattccccaccaaatcccaattatcttgaaaaaaaaagctacagaaaccataaggtccaggagctttattgccagggatatcaaagatagctttcttgacttcatctcttgagaattactgaactaacatcctagcttggtccttagagagaacagggccttgtttgatattactctatatcacagatctcctattattcatctt

SEQ ID NO: 102098 - DNA, 611 bp, Cannabis sativa
ttattattactaaaacgattttatcgaacaggcaaatataaagaactccatacaaccgtcgtcaaacgtttaaggaaaaaagaacctgaactcaaaagtgtcaatgttcgtggaaagttgactaaatgttcgtgcgaactaggtattgacttaagttgaactttaagcttaattaaatttataacattgtagtacattaatcctggagatgatgagaggattcaattctaataatactctatataacatgataaatagagaattcaaaattacatcataatcaaaccaataaaaactacaatttggttcgtaaaagctaaaatcaaactcgaaatgttataatatttcctatagtagcacatatatgaaatattataaaaataactcaaattttatattacataatttctgtactttgaaaaaattcaactgattcaaaaatgcttgccaggtatcaagtgttcgtattgtttggtttatcagattcctcaatttgtctatcgaattccttgaagtactcacttttctaaggtgatatctcaaccaagtaatattggagtgttttgtttcaagtttttctatggaagtttgttttcttgtgattcttgcgt

SEQ ID NO: 102099 - DNA, 594 bp, Cannabis sativa
ttcatattttgggtcatatttattacaaattatacaacatggacaaaatctattccttataatctaatgtatataaaaaattaaaattcgttgcagttgtgccgtagcatactaaagtgtccaaaatggtataattaaataaatggccaatccatttatttgaatttctaaaggtaatattgattgaacttttttgcaagctaataaactatatatatatattttgttttgaataaaatagcaatttttattaatgatagcaatctttcataacaattgagcgcatttcagcagaacaatcctcaactcaagtgcacgacctgaagagaaacaagagctcctggcaagacagtgagctgctttgtttacagatcgtttaacataacaaatatcagcgtaatccaaagacaataataaatcacacacatcaatcactagtaatccaaatttagacaacataggaatattactctttatagcttgaacacacagtaaactatcggtttcaagaacaacactttgccaatcatgcctattgttgacctcgcttttagccaacgacaacgagtctaatttaataagcgataagtgatt

SEQ ID NO: 102100 - DNA, 960 bp, Cannabis sativa
gtgtctttgttgtgtagaggagagcgtgttcgtctcttcctatgtatttatatattttgtattgccttgagtttgtaatcaagtctacaaaagaagaagaacaatagttttacattcgggaaaaggttctacaagcttttagaagatagcttttcaagtcttgcctcaggagaaagtaagcacttgaaaaggagatcgaagggagttcaagcacttaaagtttcagtaagattcagttagaagatgaaatacatcaagcttgcggcatacaattagaagaagtatatttatgcatgtcaattaatttgtatttttgatctatctaattaatcttatcttaggtcagggcctcgtggattagtaataatctgcaaggattgttgataccatgtgcaaaaactttgtgtatttttatttttctgcactgtttattttctggttttattctatagttatagagttgtgttatatagttacaaaataactattttagtaccatatttattatttcgcattatttatttaattaattaaataataaattaataatattaaaatatgaaatttcaggtttctattaatatattactactcatattacttaattgtgtatattttaaatatttattataataatttttttctacaatgtatacatagtattttgtttatttatattttcttttataaaaaaaaattacattatgtttagttttttcgctttttctcttctatttcttttccaaatctcatgttaatttttttgttgatcgtttcaaaggagaatgattatttaaatttttagtgaataatataagttagggaaaaaaaggcaaaattttttcatttattaaaaaaagttgcaaaataaaaaataagatattggattgttttttttttaaatatatatacaaatatatatatatatatatataaatataatatcacattttgcatctt

SEQ ID NO: 102101 - DNA, 832 bp, Cannabis sativa
  modified_base (772)..(787): a, c, t, g, unknown or other
gcccgaggtggtttgcaaagtccatgaaataatcacgaagatagattattgcccctgccctgatgtgctcaaagctccaagcgcctatgccagttgagccacttgtactggtctcgccactagccccctcagagatctcgcttgtaagacacaaaggtgggtaacaactaaatttgccagtttacactgacctaactcagcattctcgcccatactcgattccacaggtcctcagtgaatcgcctacgtagtttgagatagtcgcaccctcgactcaattaactctgcctcggaggtgacgttagggttctggagagtctttgatttacataacttgggagacattatttcaaagtccaagtcacctggttcaaaagcaatagtgactttgggtaaaaacagacgtcaagctaaaggaatagaggacatactaggaggttcaggacaagcagcatcttgcaagaaatgtagttttccttcagtaatttcttgtaagaagcgtctgtggcgactagcattatcttcctgatggattttcagtaaaagttccctaattcttttcattgtttatctctaatttggatgtgggtttggaaattttgggattataagggatggcaatttcggtagggaactcaatttctaaatcttctggacgataaacttctaaacatgattaggaaattgctgtaagaagaaagaaatcccaattcttggaaaataatttatcaaactagagggtggtgaactatgttggaattattttaccagnnnnnnnnnnnnnnnnacaagtatgttgtttaacatcttaaacatgaacttctaaaacgat

SEQ ID NO: 102102 - DNA, 507 bp, Cannabis sativa
aaagtattttaatgtgttgtgttggttttatgtatcaaacttatattgattttgttgataccatacacttagatgttaacaatttgctttcaaaaactttcttatatattatactattgcagtgtttttgcatacacatttttacaaaagaacatgtcatatacaaaataaaatgaataataaattatactaactcaactaataaaaaaaagctttctttcatgacaatcttttaattataacattaattttgtgattaaaattaaatataatttttagtcacaacaaaaatttacttgtagctaaaatatagtatttagatataagttgtcactaatttaattttagtcgcaacaaatattgtcactaaacacacatttaatcacaataaactataatttttttgactaataaatttaaccacgaacattttagtcataatataggaacaaatcataattagtcaaaacatatttactttaagtaacaaattttgttgtgactaaa

SEQ ID NO: 102103 - DNA, 557 bp, Cannabis sativa
aatgttcaaagagaagtcaaagctcaagaagtttgaaattttctcgagataaggcaaaaaatttcatgaagcttagaataagcaagatggaagacagacgttacacagttcaaaaaaacaaggattatggctgtaaaatcgcatgaagccacgacgaagaagaatcgcagatgtttttcgacctagggtttcctgaatattttctatagcaaagtcgaaaaaacatttgaaatgtaaacataagcataaaggaaatcaaaaacttactcaagagtcagatatgtgggttcgagcaacgtcaatccaagaagtagttttcatgaaggcacttcagcaaacttgaagcgaagaacctctctttttcgctctgaactcacttagcaagaaggatggtgaaaagaagttcatgtgctaatgctggtggatatttataggcaagtcactaaaagaggtaatcattctaaagaaaccttagacgcctcagtttccctccttaaaagcaaatatgggaaataaaaaataatcaagtgtagccgtctgccgtggtgagagaaaat

SEQ ID NO: 102104 - DNA, 811 bp, Cannabis sativa
ggaagcaactactattagtctattctaattttattctaaggtcaggtttgttgttgtcaaagtgaaatgggaataaagtaatttcttattcagaaataaaacatttgcatttgcttttgtattgcatagtttgtgtaagcgcttcatgatttaaattgtggaacaaaccatgtgagcaccttcaagtttaaaagacttgttcacgacccattgtgttttgaaatctttaagggagcacttacgatcagtggagctaaatctactcataatctatcctgctaaaaatataaatattagcaatttagacatttaaaatatatacttattattattacctattaatacgtacaaagttaaagaccataagtgcgtgtgtttacttttctttctttttattttaattaataaaaacacatcactataaattccttattttttccttaatttcatatttaaacacaagaatggaagcaaaagagaaccacgcacgctaaaagcaagcatgacataattttaatttagttgtccatcactctacaagtcgagtccggacaacaaattccaacagttcaatattcaaccacaaaaatttggttagtttttcctaaacacttttttctctctcttctctcccaatggaaccaaaacacgtttttttaaaaattgaaaactaaaataaaaaagttagggaaattgtagaatgcaccttctaagaatagatacattgatgtacccttgtctgttttagtacccgaaataattttttagtcaaattttttctcatggttatgtacgttatagttatttaaga

SEQ ID NO: 102105 - DNA, 1201 bp, Cannabis sativa
attgcccactgttcggtctagaggacttcgttcgagcgaatgtatgaggtgccctgctcggcctgtgtcttgcaagcagatacccgtagtcaattccacgtgtgtcaccatcgagtgatgccacgtcagagtgcaaaaattaagtgcaaaaattaggataataatgaacattgataataatgaacattcaaaggagagtgttatgaaatattatatatatggatatccaaattacccaaattatttataccataaatactattatatttttctttattttattggtatagtatatcttattattctagtcatatttttgtataaatatgaattcaccctataaaaataaactattgaaattttttcatttactttcttttctttcttctttttcttcttttcttcttatttattttatataatttttctttagaaaacaatacttaacctatacgagaagtaggagtccatctatgagacaaagacgaccagtttaatcatattcaattataattgatttatggacaagattataaaatgaacaacatgcattctatataattttatgttgtccatatctatatatttatattcggcttattatatagctatataataagatcaaataaataaataaatggctatgtatatacataatgtattgagaagctattaatgtaatctagctcagatttttatcggcttttgtaagttacatagaaataaaataagtgttggaagattaataaaaccaaatattaaaacttaattattccctcctaatgattagacaaaaagacaaggctggcaagctcttgttaaccctggtgtaatgagggctgatcaacttaatattaatatcttaacctgtcatgcatgacatatttatatattatttattttcgtttttgggacggaaatattaagtaaaatcagcattaatagacttgtcaaatagtttacaataaaatagtttaagtataaagcagtgacgtgacagtttaaaatctctctaaaattatttttttttttctttaattttctccatatttaaaaattttattagagcataaatttacaaaatattttattattattttaataaattttctataaacacataataataaattattttttaaaaaaacacataataataaagtaaactaaattaataatattaaaattaaataattattca

SEQ ID NO: 102106 - DNA, 976 bp, Cannabis sativa
  modified_base (289)..(289): a, c, t, g, unknown or other
taagccacttgggaagtgcagaactcaagatacatgcctttggcttcaccctagtaatcaaagtttgcctgagggttagccttccagaagtcatataagagcttgaggtcggctgtctctaaagcatggaccttttctcccaacctcgccacctcagctgtaagctcctcttccttagacttcttctcctcttccacccgatgaaggacagctcgaagagacgtcctttcatcttgaaggctattcacttctgcagataaggtttcgatggtctcttcaagtcggtctnaagcctcgagatccttaatcaacttagttattttcttctgagcagtaaaaagcttcttgttgacttcacccagctccatccgaacagctccaagttccaccctggcgtcatcagagtccttcctggccaagtccaccttcgccctcatggtgttggatagagccgcgttcttcgaatcagcagacttagctcgggagtatgtgtaagccaacttcagaccagcctgtgtagagaaaaaactttagaatgcgaaccaaataaagaggattaaaggaaactgtcaagaaagacttacccttgtgaattccttcacgactccttccatcagcagctccaaagaagagtcgttgtcagcactggacagttgctcactaaccttaggaaccaaccggttcatgtagtgggtgagcatctccttgcctttcttggcctctggaagcattggcaaaagaggagtaggagcccgcatcagctcgaatccaccttttggttgctcaggcgtgttcgaacttcctcctcgagaattcgtggacttagcaacttttggagtggggaggtccgaaacagttagttcctcaaaaaggtctatagccttctcggtagacgcctttccttgtaaggggtcccctcaccgcccctggatttcttgatcggaggagatgtgcttgagcttcctccaactctctt

SEQ ID NO: 102107 - DNA, 1425 bp, Cannabis sativa
gaaaggagaaacattgtaacgtgtaaggatggccttcacgaaaggatgaaaaggcagcgtcactccgcatcgaagaataagaatcgagaccactacattttgtgtagggataatcgcaggattcgtaaagggaagatgaggtcgttaggatgctgaaggctttgaggtggctgtgtgaaccaacttcagtcgtgtaaaattattcaagtcagatttcttgactcacaagaccagatcctcacatgaaaatggttcatttagttgagtgttatcaactgagttggtctcacttccttcaacatcccactcttcctcagaattgcaatctggtacctcgaaatcctcacccatctcttcaacttcagtgtctagagaatgtctcgagtgaatgagataatcctgagctaacactgtagactcactatcgcgtacatcgattgttactggttcagcaagttctcaaaccatcctatctatctcatcagtagatagcgagccctaacagatcctggctgcagggccttcgtcctcagatatcgaggtgggtatgaagctatcgcttctttctgtttcatcagcaaatgcccctcctccagaatcgagcctttggctatccgacaaatcgctcatttgaaagatagaagatctttttagtgtggtgaaagtgcaaattgaacaaggtgccctcacccgtataaaattcaaaaaaagaaaaaaaattaaagaattgaccaaacatctcaagaaatgactgggagtatttcagtaacataagggtcacatcgctacatgaaaattaagttactgaggcacccaccatttcgagaatatagtcaattcagcaataagtaagtcacgaagtaaaaactaaatgtgtgcctcaagaaatggttgggggtgtcccaatatcccaagaggcatgcgattatcgcataaacatttagttaatgggacccacccaccattttgaagaacctagttagtcccaataagcgactacaaaacaagaaaaatgaaaatttaccgcgtctcaaacggctggatgtatcacagtgacccaatgagcatacgaagattgcatgagcattaagttactgtgacacacccaccattttggggactcagacagttttcataacaaaaatacatacgacctaaaagcaaaaacgttctaagaattagtaaattctggcaaaaagaaggacaaaaggcttagtaattggtctggtaaagttatttctgggtgttcggatatttgaagaagttcgcgagcattcgaaattctcatcaaagacttacgagtactcgaagtgctcatccaaaaatctgcaaacactcgaagcgttcttcctaaaacccatgattactcaagtttcaagcatatatttcccagaaaaataaggtattttgtcaaaagacaaatga

SEQ ID NO: 102108 - DNA, 611 bp, Cannabis sativa
aaaatatttaaaattccataaaccgtatttttataattgtttttgttgtttttatgtatttgtgaaataatcactaaaataaatgagatgattcgttgttgatcacatgaaagttactttctcgttaccaaaatagtattttttttctcatccatttaaatgaaattgattcccaacaaaagtaatagtatttaatattttataaaaccattttaatactttggaaaacttatttttgttttcaaataaattttagaagttttcataaaaatattaaattttagataaaaatctacaatttcactgtcacgcgaaatttaagctaatctactagagtgatgtaaggaaaaattctccacatcatacgtagaattgtctcccttttatgtcttattgtggctagactcattcctttgttaatatttattatagatggtgactagggacgatactgaaaatgtggatcaaaattaattattgaactcttattttaacttttaaagatatgtagtatttttaaaaattatcaaaatttttgtatatttattataagaatattttaggaccttcgggttggtgggccttaagcacaagcctaacccaccttagcc

SEQ ID NO: 102109 - DNA, 560 bp, Cannabis sativa
tttttttttgaatttgtcttgtcataataaaaaataaatagatcaaagaaagtggatctaaattatgaatgaaatgtgtaataaaataggaagaacaattttggacttaaataaagcttgagaaactataaagaaaataaaatttatttttactttatttagtaaatattatttgagtatgagaattttgtgttaagtattaacgaagtttcaaacaattttgttaatgaaaggagtataaaaatctcattattttgtgaagtgatgttttgacaaatttagttttgatgagaaaattaaagtgtcataatagtagtctaaattgagttaaaaattacttacacaaaggaaaaaaaaaagtgctcattttgacactttaaaattgagtccacatgttctactatgtattatatggaaataaatcaaggagggcttatattcaaaatgagcattaggctgcgagaggatgatcttgaggatgctgtttaggctcctctttgctgctcttctcatttgtttaacttttagcagctttctttgtcacaaaaaaaaaaaaaaaa

SEQ ID NO: 102110 - DNA, 655 bp, Cannabis sativa
ttataaaataatcaacaataatacattttttttgtaatatttttttgtgttattttatcattctcacaagtctaaataataaaaaaaaaatcaatttctatagtactttttttttcataacacaattgatttgaagaattagttacaattttatttcataaaacttgtttcaaaattttaattatctaaaataacaaaagtccaaaaagtcaaatacaaaatatgtccaatacactcatgtttaataaatctcattacaccaatatatgagtattgttaaatcttgaaacttgaaatccaaaggtcccgaaactttctctgatattcctacatacaaagcaataaacaaattaattacatcaatgctaggagatgctaagatgacaaattaaccacacaactctataatgttggtaaattttttatcccatgaacttaatcctgatctattatttgtatctgtcgaagtcaaatttagattgaagggagcttaatctctagtagagatttcaaagattagcaacaacccagaaaaatagagaaattcacaatatagaagaagaaaattatccaaacaacatcagtcaacatgtacaatatagaattgatcattacaaaccgctttatcaggagaattagcttttgatatcatgat

SEQ ID NO: 102111 - DNA, 1071 bp, Cannabis sativa
  modified_base (36)..(46): a, c, t, g, unknown or other
  modified_base (645)..(651): a, c, t, g, unknown or other
acccaaacctaaaaccgaactcggacctagccccannnnnnnnnnnagaccaaaactcgagcccaaacacggtcgtgtacccagacttggagcgagagccggacctggacatagacctgggacccaatccaagacccagactcagacgtagatagggatccggatacgaacctagactcgaacccagatccagacctaggttgggatcgaaactcgagacctagatccatactgagacccagccccagacccagacctagacctgcacctaagaccaaaactcggacttggactcgaacccagacccaaacctagacccagactcggacctagactcaaaccaagacttagaccccaaccaggcccggacccaaactcgaactcagacactgaatcgaaatcaaaactgggactaggtcccaaacccgaacatggacccagatcgggacctaggacctggaccatgacctgcgccttggaacctagacccagatccgaacacaggactcagactcaaacttcgaccacgaataaaacccagatcctgacaaagaccgagatttgaaaccgaaccgggactcaaaccctaacctaggacatggaccgggacacgggcatcagaattgggaccgagacccaagaccnnnnnnnagacccagaccctaacctaggacatggaccgggacctgggacgtgggacccgaagtggaactaaactgggacccgagattgttatccagatctggactcggggcttggacctgaaccgtagtcagtgtttggatttgggacccatacctagactcagacccagacccagatctagacctagacccgtatcccaaacctgggtccaagtctgagtctgggtttgagttcgggaacttgaatcaaactaggaccttagacctagacccagattgagacgcagacccaaatcaaaactcggatcgggactcaggacgcgaacctgaagccagacatggacatggaccaagacccagacccaagactcggactgagattggagactcagacctagacctagattggggacccaaactcaaaatt

SEQ ID NO: 102112 - DNA, 719 bp, Cannabis sativa
actgtagcgtgccttagcattagggcgttacaaggcccaaccttgcctataccgtgaacaagttgagtcaatttttggttagtcctcgaactaatcatatggatgcagcaactagagctcttcaataaattaaagggacaactggacaagggcttttttacccatccgattcaaaaaatcagcttgtggcttataccgatgctgattgggcagcatgtgttgacacgagaagatccacaactgggttttgtgtgtttcttgggagctctttagggtcatggaagagtaaaaagcaacatactatatcaaggtcttcagctgaagctgaatatagagcaatgtcaaacacgacttgtgagctcatatggttgacatcattgctgaaagaattagacattgatcacataggacctgccttattacactgtgacaataaagcagcccaacaaattgctgccaatccggttttccatgagagaactaaacatatagagatagattgtcatcttgtaagggagaaggttcaaaaagggcttgtgaaaactgttcacaccaacagtaaagagcaaatagcagacatttgtataaaggctttacttcctaatcagttcgagattctcaaagaaaagatgggaatttgcaatatatacactccaccttaagggggagtatcaagagttgttaaggtgtagtgggttgagttggttagggagttaagt

SEQ ID NO: 102113 - DNA, 624 bp, Cannabis sativa
aaaaaatatatattaaaaaatagtatataaaataattttttaaaaataaaattattaattaattaataagagtaaaataatgataaaattgttaacacgtaggtctactaggagagaattgaaaaatactaacataaaatattgaaaatatttcttacttttgtctttttgtctttttgtctttttgtaaattattaacaccatataactaaaataatcaaaacgtgtccactatgacactttattaataaagagcaagtagtcaaaaaaataataattaaaaaaattccccaaaaaaaagtagtaaatgaaatgtaaaaatctttcattagcattggcaaaattcttcattcttataattccatgaggaggttttcacctacctgtggatataactctatgagaatataaagtatttttttactttgctatttcttctacctttcttgatctattctagcttattattagcacctaattcaatggttgttgatgattcttcttttccatgaatcagcttttgatgaagatcatcacattccctttctactatatgaatctttttaaccattctcacttcgacaacatagaaatttagggcgtgtttggtatgagaagttcaaa

SEQ ID NO: 102114 - DNA, 670 bp, Cannabis sativa
atggtttggaacatagcagccagcagttggagacaaacaaaatattagtaatgattcatggtgtttggagacttagtcaaacagttggagacatagtcaagtggtggctagtgttgctctcatttacaacatttggtgtggtaggaatgacaaatattaaagcctaaataatcatactattgagcagatcatacaatgtacaaagagttttgtcaaaggtagagagtagtattagtaggtaatactttcaaacagattactcatttagacaaagcatggattgaaagtctctattaaagtttgtatcttcacatagttttttacttttaataaaagaaataaaataaattaatattataaaatcgtaattattctaattataattaataaacttgataattttaattgatttatttattataaatatacattattaaagagttagttttattttattatgtagtcatttactcccacccaatcacattcaagaacttcactcaattaataactttcatccagctaagttgacagctttatatccgccaattaatgaaaatgtacttttataataataataataataataataataataagaggtcgaattgaaaagcaaaaggtgaaacatggcatggaaatgcatcaaagaagaaaatatttgatgaac

SEQ ID NO: 102115 - DNA, 553 bp, Cannabis sativa
  modified_base (244)..(246): a, c, t, g, unknown or other
tttataattaacatatttatggatctaaatagtgaatttggttggaactcaattttaattttcaaaggaactgcattttccatggttttcttttctctttcttatataatgactcactcattctcaaacccaactcaatcattctaccttcttctaccttaataataatttcagtagaaaatagctagatttatagtataatactataattattatataaatattaattaaataatcaataatnnntatataaaatataaattataaaatcatataacattaataactaaagagtcaagaacggagaagcatatctcggcagtcagcgagcaatgagcaggcggacacgggcgaacaccagcgggggcacaggcgaacacgagctgtcagattttggaaaaacggaagagggcaaaggaggctttagatgttaaggatgaggctcaccggattgagcccgccactaggatgagaccccgccggagaagaagtagtcgccttagctaggagtttcttgaattcttctaaccttttttggtggaatgaatagtga

SEQ ID NO: 102116 - DNA, 563 bp, Cannabis sativa
aacactcctctataaataatataagaaactactaattatttataacacaccatatgtcaatataatattagttactttagagcatttctaatacgagctataaatatggtgtattaccattttttagaatattttgttaaaagttaactctaatagtaatgtaaaatgtgtgtcgaatttgggccaaactaaaaattgtgtcaaatttaacacaaaatataatatatgccaaaatttaacttacaataaataccatattcttaattacctatttgtcactcattaatattattcattaataaaaaaatatttttatacatataagttattaaaataatataaataaagctaattattttgtatatttttaatgagtatgaatatggtaatattgacttttatagctaatctacaccttgtacattggagcacaaatacaaaaattaagccgaatataaatttgtggtatattttggatcaaatctaacttaaaatatacaccatccattggagatggtctcaaagtgcctaataaaagcatctccaaaggtagcattccttaa

SEQ ID NO: 102117 - DNA, 1110 bp, Cannabis sativa
  modified_base (62)..(62): a, c, t, g, unknown or other
gccagtagagatcttatttttctcctccatattctgtagtcacctgatccatcaaacttatnaacatcaactttaaaactactcatattgtatttgctaagaataaaattagataaaggttgagaatgtcctcgaaatctgcaatatctaattactcctcttgatttccatccttgtgttcttgaagatcaaattcttcttgttcttgatttttaatatctttgaaacttgccttttgattgtattattttgaatctctttgcggaaataatttggctctgatactactgttggaaatttgttttgaccaacacacttaaagaagcaaaattaataccatgcaaattggtatttttcaaaatttattattttaggcttccacaaaataattggtattattaaaaataacacttttaacctttgttttagcccaatgttaaaagtccaacaagaacaatgtcaacaagagtcaaaagactgttctcaataaagaggttcggcccacaaaagcttcagcccaagagaagctttctctctccaatcaacactttgcaccctttgctattctatctcttgagtctgagaaagagtcaaacaatgactcttaattccctctacaattcggcccaacaagagaagcagcccacctagataaaaccctaagaaactcaatataaaaggtatctttcctaaccctaatattcactatctacgacagccacaatattccttcaccaaaaattcaaacttttttaaatatcttctctctttctctcaaacaacagcagctagggtactagggttctaaatgtttttcttttatcttcttcttcttttctttatagtaacaactagggttttatgggattctaatttcttcaagcttcttcttcacagccgcacctaatattaggatttctttaagctctcttattttctcttttaatggcaaaattaaaattgggtgttctagggttatagattttttttacttcttttcttttctctcttctactgaatatagttctcgggttcaaaggggtatttttattttattttcttcttctaaatggcagtagcaaaaacggtgttctagggttttctaggttt

SEQ ID NO: 102118 - DNA, 702 bp, Cannabis sativa
ggtataagaaatttgactaagttgtgataagggttggatacacaagatccaaatatgacacttgcctttattttacaaacttgaactcacaagctgtaacatttttactggtgtatgttgatgatatgttaatcatgggaaatgatcaaaatgaaactgaaaaactcaagtatgttctcaaaagcgaatttgaaatgaaagacttaggggtggctaagaaaattttggggatcgagatacttagagataggaagaatcagaagatgctattgactcaaggcaagtacattaaaactgttttaaggaaattcaagatgaataactcaaaagaaactaaagtccccctggctggacactttgtgttctccactagtcaatctcccaaagatgacaaagaaagaaaatagatgatggaaataccatatgctgaagcaattaggagtatcatgtatgctatgattagcaccaagcgtgacattgcatatgcagttagcagtctcagtaattacatgtcaaaccttggtgaagaacactgaaaaggagttaaatagttactaaggtatctcaagacaacaactcactattgaatgaatttcaagaaaacagaaatcaaggtggaacttgaaggatttgttgctgcagattatgcatcaaacatagggctgaacatcgggcgggtttaccgggtttcgggttcgcagg

SEQ ID NO: 102119 - DNA, 914 bp, Cannabis sativa
caaagtgatcaatttttaaaattataggctcctaattatccaccttcgctccatatactaaattatatataccaataaaaatatagggccacgattttgtccagtaatgtacttttacggaatgtattctgtgatgtacgacaaccgttggatgggggagttatttgatctgagggctggggttgatctaggggtaattagggttaaaaaaaatagtaacgtaccctgagacccatctaatgtactacggattggactaacatctaatatcctatccaatactcatatataagggggtgtttattggactacatctaatatcctatctagatctgatctaattatatattagatgttaaattttaccatctgatccgatctaattaatttcggtgatccaattgattcttcaattgaatcagttctatccactgaatgtatttaatttatatatatttattagtttaatttaggtttacccaatattttaaacatattattttttggatcgaatcggataatccatccaatattttagatccaatgtattaaattggaatggatccatctaattcaagaaaaaaaaaattaatgttaattttcaaatatataaatagattttacctataataatatatataaaatataattactaattcaaactaaatgaaaatattaattagtttgattggatatggatgtattgaatttttgaacacctcatccaccatttgatccgatccaactggatatttaaaaatagcatccaaaccgattcgatcacaattagatatctaatatttagtgatcgattataattacattggtcgattctcattagattggatcaatttatgcacacttttatatatactagtaaaaaattacgtgcgatgcacgtatactaaatttta

SEQ ID NO: 102120 - DNA, 741 bp, Cannabis sativa
cacctatggagatgccgcccaaagataagagttcggtcgagaaaattatcgatctttctgaagaggtagcacccgaggtggagccaccaaccaagaaggcctccaaatctaaaggttccaagggagatagtttggatggatctggtccgatcaaatcctccaacactaccgtagtgctaagctctgaagccaagaaaggcaaggagatgctttagtaccaccacgatcggttacttcccgaggtgagtgatcagctggcggggttgataatgagatgtctgtggagcttctgatgggtgggctcctgaaggaggcaactcgtgtaagtattttcttcttggtttttatcctgtctatttaccagtgtaggttttgacaatttcctgtgcagctcaatctgaagttggcctacacttactcccgagccaaatttgttgccatgaagaatatcaccaccaccaccaatctacagaaggagatggatacggctaagaaggaggttgatactgtaagggttgagctgggtgaagtgaacaagaagattttaggcgccaacaaatagattgagaagttgaccaaggaaattcaagagatgccatctaccacccaactcgaggcagacaacgaggccttatccaagcaggtcaatgagcttaaggacgagagggaaggtctccgcactattctttcaaagttaaccaaggataagaccgacttggaagaggacatcaaatctaggca

SEQ ID NO: 102121 - DNA, 1188 bp, Cannabis sativa
atctactctttctgcaatgtctaagaaagctcacatggtatcagagccatggccaccattgatggccaatgttgctaccagcaacaatgacagaaccaacactgtcaatcaaagcaattctggaactcaagaaggacgagctcaaaacgatggagttcatgttcctcagctcaacagaaacagagaaaatgccaatccatcccctgtatatttcaatcacaatctttcaatcagattgaatgatcacaactacctgctatggcgacaacaggttcttgctgctataaaaggtaatcgtcttctaccttacattcaagaatcatcttctcctcctcgatttctttctgaaaatgatcgcaattcaaatcttgttaactctgcttacttggactgggaagttcaagatcaattactaatgtcttggcttctttcctccatgaatgagagccttctaacaagaatggtaggatgtaacaactcgaaccagatctggagtactcttgaaaagtatttcactcttcaagtttctgccaagatcctggagtttcgtacaaaattgcagaatctgagaaaaggatccctcagcctcaatgaataccttctcaaagtcaaacaaacagttgacctgcttgcctctgttggtgaagttctaagcaccagagatcatgttgctgcgatttttaagggtcttcccagtgaatatgacacctttgtcatatccaccaatacaagaatcgaaagctatactgttgctgaaattgaagcactcttgctggcttcagaatcaagaattgagaaggttgatcgtgaaattgatctcagtgctcacatagccacttctgaaggtgaatgtactcctgaagcaaatctggccaactacagacaaagaaatattccaagatatcctcatcctggaatgtatggttacaataatactggctatggaaatttcagaggcaacttcaatcctggaagaggcaactttgggggacataattctggtttcacaggtcaacaacaacaaaggagtggtcattttggtgggagaggcacaagatttcccaatcaaaacaataaaccacaatgccaattgtgtttcaaattgggacacacagctgcagactgtttttacaggtttgataaaacctttacaccaggaaatgcctcaaccactaatcccagtcccaa

SEQ ID NO: 102122 - DNA, 586 bp, Cannabis sativa
tacgctcacacgtctatttacaataagaccttagaatggtttatctcggttctgattaccgaatctaacctaattatgccttggacgcataattctttatctcaacacatatagtatgatattgcattcaaaaccatttaaatactagggtaataaccatagaccacataatcgctaagttttatggtaaaccctaatctcgatttctcgcatggcatacacaaaatacatacattggcgccaccgcgctaaactctatgtgctagcttactgtcttacttagtaatctaagtatgtggagattccaaacccctgggtgttcctgagcaagtgctggtaatcctagtcacacattcccaagatttacaaatagggttaatcttaaatttactttcacatgtacacatagtttaaattatatttatagattaacatatagagctcaaaacgagcttttcaatggtatcaaaaacgttcaaaacggagtcccgagtcaaaagttatggaaaaaataagcatacaaaaattctcgatgaaaatagggcttcgccgcggcggtcccaacctggtttcccacgctgcggca

SEQ ID NO: 102123 - DNA, 937 bp, Cannabis sativa
ttttttattatttatttttaaaaaagctatgttcatatgtaacatgtaaactatttatttatgaaaaatttataaaatagtctaaaaattttataaaaatatatcatacaaaaattttaatttgtattttttgaatttttttatttacaatttttttttttaaaaataattgattgttttaaaatttatttatagttgtattttttttatttaagcgtttatatattacaatcatattttacttgggactcgaacccaggaccttcaagacacacacccacctattgtcacttgcttgagctagccttggtttatatagttgtatgagatttttttttgttattttactattgatttataattatcgtggggttgatttcacgttgttatttaattattatttttttttttttttactttttgctgaacaaagtatatttttgtaattttaaaattttacaagagtatttttgtaaataaaaatttttaagctgtaaaattataaataaaatatataaaaaaaaaagatatttttaaaaatttcaccttattaatttattttgagtgggaacttgataaataggaagctcctaatttctaaatttgagtaagggtaaaagattaagctaggttgtaaaaaaaattgttagaagagtactttctatcttttttctttttcctgaaatagtctttctatctatttaaaaaaatagagtattttatatatttatatacaaaattaatgtaaaatatcattttcaaaaaaaaaagtaatgtgagatattgtattcacctttctacgttacaagaaagccatattggtcttttaaaaacaaaccatctcaatacattttggactgtaaaaagaaaaatcaaagtaaaaggaaattttatcatcaaaaggaaataaatcttttaccacataatacactaaaat

SEQ ID NO: 102124 - DNA, 979 bp, Cannabis sativa
ggaaacttgttctgaccattgcttatgtttaattcgtttgatcactacagagattataggaagtaaacctttcaagttctataatttctggattgatcataaggattacaagcagttggttatggtagttggaataggcctattaggagccatggattgaaaggagtcttctataaaactatgagactcaaacacaaattgaaggctttcaacaagtcttctattggtgatattggaagctcctatgataaagcaaaggccgaatataaggatgctcaatctgatctccaagcagctcccttagatagttctaaaattgaaagagagaaattagcagctagtcagtttcagtaccacgaaaagttgtatctgagttttttaagctagatgagtaagattaaatggatacagcagggtgattctaacactgcttatttccactcaatgctcaagaaaagaagagaggataacaggattgtctctcttaccacagagcaagggagtttgaatgatcactttcctgaagtggttcagcacttccttaatcactttcaaaacattatgggcaaagagaatccaacaacaaggccgattcaacaggattgtattgacatgggctcaattctcactttggacaaacaggtgcatctattgaaacctttttctcttaaagaagtcaggtctgcgacgttaagtattccaagtactaaatctcctgggcctgatggatttggttcggggttctttaaatctgtgtggccggaagtggggaaggagatacacagggctattactcatttctttgaaacaaatcaattccctgctgaccttcataatacagccttctctttagttccaagagtggaaaatccttcaagagctgttgattatagacctatagcttgttgcacgaccctttacaaatgcatctccaaattattgtgttctcgattagctaaagtgcttcctaatttagtta

SEQ ID NO: 102125 - DNA, 877 bp, Cannabis sativa
tgctttaacataatcctgaagaagaaaaaatcacccaattttccacatatgcaatattaagtttcttatttttaaacaaaatattattacgattgctccaaatcatccaagtaatattgacaaaaaaaatcttctttcttaaagttttcaaattttcttaataaaaattctttaatattacaatacttatccatattatagaattgatgaaatttagtatccctccatttagatttagctttggaacactctaagagggagtgacagattccactttattgttgatgttgataaaaagtcaatactagctcgttagatcgacgagataaataataagttaagtaaatattaaagagagacacacatggtaataaaattacgtctatttcaaagttttatctctcacgataattataaggggattgactggggaaatagcttagatttttagagagaaattagatagaggtatcctgacctcatgagaacttagtagaatataaaaaatgagcttgtggagctctccttttatagggaaggaggtccattaaaataataataaaataatacaaaaagtatgaattaaaatattttgggatgatcttgaccattgatgatgatctaatgctaaaattgactcttaatgaaaatttttacttttcagagcttgaatcacatctgttagattgtttttgggtaatctgtggaaaaaattgcacttgtcttgagaacaaatttttgacttgaaatcttcaaaatttcaaatgggtgtgagacatgacttgaaaaaatttgaaagatatttaaaatgcaagttgaatcacgtcaatcgaatcaatattgaggtagttatggtcgttttactgaaagttattca

SEQ ID NO: 102126 - DNA, 708 bp, Cannabis sativa
cccgctccgcccccgctttaatttaaacgggtattggggcgggtatgggggtaaatttaagaagcgggtatgggggtgggcgagcaatccacacacccgccctgccccgtttacatccctatattaaactaggaaacaaatcgcgctttgtgtgtgcttattttttatttaatcataattaaattataaaattatattcaatttcaaattttgataatattttatattttttttttataatatgggtaactattcttctaatttttttactcttaataattaatagaggtttttttattttgacaattcaaactactttcttattttttatttttttttgtattttttatagaaattcacatagcaacccacctagcagtcaatgaaacaacctaaattgcaactcaaagtcaaatccacatagtaactaccggagcaaccaaaaccgtaaaacattaaaaaaatagtatatggggtgattttcctaattaatatggtagatcttaatttttctaattattttaattaattatagatatatattattatacagttattttttttatataatatatgtatttcctttaaattaattaaattgaaatacaaaaaaattataattattgacgactaatgatttcaaaactgttgtcatcacatcatcttatttgtagtcattactaaattcaaagtcgttgtcattaatta

SEQ ID NO: 102127 - DNA, 679 bp, Cannabis sativa
tcggagcctatttatcttcgattttgtatgggccttcccaatttggtctgagtacacccaatcctaattcttggtaggctgggaagacccttcttaggaccaggtcaccaatggcaaatttcttatttttgactttagagttgaagtatttttgccactttcttttggtatgctgccatgggtatttaagattcttcccggagctcatccactaagtctagtgcttcttgtaacaaggcttgattcgtggctgggtcgtaagtggttctcctatgggaggaaattatagcctctaccgagaccatagcctcgcacccgtatgccattgagaatggggaatttctggtggtagttttcgcagtggtcttgtaggcccataatacgcgtggcaactcttcaggccagttgtttttgtacgctaagagttttttcttaagggtgacctttagtatcttattgaaagcctccgcctgtctattttcctgtctcacgaccgcagaaaagctctttatgactccgtgtttgttgcagaattgtgtgaactcatcacaatcgaattgtttaccattgtctgagactattttgtgaggcagcccatatcgacacacaatgtttttttttataacaaagtccagagctttcttgaaaattatagtcttcataggttcaacctctatct

SEQ ID NO: 102128 - DNA, 725 bp, Cannabis sativa
agtcttggtataatcgagctcgcattaaccttgggcgaggcacccctatctgccactgttatacaagacttcttaattgttgaccaaccatcggcttacaacatattgttgggtcgtccagcactgattggactaggggcagttagttcgatcatgcacctatccttgaagttctgaacaccagaaggcgagtggtgcgtggcgaccaaatgctggctcgcgattgctatcgcatagagttgtagcataggaaagtcggtcatcagttgatggcgatcttggcagaagaaaatgaaaagaaagaccaagatcttgacccctaagttcaagatgagagaaacctattaaaaccaattgaagaattggaagaggttattcttgacccaaaacatcccacaaagtgtgtatacattgggaagaacctggacaagcagctcaaatagtagttaataagttttttgaaggcgaaccaggaccaattctcctagagccatggagatatgaaaaggatcgacccgaagattatatgccatcatttaaatgttgatccaagttacccagcgaagaggcagaaaaggagacctttggattctgagagacaaggggaactaaaacttgaagtggataagttgattgttaacgacttcatacgcgaggtgttttatccctcgtgtatatctaatcctaatctcgtcccaaagcctaacggaacttggagaacttgt

SEQ ID NO: 102129 - DNA, 844 bp, Cannabis sativa
gagaaaaatcaaactattccaccaaaaatttggccaaaaatagaagaggatgcccacatccaattattattattatgatatttttaaactaacttattttatttattattatcattttttaattatcatctacaatgttacaaaatttcccaatcatttcatctttttcaactttttttcattaatgttgatcaatgtatgctatgaacatattttgaatacttatatatggagcttagtattttccattttcttggaatataatcaagactactatatatagtagaatagaaatgtctctatacaatacaagggtttgtgtggttgtgaaatttttgaagatgggactgtccaattaatttgaattgataattgaaataacccttgttcataattttcattactttgttttcttttttttggaccaatcaatggtactaataaaactcatgtggggtgtttttctaggcttgtgttggatcatataatatatatagtactagtggttcatgtccttgctaggttaggcagttgaattcagttagtacatctttgcctttataattatctaaaactcataataattaattaattacaacgtatgtgagtcttctcaatgtcttcatcaatgtcctttctttgtttggtatacacaacataaaatacaatgatttgattttagctagtaatgaaatgtgcacatataaaatagttattagagcactaatattaggtaaatttggagtgtaatgggctgatttttatagggtaatgtaaatatttaaatttaacttttagatgtgatgtgaataacttctgtgagtatctcactgttaattaatgt

SEQ ID NO: 102130 - DNA, 778 bp, Cannabis sativa
ccactacattggccttcccaagataataaaagattttacagtcataatccttaaccaactctaaccaacgcctctgtctcatatttaaatctttctgggtaaagaagtatttgaggctgttatggtcggtataaatctcacatttttctccgtagagataatgccgccaaatattcaaagcaaacactaccgcgacaagttctaaatcatgagttgggtatcgctattcatattcctttaactgatgggatgcataagtgatgacccaatcagcctgcatcagtacacaccccagaccctatctggatgcatcgcagtaaactacaattttttctttatgagatggtagggctaatacgagagttgtaatcaatctctatttcaactcctgaaagcttgcttcacacttttctgaccataacaattgttgattctttttggtgagttcggttaagggtgctgagatcttagaaaatccctctccaaactgacggtaataacttgccaaacccaggaaacttctaacttctgtaactgccttcgatctcggtcaatcgcttacatattcaatcttcccggatcaaccttgatcccatctttactgacaatgtgtctaagaaaagacaacttagatagccaaaactcacatttcttgaattttgcatacagcttatgttctcgtagtcgctgcagaaccatccaaagatgttgctcgtgctcctcttccgattgagagtacacaaggatgtcatcaataaaaacaataatacaaatatcg

SEQ ID NO: 102131 - DNA, 952 bp, Cannabis sativa
  modified_base (524)..(526): a, c, t, g, unknown or other
  modified_base (897)..(900): a, c, t, g, unknown or other
tctcttaatttcttacagttctctaatcttatattattatattggttgccgaaaacctcggtcaacaagtaatttttacaaaatacaggatccaaaacaatatttattctttcttttatttatttcatttcaagtactactatttaataaatttagcaaaaaataaaataaaaaatagtactatttaataataataatgttaattttaatgagatataattataaacattaaattggtataaaatttattcaatatgacattggatgccgcacttatatttttcaaactattagtatctatttttataggagtaaatattttttggaccattgcgtgcaaaagttacagattggaccatctatattattaaatgacaaaatagaccctgtattttctaaaatgataaaaatagcattctgaacttaatttttaataattttttttatataactaacttgaagacaattcctaacacgaacatatacaaaaaatataaacaattttctcataacacatttagatnnnattcttattaaattttattttgacaaaaaatcaattcaggatcttatttgtactattttggaattttggaaaatacaaaatacagagttcatatacagagttcattttatcattcattttatcatttatcaaaacagagaaaccaattgataacttttgcaaaacacatggtctaaaatagtatttactatttacccattattataaaacaaattgttatggggaaagtgttttatagcatcattgtaaaaataattataattaacgattgatcggaaacaagtttattcataatgaaaataattaatgaatattgttaactaaagtggcatttggtaacacttttttaatcaattttttgtttttaaaannnnaaaagtgaaaatatttttcaaaaatatattctataaaatgtttttacttttt

SEQ ID NO: 102132 - DNA, 810 bp, Cannabis sativa
ttcaattaattttagttatccaaccgatccaactgatccaacatataatgaatgtcggacttgatcaattctattcattggatctatttcatatatatctactagtttaatttggatttattcaatattttagacatggtatttattggatcggatcgaatccatccagtattttagatctagtatctattggattgagttgaattcatccaataaaaaaaaataatgttcattttcatatatacatatattttttttaaatataacaacataaaatttaattactcattcaaactaaatgaaaatattaattagttcaattgaatgttggatgtattatattttcagacaccttatcgaacatctaattcgatccaattaaatattaaaaataacgtttaatccaattcgatcacaactaaatatatatatttgacagtcatttgtaattcgatcgatcgatcattatttgattggatcgatttatgcacactcctattaatatgattggacacaaggcatgctcggcctgacacgtttttgtgcaatgttttaacattggtaatttttaatgtatttaatattgttaatacctcaactttacctcaaatttcctttctgagcttttgagcattatgaaggcatgatatatcgttgatcttgttcgttacaattttttatatgaactatcttagcattaattaaaatttcatttacaccttacaaaaaaattatctaagccactgatattattactctcccttaaatttgttaactttgtttgatagttgccacccgtattcaacattc

SEQ ID NO: 102133 - DNA, 555 bp, Cannabis sativa
gttgtcaaaatttctccgacaacagaaataaaacaacaaacgaaaagaagaacatttagaaaaaaaaaatcgcattaattactttatgtaatttccttcttttttttttctttgaaatcaatgcaattgtgttttcttttttgaattgggctttgaagcccttacttgctacaaagcccaataaaaggggaaagaaatttgggataagttaaaaaatacctcttttttgtatctattaatcaaaaataccttcatattgttttttattaaaatatacccattttttttaagtggattgcctaatataccctcactctctacttaagtgtagcatataatttatataacctaagaggtcttatgggaacatcatccataaaagtagctatatctaaaaaaatatgaaaatgaaggtaaaaattaaaacaagtaaaataaagtggattacaatgtaatttcctcaagaaatttcgttataaaatgcctttgatatttctcaaagacgagagatcaagagcatgtttggtattattttctattttttgttttcaaaaa

SEQ ID NO: 102134 - DNA, 861 bp, Cannabis sativa
agataagaataaatagaaataattaaactatatactgaagtgaagattaatttaactcccttattacaagattataaactctctttttgctatgttttaaggtaagatcagaaatcaatggtctttaaaccttattataacaattttaatttcagtcaatgcttttttctgaaaagaccagtaaacgaaacttgtatatgtgcttatccttaccaactacattatggaccttaatatttaaaattatttttccttctttattaatgctttgagtcaatattacatgattaattgatagttagaaaacatgattcttacatatacgtactaaagctttgaattttgaccatatcatttatatgtatctgatgtatatatatatgattacctataaaaaaaaaaaaagactaaatatcattttgaattttatgttttgcgaaagttaccaattagattttttattttgttaaataataaaatagaccttgtatttttttaaaatggtacaaataggatcttgaactgattttttatccaaataaaatttaataataatccaatctaaacgtgttatgacaaaattgtttatattttttgtattcgttcgtgttaagaattgttttcaagttgattatatttttaaaaaatttgttaaaaattaagctcaggatcctatttttttcattttgaaaaatacagggtccattttatcatttaacaaaataaaatagtccaattaataacttttacaaaatacaagatccaaatatattcacaaaaaaaatgatataatcatatataattattttacaagttaattatatcactgtaaaaaaatctcaataattttctaatttgatt

SEQ ID NO: 102135 - DNA, 559 bp, Cannabis sativa
gtgtcaggctatagacccaatgactaggcttcttcgtgtacgatgtcagaggttgtctcccacgccacgctaccgtggagagcatgcatgtccttgtgtactgagctaaattatccaacggctaggaatgagggaaattcaattgagaatggccctgaggtgacacgcgtctaaagcccaaccaatattatctgacatccataaaagccacatggaaaatatgccacctaccaatctaacggtgagaattcatcccaacgaagatccatcaaagatagcccatgcaatagaattggcctataaataccctagaagaagcacaaaaatggagccttttttcagatccttttttcggaccttcaccttgaagttgaagacttactcttcatcaagaaaacacattactgtaatcctgctataaactccagaatattcctactaagtttcctcttcctcaagaggaacacggtggaatggagtaaaagtctgttgtatttgtatttgtgtaaatagtcaccggccaaagaacctaataaaatggactcgtggactaaagata

SEQ ID NO: 102136 - DNA, 516 bp, Cannabis sativa
atttctgcatcttcctttatgactcgtgtctgttcccacaaaactacaatgaacattaggagtaaataatttgataagaggctttcgacaccaagataatacttgaataaagaagaaatataagatgagtaataggattttccagattctgattcctaaacaaaaatccaaccagcagaccttgcataagtaacgacaatgcacaattcaaatattgatcaaaaatcccatgcaagtactagtgtggtggaaggggtttttcaaaaaattcacaaaaaattataatatatctccctggataaagtaggaagctaaagcaaaacagctcattaacaggggagaagtggcaaatatacatcgccctgtttatgaagctcgtgaggaaggctaccataggctcaaaactaataacagattatcatggtgtagcgaaagaaatgtgtaacgttgagatcacttacaggtatcaagtcaagggcatgcagcagtgcgccttctcatatcttgcaaaagcaa

SEQ ID NO: 102137 - DNA, 877 bp, Cannabis sativa
ccatcttagaggctccatcagatgtcgatgtggagcctcccaaaaggcccaagaagtctacgactacaagaaacgagcctcccagaccgctaatctcgaggtccttgaaactgagactcaggatccaacacctcctccgacccctgaacatactgacgagcatattcccaaaatgactcaagcttccacctcctcgagccaagccctcaaaactctgcctgccgaggctagaaagactggctcagagtacactgcagaatttggtgcagcatgctggcgtcatttcaaggctctcctcccccatgaatgagatttaatcaataatggggatctgggggagatgcttacaaggagtgtatctcataccctctcggtaaatttccttattcttatctgctcacttcttttttttaagatccttcaaaatactcatgcatttttgtttgttggtttccagacatctttcatttcctttgtcacccaacggcgaggcatggaaaaaataaagtatctagagagcaagatcctgaacctgataggccagcgcgaggttgtgaccaagcaatggaatgatgcctaactagagaacactcgtctaaccaaagaactcgagaaggtgaagaggaaccttgaggctgagcttgaagctgctaagaatgaggcaaaagacaaggccgatgcatgccagaaactctaagaggaaattgatgcagccaaggtaacgttcgatgggaaagacgctgaaaccattgaaagatgcaacgttgttggcctacgttccatctactgagcctggatggaaaatcttgggatggatatgagtttcttgggagagtctgaggaggaaatccttcccttctatgagaagactaagaag

SEQ ID NO: 102138 - DNA, 797 bp, Cannabis sativa
ttgcttttactgggtcaagataatagtgtattaaacgtgtttcaaatcataacgttctgggatgtcttgacaggaactcaataccaatgaacttgatagcgaggaggagcttttcccctatctttctgaggctgttgatgtacggctcatgcattcttttcttgaagggataacacttcattttgataatcactgttcttaataacaaagagtacttcagcagtcatcattcaaatgtcagcttctgctcgagagaactaattcaccaagactaataacctcactaaaagatatctgaagctgattggtgaaagtatcaggagcatgcaagactgttatacttagtttgtttgggttcgcccgactgttatacttagtttgtatattatacgctaagtgttttcacagtcattatgcatcacttacattttctcaggcgcagcgaagttgatgtcttgccttgtgcatccaatgccgtatgttttcttgttattacgtgaggcaacaatctgtatatcttcatctcccataggaccttatagtcagcaagttgcaaatatactctgtcatttccgcatttaatgagttattccattaaatgtaattaccgttacatgcatcgatccatattctccttaacttgacacgtgtcttccatggaaatggtagccaaattttgagtataaaaattgccccttaaaaagttcattctaataaaaaagtactttttaaatgcttacagagggtatatttttcataatccctttttttctagaccacacatgccctcaatttta

SEQ ID NO: 102139 - DNA, 574 bp, Cannabis sativa
atataaataaaaagtgacccataaatttctcataaaccattttatttttaataataaaccatcttatttttaatataaataaaaaaccatccatgaatttctcaaaaacaaagaattctgttatataggcacactttatatagaattgatataattcaaaattcgagatttccacacaaattataattgcttcaataaataaatgccttcttcataacatttgtaacaatatctatggggaacaataaattttaactttagacttaaaacaacggattaattctcagtgatagtaaaatatgtgccattataaaatatatatacttatattgagacatttaaattcagttaaaagtataagattaaaggtgagaatgttaaattctttgtacacttatatataaaaaatgtatatagataattgataggtaattattttgttataaaaaaaaaaattttttttaaaaaaaaaattaaaaaaattattaattaatgtaaaatgataaaaagtataagaaaataaatatatgtagatttttttataaaaaagccacgtttttatagaaaaaagctt

SEQ ID NO: 102140 - DNA, 713 bp, Cannabis sativa
taaaacaaatacatacaaataattaacagtccgagaaatataccataaagagaaataatcaagtatttcttttatagctttttattactcttttaaaattattatttaaaattaattttaagtgattttttttttctcttaattagaaataatggaagagatggagtctacaacaacaattttacatatacaacctactaatggcgaagagacagagagaatagtacaaattaatactgctacggctattaatgggcatgacactattatccattttcctgataatgaatcggtcgaaccccaaaacccctcctctaatccgattgaagatcatagtaagccaaatataatctttatgcaattaataaagagagtttcatgtttataccttaaaaagacacatgattatcaatatttatatctctatctatatatctttactaatttttttcgagtgatcatcgttagtgttttgtaatcaatatatactttactattgctccactttaatttgcacccatggttctctattgcattaaaaaattagtcttacctaataagttataatatattttttagtttaatgcaatacataattttataattttaaattatagaaaaagtaataaaatttcaaaactaaaaataaaataaaaaatatattaaatttttttcacaaacataaatatttttattaaattttctcatattaa

SEQ ID NO: 102141 - DNA, 526 bp, Cannabis sativa
caaggttctacatttgcctctccaccctcgccacctgtgccacctgttccagtgaccggagctcctggatgatcatgtgcttcgacgaaatctggcaagaagttgaaatcccaagctcaaaaattgacctacaatctcagttctcctccgatcattacttctctgattgttaccccaactcttgggtttggtgatcatgatgaatcatgttcatccgatcactcattgttgaagtcttcttcttcgaatggtgctccaaatgtcgagaaagctattgcgcctttgcctatggtgagttcttgtactaggtccaaggtgtccacaccaaagaaactagagttggttcagcccaaaggagtctccaaaggaaagaaagtggtgacttcatcctcaaagggaataagtctcaaagaaaatcctccttccgtttcatcattgaattctaaactagaagaagtgactgaggatgttgatcaagaatcagaggctgagtctgattccggtgaagaatttgttcccaaagaac

SEQ ID NO: 102142 - DNA, 715 bp, Cannabis sativa
agcccaatagcaaacatataggctcatacatacaaattgatttggataggacctatcatgttactaggtttatcacagatgaaaaaaattacaaattttacctgttacaaattatttattttgtaacactctactaagttaggcgtgttatcgtgattttatattaaccgtgcaactcgttgctaatcaacgagtttattaaaaattgtgagtaattaaaactctgcttaaatacttataaataacaaaacaaataacatatatatataactgggatcccatgtataaaatacttacagctgattcaaaatacttgatacaaatgttgtcgcctaacgactatacaaaatacaaccagttgtcccaaagatcgtacgctccaggcctaatcgccctgacatgtacaatcttcatccactcgctctcacggctgctcagccttagccttgcccttacctacacatgcaaacaataactgtgagtcgatagactcagtaagaaaagtataatcataatcataaatataacccagttacaattaagcgcccatacacccaactataaccatatcctcgcaccctaggcggtactgagtctagaatgttcatacaacaatactatcaaccataatattagcctatactcggtactctagtcatactatactcgatactctagtcataatattagcctatcgatgtaatcaaacatactt

SEQ ID NO: 102143 - DNA, 956 bp, Cannabis sativa
aggttaagcatctggacacgtaatctaccacatctcttttcatcccataccaccaaaagtagggttttagatcctaatacatcttggtggttcccgaatacagtgaataaggcatggtgtgggcttcatcgaggatttccattttaagtgaatcaatgttaggagcacaaacataagctttatatagcaacatttcattgttcgagattgaaaattccttaggctgaccagccatcacgtcatctcaaattttaattagctcaggatcttctaactacgcctttctgattctctcaagcaaatcagattggtgtgtcaaattatgcaactttccaacacaaaattcaatttccgcattatccatttgtgaggccagttgaggagctatcataacagtggtgaaaacctgcccaggacctctactactcaatgcatcagccacaacattagctttcccggggtgatacagaatctcgcagtcgtagtccttaaccagttccagctaccttctatgcctcatgtttaaatctctctgggtgaaaaagtacttgagactcttatgattagtgtaaatctcgcatttttcaccataaagattgtgtcgccatatttttagagaaaataccacagcatcaggctctaaatcatgtgttggatagcactgctcataatctttcagttgacgagaggcataagctacaactttgtcagcttgcatcagaacacatcccaaaccctgtctggatgcttcacagtaaacaacaaacttttctcgatctaatggaaaagctaacactgcagctgttatcaaatgctatttcaattcctagaaacttgcttcacatttatcggaccttatggattgctgatttttcttagttagctcggttagtggcatagagatcttagagaatccttcgacaaagcgtcgataataccctgctaaactgagaaaa

SEQ ID NO: 102144 - DNA, 659 bp, Cannabis sativa
tctatttttagagaagcatcaattgcagcaaagtgatgaaagattgagaaagtcgggacttatttttttttatttaaatgttgggtttggaagttggattttggtggaaaaaaataaataaggaaaatgtagaagaaaaaagtgcagaaaattagggaaaaataaaagtggcgtttggtaacagttttgtttttaaattttttaattataaaaataaaagtaaaattttgtttttggaaaacaaaaatgtgtcttataattatttttattttttaattttaaaaataaaaaataaaatgtgcagtaaattttatttgttaattttatttaagttggggttgtaggtttgggttggggttggggttaagttgaagtgagtctaaaatattgataaaaaaattgtttaaaaaaaatttaaaagtgttttttttgtttttaaaattttaatttttgatataatataaaaagtaaaaagtaaaacagttttatagaatattggaaagtatttttatttttctattttaaaaataaaaaaaataattaaaaagtgttcaaaagatattaatttttatgttcaatatgaaattttgagttgaattgaatttttttcgtacaattcttttcatatcaaacatggtaaattgatttttttttttttt

SEQ ID NO: 102145 - DNA, 676 bp, Cannabis sativa
gaatggctcggtttcttcgtctgagtcatatcctagcaatttttcatgttctccatcttgatattttataaatttatcctccagctcaattattcatagctggatgggatctacttgttgttgatttgtattttgattgagttgattgcgcaaatcaggtgcatttcagtttagacgctcgcgaaggtcaggctgtcttcgatttaggtgcttgcaaaggtcaggctaccttcgttcataattacttatagatcttatctccgagtaactctccgattgataactttgtgagttacttatgctttctcggtcagcataataatgtcaagatctaattccttctcacgtttgtctactcgatctactatgccctcgagaccttgactgtcccgagcttgagcttacctcatctcgcactagccttcttctctagaagagattagacacatgtcatctatttaagtacgtgtgtacattgtctctatatgctcaggatggacgttgaggatgtcttgggggaagacaacttgtcctaagttgatttctaggtattccctcattatcacgaggaaatctataacaccctaactaaattaggcgtgttagcgtgactttaaacgtactgtgcagctcgttgctaatcaacaagattaatgaaaaatgtgattaattaaaa

SEQ ID NO: 102146 - DNA, 839 bp, Cannabis sativa
ctctctaaggtgactaatctttaggaattctttgcaaattattagcctttggaagtagtttaatgtagcacgtcctgtagtgtgggtcccatttccacatggctcattcttgagcttcaacgtattttgagaaaaattctagacaacatttaccctcaagtcctattttacaattttgtgcaatgaggcttgcaacttgcctctgagtactgacatcacattctcgtaggcaacacgtctgatagtatttaatgctattccatatttttgtcgattttggtgaagacaatttgattttccttttacttgattttgatgctcttattaactgtagggtgtcggattggtgcttgagtagtgtaaccgtctgtttacactcatgcttttgacagtcttgccctagccattggatcgtgaaaactttcttcactagtttgaagtgaaaccatcaaatgagtgacgatctgagtcacccttgagggtctataaaattcctttacctctttctttttaaattttcatcttcatacttcttagaactccagactagccaaaattccagacactctagattttcttttgcactttctctgacggtgttaagctcagttttatcttcatcacgcaccagtacttacaaccatccaagcttcttcttttcgtaagctgcttgccatatgtttttctttcattgttgttgtattttctttttcctttggtgatctttctacttaaatgcaatatttatactgcatgactatactgcctagggtataaagaactctccatttctctttcccttcgccccttgtaccatttcttcttgtgcatggtgcaat

SEQ ID NO: 102147 - DNA, 650 bp, Cannabis sativa
atccttccgacaatagcttcgccactgggccggtagtaacgagaaaaaatcgaaggtctcgaggggtatcgatccccgacgtcggaatggaactcatccccgcttgaagacttaggaagaggagaacctggggagtttgacatttctgaagcaggggaaaggaaaacaaaaaatgtagacgtataaaaagagaaacttagaagctacgctaaagggacaccatgaacaaaggagagtgttcgttcaaataaaatacaaaaggtggccaaggaaagattaaaggaaggaaaaaaggtaaatccacccgcatataaggcattaaatggcaataaatgcgcattcccaggtgtcaaaacacttcaaaaaaaaataatataccacccacgtgtaaacaaacatgataagaaaaatcagctgaaaatataaatccagagaaaaaatccttacaagcccttaaacaataaacaaaacaaatgaataaaaagattgttcctcaaacttgtccttaaacaaaaacgaaataaataaacaagaaaagttgttcctcaaacttgtcacacacgcataataaaacaaagagagagaagaaaaaaaaaagagggcattaagaaatttattaaaatagtggtagggaaaattccctcccatct

SEQ ID NO: 102148 - DNA, 512 bp, Cannabis sativa
tttataggaaaattgtaaaaaaaactttgagcgtaaaaatgtaattttttacgaaaattggtaagtaaaattaagtgagcatgtaaacattaaatattcacaacttgattggttgggatgtatgcacatattatataatagtctaggttcgagtttcatggcacttttcttttatatatttctaaaagtgaggattttaaaatttaaatcgccttagactcatatattattagaactggcgttaataatacacaaactcggcacgaattttatggattaatattgaaaaaattaggcacaaaaataaaaataagtcaaactcggcacgatccacttaacacgtttgacaaagttttttctaaataaaattaaaaaaaattataaataatgatataattatgttaaaatatatatttagtaatttaatatattgagttaaaataatttaaatttaaattttaaaaaaaaataaaaattgtaaaaaatctaattattattatataaaaaaaaaa

SEQ ID NO: 102149 - DNA, 672 bp, Cannabis sativa
tcgggctatcatcaattgagaatatgagaggatgatactccaaagattgatttctgtactaggtacaaccactgtgaattttcagttatgtcttttggactaaccaatgctctaatagtttttatggatctgatgaatagagtattcaaggttttctcgatatatgtgtcatagtatttattaatgatatccttgtgtacgctcaatcagaagtagaacatgaacaacatctagggattgttttacaacgactacgagaacataaactttatgccaaatttaaaaagtgtgaattttggttatctcgagtgtcatttctagggcgcaatgttagtaaagatgggatcatgattgttccaagaaaaaatgaatctgacaaagattggccaagactgaagccagtcactgaaattagaagctttctaggtttagctgggactatcgccggtttgtaaaagggttttccacaatctgaatgcccttaacaaagttaactaagaagaatcaacggtttatgtggatagacaaatttgagacaagttttcaagagttgaagcaacgattgactacaactccagcgttagctttaccatcagatcaagaaaagttcgtggtttattgtgatgcatccaaataggtctggggtgcgttctaatgcaagctcatagggtt

SEQ ID NO: 102150 - DNA, 622 bp, Cannabis sativa
  modified_base (155)..(159): a, c, t, g, unknown or other
tttttgtatttttacgaaagtctatatgaaaattcctattgcaactaaagagcaatttaaatcgtaattaaaaatcgtataacaacctacatagaaattattggataaaccactttagaaacccaaacagtaataaatttaaaaaaaaaaattannnnnaatagtatataaaataattccccttaataatttgtgtgtgttttatttcatattgtttatgtattagtgattaatttatattagttacccttagatgttacaaaatctttgctatttttcttcgtggacctagcacaattattaattataataatgtgttaataggtttagaagatccctatatcggttataagagtgttcatgatatatttattagtaaaaactaaaaagcatattcgaagtttgaaaaatatatgtccctgaaaaaagattttagaaaatgtatgcacatcaatttaataaaagaaaaaaataattaaaacgtggcattttaataatgcacacgtcaattattactccatatgatgaaatcaactattttttttttgaaaaaaaaaatattatgaaatgaactaattaaacggtatatataatttatgtacattaatttggtcatatggct

SEQ ID NO: 102151 - DNA, 693 bp, Cannabis sativa
tatcaaagtttgaggggcatgatttgatagatatcaaagttcggggagtatgatttagtacataaaattagatcaaaagtccttaaatttaacaatctcaataattcatgagaatttttaacggccaaaaaaattcaagtagcacgatttactaaatatcaaaattcagagaaaataattacttgttagccttaattaatatactcatctaatcattccttattattaacacacaatttgaatatacatattatatcaatgaaaaatataaacaacaattaataatgatatattaatataattatttgacatttctcccaccaagcaccaaccatcatcacaaaagaatgagcttttgtgatgtgggatttgtgttgaaataattaattaatactcggtaagtaaaaatatcgagaagttggttattttccacaataattgataagccttaaataatattattcaaactaaagaagacctttttggtgctgatctttcttgcatcagtatatacatcataaaagcaatggaaaatatccgtatcaaaaatattgttctttggtccaaaatgctaaagataataaagctcttgcagattaggatcttttaagtttgatagaatcgaatagcatgacacataagacactagtacatatatatattgccactcaacacgccatatatattttcctg

SEQ ID NO: 102152 - DNA, 616 bp, Cannabis sativa
gccaaaagaatagcaattgtcaatcaaaataaaattggtttagtaattttcaatgtttaacactaaacataagctatcaaagccaaattgatttagtggagattgaaccttaacaccgataatagaatactacaaaagccactaaatcatctcagaatgtacagataatatcttcaatcactggtaccaaattaataattcgagcttattcaaaaaaaaaatatatcaaaataccaacaaaaataatctctttcctttagcagtaaatggtaaagaataattacttcaataccatagtgagtctatctaaagttaatcaattttttttaattcaaagtcagaaaatccataaccatactattaaatcaaagttaagacttcatcaagttactattcaccaactacagcaaccaaactaacgaaaatacaaaaatcctataaaagatcatttatttttaagggcaatgaaggcctaagataactatacaaaaataaattcaaaaacagaaaataccagaaaaaaaaattcagaaaaacatactcggttatgatcaatgacgtcaacgataacaacaacctggttatagtcctttccgtagttgacgagagccactct

SEQ ID NO: 102153 - DNA, 1032 bp, Cannabis sativa
aaaaaaaaaaaaagaaaaaactataagaatacttgcaaattagtagaggcaagtcttctactataattacgatcaaaaaataattaataagcaggccgaactaaataattaaccgtcttatttacctatcgtttaacaaaaatacaagaaacttgagatgggttcaagttaaccttatattactttttttttttcatattttttaattttaaattttcctacaaaatacttttttaaaaagaataattattattttgtaaacttgtaccttaaaaattataaaataaaaaatccccatatttacatggagtttttataaaatattagattttaagtaaaaaattatagttttactaccacacagaattttttacaaacatactgtctttttataaaataactataaaacactaaataaaacaattaaaaacaactaaaaaacaacaataaaataacagataaaatttaacacaatacataaaaaaaatttcacccgacaatacaaataaaaaaaagttaaaaatttaaatatgtaatgtaaaatccttgggtttcatatagcaatgagtccaccaaatgacactaggtaggtactaaacaaatagaattggtctccacttattctttcaaaaggaaagtctaataagaaacccaattgggattttgcacaaagacaaacgatctgcatgcgtgttaaaaaaacatttcatataaaaaagagaattttttaatattatacatttttttaaaagaaaatttacacctctcacccttatttacacctaatttacatatgtgacttacctattttaatactaatactttataacgtttttgaagaaagatatgtatatttttttttatgatcaaaatcatacataattaatattgtagtaatttatgtctcttcgaactaggatagttcattgtctaactaaatagtatgttttgccaaattatatgctgcaaaaatcaaatcgcaagccacataaaataaaattacccccgaaaattttaacgttaaagctatag

SEQ ID NO: 102154 - DNA, 662 bp, Cannabis sativa
taccaaagtgaacggggaaagacccctagagagttctagagcaattttcttgagtggatagctagcaagtagttgatattagtatgagttgaacctaatatactttagaacaaatgatatttatgaaaaattattatattttatttacaaaataaataaaaaaattcaatattttttatcaagaacacaagatactgtatcaaacttgtcgtggaacaaagatacacatggaaggaggagtttcttccaagaaagcttatcgtctagttaaagggcatgctataagccaatccatgagcctcaatattaaaattgcgattaacatgaaaaaaaaaatacttttggaagtttagacgacaacactttaatgttagaaaatataactttttaactcaaaagtgtactcattagagatattcaatattaaaacaaagaacaaagaaacaagatagcttaaacatgcggagatcaatggtacaagccaatttaatcccatccaatgtgtcgtgcataacttccgcttgaagtgctaaaagactaccactatatcatagataaaataccaaaataatatctagcatccatcatttctcatttctaactgacacttagctaatttaagtcatccagaccatctgttccagcttaaatacaaaattagt

SEQ ID NO: 102155 - DNA, 787 bp, Cannabis sativa
ctaattctcggagatgtccctttttggtgaaatcagatagactcgaaactttctaattttactgatattccaccatgttgaaagggttaaatatcaaagtatgaatttggctgccacaagtcgtagctctctctcatttactataaaaaataaatagtcggatggtcgagaagaaattagattctgataagcagaacctagcgcttcaggccacacatcaagttgggcgctgggtgcttcccaggtgacttcctaaggcttgtttgatacttccagggcattcaagactacaaacaaggtctcttaccttatttttgatcaaaataagaagaatgttcaaagcataattagtgtttgaggggcagaaacatgtgcactaggttgcacgttaacctgagtgtaggtcgtagggcccatgtcaacttgggaattgaggccttgttttggctcccaaaggaacttgtttgctccttaagatcacttgtatctttgttatttctgaaaatgaaaaatattcccacttaactttttgggaaaagtgactagaaatagacaaaatgtcaacctaggcgctgggcccagcaacaatgttaacatgggctttgggtctagctttttgccacaaaatggttttgtttgattctcgaaaacacttgtatttcagttatttatgaagagatatatatatatatatatagagagagagagagaaaggggcctatgtgccattgtagttcatgtaaaacaaaaagaaagaaataatgaggagagagagaggcctatgtgc

SEQ ID NO: 102156 - DNA, 707 bp, Cannabis sativa
  modified_base (634)..(668): a, c, t, g, unknown or other
tagcgataagtagcgatatgttatcgacatgtctcagcatatggcatttttgtgttatttttacctaatgtgtgtttttttggcgattaatagtgatattttttacgacatttagcagtttcatccaacataataataagatgaactatttagcaatgtattgataaaattgtcgatatgtggcgagttttttcttgcgacatttttcgatgtcgtttgtaatttttagcgacatgtcattatgggttttaatatgtctctatttttgttttcttaatttttttttttttgtagatggctccttttgaacttaaactttcagttttagagcatttcataggtcgtcttacctatcgggggtcaaacaaatttaaaaatattaaggtcaagtttgaaaccctcaggttgactgagaggataaggccaaccctttcataccattttgggaagctggagatttgactttttttggcgcattgggccacaacctactgttgtgaaagatgaaatttgataaagaatctcaaaatgagatatggttttatgtgggtaaaactgacatgagattcaagcgacttgagtttggactgattaccgacttacctgtgggtagtgctgttgggttttatgcccnnnnnnnnnnnnnnnnnnnnnnnnnnnnnnnnnnnattaataaagatcagaaaaaacattttatgttgcatggt

SEQ ID NO: 102157 - DNA, 503 bp, Cannabis sativa
tcaaaatttcttgtatgttgtatcttttaatccagatgaaggggatggtgcaaattaatgcacaccaatatcttccaaattgatataccattcacaaaaaatagtgtaggctattattaggataaaatgtataaggtgttctttttttacttctcacatgagcaaatataatttgagagagaaaactattttcttttctcctctagttatttctaaaatagctattaaaaattattaatattagtttgtcaaatcaggcttctatatatagtattttaatctcattaattaaattacatttaattgtttaaataaataaatatttatagccgaatttagttactgaatatttataagggaatctctcaactacttgagagaatatctcaactacttttaaaatatttttaaccattttttaaattcaaatatttatacaattaattaatcaactcaaaaatacaaaactcatagagagtcaggcacttaccatgtctgaatta

SEQ ID NO: 102158 - DNA, 631 bp, Cannabis sativa
cttttgagggtgacccatacacttggataaagaatcgctcggctgtgaacactgtaaaggagaggttagattggtgttttgttaacaacctttgggatatttctttcaacacccccacggctcatcatttggactactatagctccgatcaccgagctattgcagtcactattacaccagtgggactacggaccagcaagaaaaaagacgaagctgctttcgtttcgaaaagctttggctttcagaccccgaatgcaaagagataatcaatcaatgctggaaccaatccacttccactgacccgattcaaggtttattgtcaaatttggattcatgtgctacatccttacaacagtggcatcggcataaatttggcagaatgaagaaaaacattgctgaaacacagtctcaagtgaatgttctcaacaacctcaatcatcggaatcgtgaaaatatggatgaattaaaaaaggctgaaactattcttgatgatctattagagcaagaagaaatttattggcaacaacgttcaagggtggattggctaagttcgggtgaccgcaatacaaaatttttccatgctaaggcttctgcaagggaatccaacaacaagatcaaatcgtttatcaat

SEQ ID NO: 102159 - DNA, 606 bp, Cannabis sativa
tgatataggttgtattattagggtcaaaaattgaaatttccctttaatcgcgtgacttctttataaaaattggaggaaaaaaaaaataaaagaccaaaataaagagtgtggattacacttctttgatctacacttaaaaatagagcttgtgtgttctatttttatatcatatagccacacttatttaacattaatcactgattaagagcacaaccctttttataaggaattatagactaattgtatctacatgtttaatgtgaaaaaattagtttgtcttggctctaataagttgatcaaagacattttagagcttgtttatgatttccgatcgtattagtacgaatgtctattctattttattataaccctataataatactacacattatcaattatataattatctgttaatactaatcctgaataaacaacacataattaaattaatctgcataaaatattcgaacattattcagaaaaataactaatacagtaggttaaaaatgagtacatagttaaatattactatacgctactagttgcataaattgatgatattctattgcataataaaatcaaaatgaatatttaacaaattaatgc

SEQ ID NO: 102160 - DNA, 807 bp, Cannabis sativa
  modified_base (755)..(763): a, c, t, g, unknown or other
tttattataatggtagtaagtaagtagttagaatgaaaaataaaaataataaggaaattgtagtattttttttggcttattgagtgagacacttttttttctttcttcatttcgtttattttttctaagaagaacaaaatgggttatctttaaaagtagtgaaagatattgacataattgactgtgaatcacgtggtgggattatgagagtggaaaaagctacgaaattgtttgtgaagtcaatatgagtatgtagagcaaataagttaccaaatcattcatggtcttcatgaatttcagaataataataataataataataaattgtatgaattttcgacgtaggtgaagtaattttaacaaaatttggggaaaaaaacgtgattttaaataataatgaaatttcgtacgagtcttcctaactcggttggtgtatgtaggaggagtaggagtagagagttttaaggttataaagcttgagttagcaagagcagtacatatggatggtccggcccccatatatataaactccacttatataaactccatttgatttttacaaaaatactaaattttggatgaaagtttacataaatgtgtttattcaattcaatttgtattattttgctcatggtgcatccgatttgcactaagtgcagatttaatattttagatccaatctaatttgcacaatagctcgaatccaatattaaattggttattctgaatttgttattttttaatattaaattatnnnnnnnnnatgaaaaaaaaatattttttttcacataattaacaataaaataa

SEQ ID NO: 102161 - DNA, 1160 bp, Cannabis sativa
  modified_base (51)..(56): a, c, t, g, unknown or other
gatggtgtttcttacatttaggacactctggatatgatcggaatgaggacnnnnnnccctgacagccacctctgtttccccgaaactttctatttcccctaatgctctagaagcctcagctttccgtttgtgctcagggttgccactgttggtaaccttactagtattaccactagcagaaggatttgatactgtgacgacatcccttgcagccagctctttaattacttgttgctcggcttcctcagcaattaaggccaagtctaccactctcttgtacacaatgtcatgtgatgtggtaatttttaagtcccgagttattgtagcattcagtctttgaacatacttttgtttttctggtgaaatctataggcaccagatcaccaacaaatttcgacaaccgatcaaactccagagtatactcggctatagacatctttccttgagtaaacttaacaaaatcctcctaatgtgaagtccgcacagcaacattataaaacttttcttcaaaaagtgtcttgaattcttcccatgtcattacactaacatctcgggtctgacccactatgtcccaccagacgcgggcatggtcctgtaacatgaaggctgcacaattcaccctctcagttctcgtcaaccccatatcgtcaaggatacgggtaacagtggtcatccactagtcagccttaataatatcaatacctcccagaaaagtcggaggttacagcttcacaaaccgctcaaacactgaatctcggtgcggcataataaacccctgattacccaccactggcacaggagttggtggtaacccttgatcaactggggcagccggttgcgttaaacgttgcaactcatcttcttgacgaagtatgacactttgcatttcttggaacatctgctgccagtgagcaggaggattagcattaccaactcccgcattatgccccagattttgcggaggtggaggcagcgctggtggatcagtttgggagcccccgggctctacttgcttgccttatttgtctagatgattgcggagggtccataattagtacccccgtaatcaacaaccccagcgagttaagcaccaataccacacttacgcacttattaccttaaacactaactcatctatttacctcatataatattcactt

SEQ ID NO: 102162 - DNA, 1359 bp, Cannabis sativa
  modified_base (453)..(466): a, c, t, g, unknown or other
ttctattggaaacattgagagaaaacgtagttttcaagtactaacaataattttaattgaaatagtgataatctcacattaattatagtggtacccgtttgtgaaatatggttcggacactcctccaaatatttttcccctctagtcataatgatttcatactactaagacgtgaatatattaagattgtttttccattaaattttgttaaaatgacccactaattaaaaaatttaaaatgttctactttttagggtaaatttttaaaaaatttatcttactcatacactcattagtgttttctaaaaatctcttcctacacatctcaaaaaatcgtgaaatttcacaaggatgaaaccaagagcgttgtgaatcacttttctattggaaacatggagagaaaaagtagttttcaagcacgaacaatcatcttaatcgaaatagtgaaaatcnnnnnnnnnnnnnngtggtacccctttgtgaaatgtgctcggacccaccccaaaatatttttccactttagtcacaatgatttcatactactaaggcataaatatgaagattgttttgcgttaaatttggataaaatgacaccctaagttaaacatttaaaacgttctacttttcagggtagattttaactagtttcttcttactcttacactcgttagtgttctcttaaaatctcattctccacatctcgaaaaatagagaaatttcacagggatgaagccaagagcattgtgcatcacttttctattggaaacattgagagaaaaagtagttttcaagcactaataattattttaattgaaatagtgaaaatatcacatttcttatagtggtacccctttgtgaaattttgcttggaccctcctcaaaagattttcccctctagtcacaatgatttcatactcctatgacgtgaatatgaagattctttttgcattaaattaggataaaatgaccccataatttaaaattttagaacattctactttccagggaaaattttaacaagtttttccttacttttacactcattagtgttttcttaaaatctcaccctacagatctctaaaaattcgtgaatttcacagggatgacaccaagagcgttgtgaatcactttctattagaagcattgagagaaaaagtagttttcaagcactaacaatcatcttaattgaaatagtgaaaatctgacatttctgatagtggtacccctttctaaaatgtggctcggacccaccttaaaataattctcccctctagttacaatgatttcatactattaagacgtgaatatgaagattgtttttgcgctaaatttggataaaatgaccccctaattaaaaaa

SEQ ID NO: 102163 - DNA, 814 bp, Cannabis sativa
ccatttttgtttactctttctactaaagaatacaaattttggattatctactgatgattaacttagtgttgcgatcttattcatttagatattttcatcatgacgatacaatgaaaagatttgaacgagacacaaaatagtcaaacataaaacatatgtcactttttaatgttatcaactatttatatatagattgattattttgtactttttttaatagactttaattggttttgataatctcacgagtttaaaatcctatgaaacaccacccagatcttgaagagctcaaacatatcattatatgtaaacgttgagagattttttttttcattattgacaatatattcttattgatatttttggattaaaatctcatgtgattataccaacacttttgctttcctatttgttgttacactttttaaggtataatttaatccatttgtttcagatgaaaacttcatgcaagatggcacgcttgacacgccaatagactggattccaggcatgagagacataagactcaaggacttgccaagcttcatgagagtattatcaactgatgatataaagtttgattttttaagatcacaagcaaagaattgcctgacttcttcagctataatcttcaacacatttcaagagctagaacaagaagtactagattcaatctcagttatgtttccaaacatctacactataggaccactttttatgcttcaccgtcatcttccagttgaaagtcaagtcaagtccatgagtacaagtttatggaaagaagactcgacatgtatcaactggcttgataaaa

SEQ ID NO: 102164 - DNA, 862 bp, Cannabis sativa
gcgaagttggatggccaactttgctttttaattttaagtttaaacttcaacatgtggttgtttgcctacatttcattgacaatttaaacaatgatatgcataagatttattagaagtttccattgctcgtattttttttctaacgttaagtagttaataacctactttatgtgcgagcggcttatcttctgccctaccgtcaatttgtgagcagtcattagttctgcctcgcgatcatcagaagggatctttcaagcaaacttaaatatatttttaatgaccttgtcactttgtatatatctttattgcttacatgagtagttagatcttctacccacgtgttaggtttaagtatctttttaagacactttgatgcctcgtttaatacattcatttagcgtgaggcgttagtattcaactttatgcgcgagttatgagttacatctcatttataacttttgattttcctttctcgtcggataggttttgaacaaaaaattatagttgtttgatccatttctcgtcagaaacgtttgatcagggcgttataacgattcgacccctctttcgtcaaaaaggtttggtcagagagttataacagtttgacccctctttcgtcaaaaatttttggtcgaggaccttttaaaaaactttcaatttttttttttatttttgaagtggtgggtttgcattgtatgatgtatttctagataaatttcgattgatcatacatatatgcccctcaagtaattttaaagagtttacactttataattacttgttgaaagaaatgattattttagtcactgctgaagttcaaaatattacatcagtgatgcgatttacaatcattaatctcata

SEQ ID NO: 102165 - DNA, 645 bp, Cannabis sativa
tacaataaaaatgtaaccattagaacctcctcctataataaatatatataatttaatattgttctaaatgtaacataatgttatatctattttgtgtcaaatttaatacaatttttatcgtgtgtgaaatttaactttttttttttaaaaaaaaaaaattgaaatgtacacaaaaatataacaatacaccatttcaatttttttatttgaaatgccctaatagcgagaaagtgtaaagtaattaaaaaattgtttaagataaatacaacaaaacataaagatagtaaaattaatttagttttcgagttttaagggcatggttggccgaaattctaactttgctaactttgagtagttttggtgacttattcccaataaacatttcaaaataaaactctagaaagactaaaatgactttgttaatttttaaaagcttaaaagtatttttgaaagccttgacaattaagaaggcctaagaattttgagaattgttaaacgagatcaataaacacactgttatttagccaattaagtcaacatccgtctgttgttgagattaggtttgtatatcgtgaatgtgacagtcagtagtcccgtgatccataaggggaaataccgggtaagctgtacaatcccacatcgcct

SEQ ID NO: 102166 - DNA, 640 bp, Cannabis sativa
ggtgatgattacatggtttgaattggattaaacgaataggtcaaagtttcattatgttgcaatttttcttttcaattttaaattaacattgtaaagtagtgatgaatatagtgaaccatattacattgataatcattgttattgctcacaatgtgttttattatgctgttttttttccttttttttttttaaataggaatacaatgatacgttgctgattacatacctagccatattcaccaactgctcaaggtaactaaactcttaggggccgtttggtatgcaggttttatttcatgggaataagtttaatattcctgggagagtgatgaagggaattataaacctagtaaagcaacattactatgtttggttatgtgcagtaatattatgatgatgcctaggaatatgaatactttgtttggttggcgtaggaatggaatgtgacaatttttttttaagacgatcgacttctccgactggctactctggcggagacattgatgatgatgatgatggtcgtctctagatttattctccaccgtccgatcgacgagcgtcttgggagaagatggagaacagaacaatagctcgagagagagagagagagagagagggcgagggagagagagagagagag

SEQ ID NO: 102167 - DNA, 552 bp, Cannabis sativa
aagccatatttgttacttcataaagtaaccatttttgttgttgcccaataagacaaccttaatgatctaacccaacatccacatgtctcattacctaataaggcaaagtcgataccctattctgacatctatatatctcattgcctaataaggtaaagtcgatgccataacttgacatctaaatatctcattgtctaataagacaaagctgatgccctaacctgacatctaaatatctcattgcctaataagtaaaatctgatgccctaactcgacatccatatatctctgtcattgtttaataagacaatcgacaagtatgaaagctaacaacagtttcacttgatatcatgactttaatccactcaatgataatcatcgttccattacctcaatcataatcgagtcataatgataataatcgtatcttaacatgctgtgtggtgcgggtgtacttctcttaccttgaatttttgattcaagtgtatcgatcaacctgaatggggaaagatcaacgatccttggccctatgtcacaacattaaaaaaaaaa

SEQ ID NO: 102168 - DNA, 1218 bp, Cannabis sativa
aaaagcattccaagagcggaaaaactgtgttgtcaaaacccttagacaatgacgagctaggcatgtacttggaaatcacagagcatgttgtaagtgttgtcctaataagaaaagaagactgtgtacaacacctcgtatactacattagtaagagactaatcgacgctgaaagtcagtacgcactcatggagaagatgacctacaacttgctcctagcctttagaaagctgaggccatacttttaggcacacccaataagggtgtacaccgatcaaccattgcgataggttttacgataacctaaagcatcagaccgactactcaagtgggccattgaacttggccagttcgacatcacatattaaccaagaatggcaataaagggtcaagcccttgtatactttgtggctgagtgcacaaattcatctcttgaaatctctcaagattcaggagaaaagtaagagctagagaagaagcgagagcaagatcaacaacgaaaacctaaagaaccaacatggaaacttcatgttgatggaagctgcactgactaattgttcagtgcaggcatttcccttataacacttgggggcaacaactgcacagagcaatcaaatttggcttcaagctagcacatgaagtacgggctgatcgcttggacattttcagtgactctcaattagttgtgaatcaagtcctaggtgaatacacagctcgaggtgaaaaaatggtggcctatttaagcaagatccaagacttgctaagtcagctcaaaaactacacaattaggtagatccccagagaacagaatgctacagcagatgcaattgcccgtatggcaagaagcaccattgccgacaaggcaaacctagtgtcaatacagttcctgaaggaaccaagcattaccatcctagaagaagtcgacatgttggatgacaatccaacatggatgacacatattgcagcttacctccaaactggagccttgcttgaaagcaagaatgaggaaaaaagataagaagaacggctgctaggtatctaattctagacgaagtaatgtacagactaagcttctcaatgccgctcttaaggtgtatcaccaaggctgaggctaagtggctaatgatagaagtgcatgaaggcttctgcagcaaccatgccaggggcaaagtctatccagaaagatattccgaccgagatacttttagccaacaatgatca

SEQ ID NO: 102169 - DNA, 898 bp, Cannabis sativa
gatttttccattatcccttaagtcccaagcctacaatacctttctccaattcaaagtgtttgctgaaaaacaatttggtttaccaattaaatctgtccagtctgattggggaggggagtataggtctttagcctcatttctatctcaccatggagtccatttccaacatccttgtcctcatgatcatgagcaaaatgggcgtgctgaaagaaagcaccgccacattacagaaaccgggctcacattacttgctcaaagtggattatctatgcactattggtggcttgcctttcaaaatgctgtgtatcttattaacaggctttctacaaaggttattggagatatttctccttttgaatgtctttttcacagcttacccgattacacattgctcaagccctttggatacgcttgctacccacatttacagccatacaactctcacaaactctcattaagatctgagaaatgtatctttgttggctattctatgcatcacaagggatatatgtgtgaaaattcagcaggccgcatgtatatagccagaaatgttgcctttaatgaggaagattaccctgctctttctccagctgctcaagatcaagtacattctcctttgttcaatatttttctttctgcatcttttaatacacctatgtctgctactgaccatattcattctcctatacctgatgctgtgaggaatactgtcattgatccaaggccatctgctgctggagttgtacccgtccctaccaccaatgttccttcccaaccaacccactcaactactttcccaaataacagctgcaacattacaaaccctctcattcctcccacatctcatgatcaacaatctgtcacaccaaacactaccatgcctacaccagtacctaat

SEQ ID NO: 102170 - DNA, 575 bp, Cannabis sativa
ataaccaattaagaaaaaattgtattgtatctattatctattatatgcttatgtattcaaacgacgacggcgcttgtatacgtgtatctatcttattttacaatataatgacgtgaaaatgtggtcactggtgtggagatacaattagctgcaatgcaaccaggatcactgttcatatatatatatacaaaattaaatatatatatacacataaatacatttttcggtgggtggtggtaattttgaaatgaaatatacagatagaattaaaacatgtgtagtatgtctacgtagtggttctttaattggctatatatatagagtgtgattttggtaatatttttttttaataattatttgtttttttaattaaaaaaataatccaaaaatatattttataaaaatgtttttattgtttaatttttaattgagaatcaaaattttaaaaattttaaaaacaaaaaaaaaaaattactttcaaaatttgtttgaacagttttttttcttaattaatattttggactccaatccaacgtggaccttggaatacaaagagagaaaagtaaccttttgct

SEQ ID NO: 102171 - DNA, 516 bp, Cannabis sativa
ctcacttggcttgacatttctcaacataagatgatctctagcctcatgaaaatggaggtgaattgatggatctggaaagcccgggggaggtttcatcaagtcagtctcagtaataattttctttcctttgaggttgtggtgagtagcagatgatgcattgtaagctgttgcggcaggattcacaaccgagtaatgcatcgattttatgcccaatgagtgagccaacttggaaacccaataagaaaaatcgtaaaagatgaattggggtttaagttttcgtagaagcaattcaatttggctttcagttttgtccatggcagtgacgatgagaggtattaagggaaaaggaacatcacgagtggtctcagccccagaaggaagaccttccacgtgggggaaggtgattggatagaaagttatgagatttggaaagcgattcaaatgttccactttggatttggttatgggtgggattatgaaagagattgtgtgacctttttcggctagtttgttgga

SEQ ID NO: 102172 - DNA, 675 bp, Cannabis sativa
attggagctaaataaatataaaaaatagtatttttataatgtgcggtgtggtgcggtttgaaccgcattttaacaattcaaatctgcaaactacaccacactgtctttttaagaaatatccaagccacgaccgcatcacaaaaaatttcaaactgtatttttttgcagtgcgggcagtttgagcagtttaagcggtttgatgaacacccctattcattaataactgagattcaaatgtttttaggaatcaaatgggaccattcagtggaaaaaatctagacccatcacccaggttgacactggtattgggcccagtgtctgggtagacatttgtcaacttgggctatttccagtcatttctcccgaaaagtgctctagaaaaatttatttattttagaaataaggaagatacaagtgatctcagggagcaaacaagatcctttgggggttgaaacaaggacccaacgcccaagttaacatgagcactaggccctgcgcccaggttgacatacaacctcgtttgcatgtttccactcctcaaacacaaattttggttcgggcattcttcttatttttgtcaaacagagtagaaaccttgttcgcgatctcaaattcctaagaggtatcaaaactagccccgggaagccacccaagaagcatccaacacctaagttg

SEQ ID NO: 102173 - DNA, 880 bp, Cannabis sativa
  modified_base (86)..(97): a, c, t, g, unknown or other
ataatgctctgctacagaaaggactcaagggctagatatctaaacggaaggattcatattattcagctgcacccaatgtaaggttnnnnnnnnnnnntatgtgtttatttcatcgttttatttcaacactaattttaaatcgattaacgaatttttcgtgaacaactagttatattaccctaatacggagttgattgttgattttgtgtctcaaaactactaagaaaaacaataattttaaattgattagtgattttgtcatgaacaactagtaatgataccctaatacggaattgatcgttgattttgtgtgtcaaaactactaagaagaacactaattgatcttatctcgattagtgactgtgttactaagaaaaacactaattttaaattgattagtgattttatcgtgaacaactagtaatgataccctaatacataaaatataggctttcaatattttagtctgctagttgtatgaagcaaattgtgtattcaatgtatatttgttctttaatcattaattcaaactataacccttttaatcttgaaagacgtatactatatacattgtatacacagtctgcttcatacaactatgttgattttgtgtctcataactatactaagaagaacaataatcataaatcgattagtgattgtgttacgataaatcgtagaatttgaaatcaattagtgaacttgtcgtgaacaactattaatgataccctaatacgaaatcaatcgttgatttttatacagtgttgctacagctgcttttccctacaacaaatttgtgccaaactgacccttatttgtataaaaatatataatttttgaataactaataaaagtatgtgttaattcaaaaaaaataatt

SEQ ID NO: 102174 - DNA, 656 bp, Cannabis sativa
gaagcatgctgcaccaggatgtgttctcggttgctggtgcaatttggagcagaatcaatgtgccaaaacatgcttttcaactatggcaagctgctcaatccaagcttcttacaagggatatgttgtgttgattaaacatcccaattcccaacaaaaattgtgtggtttgtgacattgaaaccgagagccaccaccacatctttttcagctacatcttttcccaacaggtgctgtccttgctttttaaatggctggggtttgatggttggtctaggaactttgatagctggactgtttggttgggcaatacgaggtcgaatatcttggacagagtgagaacacttttgttggcagtcgtggtttaccacttatggagcaaccaaaacacttgctgattttctttttattctaactctatcaattgtatagtgaacaaaattaaaagtgatgtgaaatataggctcttgttgattaatgataggaaaggttctagagtggagacgaatttacttcaaagattgatatgtaattagtaggctttgcggttgttgcttctccgttgagaagtttagtttgtttgtattggcgagttgattaaagaagtttccttcttcttgatcaaaaaaaaataataataaatatatttttttaataaa

SEQ ID NO: 102175 - DNA, 881 bp, Cannabis sativa
tagatctgatcatcatctcatcaattgactcagaaggaattttaatatatataatatatatctatatatttataaatattttgaagctctgcatgtattctcctttatttgtagggtaactatcagtccccaattgtgtttaatgttaggcaaaatggtcctatctcaaaataaaagctaggtagaataaaaaaatgggtaggtgatgtgagaaacttatgaccagcttgaagctgtattgatagtgaaatatatgctttatgctaaatatacacaataaatacattataaaagaaggctaaccgagcaatatattataaaataacttattatcaatcatttttaattcatatgagtattataattaatattatatttatatatagtcatgtatatattttatgtgatgattatatatactcaatatttatatatgcttatttacataaataaatatacaacactgattgttacgtatactcaataattatataaataatgactatttaaaaaaaaaaaaaaagtgtttaggtgaattttggaagctgacattgatatggcttgcttaacaataccagtccgccacaagattttaatgggataagttgaaaaataccacttttattaattaattaatcaaatttacttctaattttatatttaattgaaatatacttctttttatatgtattgtaccaaaaatactttgacataagagagttacatggagagtatcttgaagtgacaggggcgaaattggtacaatatttaaaaaaaaaataataaaaataaaaaaggataatataaaaaaaatatagaatgtaatttcttcatttcaaacaatgtccaatatatagttagtatcatcaataatattacat

SEQ ID NO: 102176 - DNA, 625 bp, Cannabis sativa
gtgtatttgaaatgaactcataggtaactgaaaaaaatagtaacaagggcagaaatgctaaaaggaaataatagtgtctgttacctttttatgtgttattatcgatattggtctaagtatcgagtcttataatgtaataagttttagagagtattgctaactaatcgtaaggcaatatgtttagaagtgctaggcaatgctcgtcctaaaataagtaccaaatcatgagatatcaaaattttggtaaaaaaaattattttgtaatatatttacataacttttttagtatttatgcctaatattacaaaatttgatacagaatcttatatttaattaatatttttattaaaagtaaaaaaaataataaaatatttaatgcaacaattaaatctaataataaaatatttaaaataatataaaaataatgaatttattatgatgtaaattttatgacatattttgattcaaattttgatcaacttttattattttattataggacaaatttaaattaacttttgacacactattaaagcaacttttttaccaaatgagttatattttagcaataaatcaccaatttaatgtcaatttatttttaaataaatgagattcattttaataa

SEQ ID NO: 102177 - DNA, 554 bp, Cannabis sativa
agtaaatattgtgctaaatttaaaaaaataaataaattgtatatttgctaccatgccttggagcaaatagtattttatgttgggtgacaaaaagtaaaatattattaataattactaataaattctctcaaaaaaattacaaataaattaattattttaaaaataactaatagtaatattacaattaaaaaatgtatattgaaatttattattaatgatcaataataaatttgtaattaaaaaaattgtatttgttgtgtgctaaattgacacaatttttagcttctgttaaatttaacacaccattgaataactaatttttttagaagtattgaaatataacacttattttagtattctattagagatattcttagagcattaaccatcaaaaatgccacatgagggcttattataagtgaaccctaatgaaataaggtggaagagaaattagattgatgctaaaatttaattagtgttggtgtcaacataaaaaaacatattttttaaaaaaacaacaagttttttaattaattattgttaatgataagacc

SEQ ID NO: 102178 - DNA, 642 bp, Cannabis sativa
caacaataggagctcgacgaagtctaaacacattgacatcaagtttcttgttgtaaaagaaagggtacggagtggacaaatttgcatagatcgatttattaagaaacaacccaccaacagctacctatcatcaatcttcgataagccatctgatacattatcaaataataatccctcctcatcatcatcatttatcgaaaaaccaaaactatttctttccatggtttcagtctaattctgtctgtgagccatactgggaagaagaaacaatcgtgaccaaaacaacaaaacgcaaaacgcaccaccagaaaacttttcaacaaactacaatgtcaaaacgacaagacttaagcacactgtaatataagtaaaatggtctttatatattgattatatattgtaataaacttattttagtttaagaatattcatataaaattatattcattctccttttatgtttagaatatttttttgatatattaatgacttttatgtttagagttcttgtttttaatatatatatatatataaattaaataaggaatagaaatataagtaaaagttatttgaaattacctaatagatttatatataaagaaaattaatttttttttctattatcttaattaaaaattaata

SEQ ID NO: 102179 - DNA, 1834 bp, Cannabis sativa
  modified_base (1017)..(1020): a, c, t, g, unknown or other
gggtggataaattttgtattgttaatgttattttgtttgttctgtattgttttattttttgtttgttactttaggcattttaaatttttttagaaacgtccaattacagctattatgctgccaaaaattcaatagaattaggataaattttactaagaaaacataaatattgaaggaaaagtacataacacaaataactagttaattactcgctagttctgagaaattaggtgacataacacaaataattatacacacatttatatagatttatcaattataaataacaaaccaaacaaatgaattgattcactttaggaaaaattattccattcccggatccattccaatcaactaagcactaccgtaattagttaattacaacttatacaacttaataacatgaactaaactaaaataagaattatagtaatatataaattaatatgaattaattgtgagaaacctagttagttacattatgtaagtagtaactagttataattagttactaaatattgattttttttttaggatttttgttatggataaatcatggatgcgtgaagagagagacaaactgcgatttcaagtagggttcgatgcatttttagagttttccttaaagaattctaaaaatcctaaacgtattcattgtctatgtgtagattgttgtaatagatctaaaggaaatattacaatgattaaggaccatgtacatttaggaggtttcaatagaagttatactacttggtattggcatggcaaacatttagctgatgatccatatccattaggaaagcggggagtagatgatattgagggtaatgatttcgatgatcatccattggacttgcttgacgaagcacgagaggaattttttaatgattctaaaaaatttaataatattttaagtgatgcagataaacccttgttcgatagttgtaaaaaactaagattaccaataatagaaaaattttacaacataaaagcagaaaatggagtgagcgacaaatnnnntactcaatttttagctgtttttaaagatatcgttctattggacaactttttcctggaatctacatatgaagtgaaaaagactttaaattccataggatcgaagtatgaaaaagttcatgcatgtccgaacgattgcattttatatcgtaaggaatatgtagacatggattatttcatcacttgtggtttatctcaccagaaagtaaacaagagtaaggagaataggaaacttatcccctaaaaagtgatgtggtagatgcctttgattctgcgactgaaacgattatatcgtagtgcagaacattctgaaaatttgatttggcacgagaccaagtgaattaaagatggaaaactcagacatcctgtgaattcccaagctcggaaaaaagtaaactacaaaatttcttaaatacaaatctgaaccgagacatattcgtctcggtctgtttacggatggagtaaatccacatagatctctaagtagtcatcatagttcatggcctatatgcctttttatgtacaatcttcctccctgattagtgatgaaaaggaaatttaatatgttttctttaatgatatcaggcccgtaattacccggacataatatcaatgtatatttagaaccattgattgacaatttagtataattgtatgagaatggtgtttgggcctatgatggttttaaaaaaagaattctttaatctaaaaccagtgttattgtggactgttattgattttctagcttacagtattttatcaggcttaagcacaaaaggttaagaaagttgtatgatttgttgcactaacacatggg

SEQ ID NO: 102180 - DNA, 901 bp, Cannabis sativa
ttgttgcaatataattttaatactttttatataatgtaatttttttttttgaaaaaattaattttgagaaataattttttgaaacaaaatttaatataaatatagtataaattattttattttatttgttttagagctacactatatatatgtataaatttttatcaacaaaatatacttattatttttcaacatttttagaaaccgaatgtagtaaatattaagctaaagaaagtatgattagaaagaaataagacactaacttttacgtgattgagatattaatgaattttagtccatgagtcactgttattaaactcttagaaatgggatttacacttgtatttctagtttttggacactaaaaattccaaccctttgcatgaaaggtaaatgccatatttataggtaaattattggtgggttagacaactctgaacccactagaattctttttagttcaaaaaacccattgatgggctaaaatacaacacattctgaattattaggtcgggtaggtgaaacccaatttcaattgagttgctttatgtacatggtgaaactattgattgtgataggtggggcgtgagccatcgtgggaaatacaaaatattagaatagtgggtgtctgtccaaaaaaggtaatttctttttttgctgtgagcctttccaaggtctgacgtagaggacaagccgcctgattttttgggatcgtgtcagaggagtgccatgtacgtgggaaaatttttgggacaataagtgattcttgacacccttttgtattatgttcacggatgacctatcctctttgagttcacaccatttctcctgttagatgatgattgttgatctgagattcgctattcgaatttgttgttgaaaagcatcatggaaactagac

SEQ ID NO: 102181 - DNA, 796 bp, Cannabis sativa
ttgaatatgtctaagaataaaatactacacattgaataattattaaaaaatatttcacattgaaggatatcacttctagagtgatactttcattacgtccctccacacattcactatgatcttggacactctttctctaaacttgaatctgaaactgaagtatgagcctaggagattagagatcaaaacttagaactctgaaatctctttgagaatagaggaacacctatttatagctgttggcgggatctcctttaagttggtattaaaaccaattgttataactaataatagctttctccaaattcatctgatgagcaaatagatagacctactgacttgacaggttaagtgaatttaatcccaacaattttacctgattagactcacttaatttttgatccaaaagaaatgagtgaggacattaaatttcctgaatgctcaacaagtttagataatgcctaaacttgtctctagttacacttttagtgaaaatatctacagggttatcatgtgtgcttattttcttcacttgcacctgcttggatgacacaatatcccttataaagtgtaatttgatataaatatgctttgacctctcatgaaacattggattttccatgagatgcaaagcactttgataatcacaatagactgtgatatccttagatttgaaacctaactcctctgtcaaccccttaagccatatagtctctttgattgcttctgtagcagccatgtattcagcttctgttgatgacaaggctactattttctgtaggttagatttccagct

SEQ ID NO: 102182 - DNA, 692 bp, Cannabis sativa
  modified_base (242)..(243): a, c, t, g, unknown or other
  modified_base (290)..(301): a, c, t, g, unknown or other
atgtaaggtttctcatacctttttatgtgtttattttcatcgttttagaaattcatattaggatgttaaaaacatacttgctagtaaatctagattctcgtaaaagatattccaacaacgatgtatgtgtgatttggatgttattcacattgatctatgtgtttattgatgattgattgatgtttgcaaattttttacgtaaaataattagattttcgttctggaattatttttattagatnntatggaaaaaattaagcaattcatttttttttacagaacttaatttnnnnnnnnnnnnaattagttatgaatttttaaaattgaaaaaaatcaggaggtgtgacacctcccttacacgcgcgaattcccgattttctcgggtgcgtgcagcttcggacaagcctcatgtccgagttttctcggtcagatgggcaagatttgtctgaattgggggctatgcgcgcgtggacaccctgttggcagcctccctatgcagtaaaataggcctagtacccctgatgcatgcgcgcggatggtatgcattgcataccatcaatgcataccatccgtaccaaatgcaatttttaacaatttttccatttttttatgctttttcatggaattaattgcgaattttttgtgtaattttgtatttagatttttatttttcttatttcaaatctaattat

SEQ ID NO: 102183 - DNA, 1007 bp, Cannabis sativa
  modified_base (45)..(51): a, c, t, g, unknown or other
  modified_base (947)..(955): a, c, t, g, unknown or other
atgccagccgaaatatacaaagaataataaaatatttttgtcaannnnnnntgccaaaaatggaattaacagggtcggatatgatccgatccgattcatatcatataatcttaattctcttgtacattcttacaagattataccttctccatataactaaggaatttttagatatttaataattatactattacaattaaatagtagagagatgttgaattcctcattcttccataatggatgatcgcacttcgttgagttttgagtgagaatttacacatgacctttgtattagcttttttttactaatgaaaatacgtcttgcgccatgtgaaagtaattgatgattttctcccaatgggtgaagaactgcttataggccaacccttgtgggagtattctaagccttttttttttttttgtgaaaatgtcaaatcccattatgaggtcctttttaggaagctttgatcaaatgacactgtggagaatggaacatcctaggaagaattatagctttatcggcttactgattaatttggtgcataatacttaattatttgcatcttggaaatattatttcttcttcgtccacaatttttgtagcaagatatcgagggttcataattgtatatgatgctttggtatcaaaaaatatagctactttattaattggccttgagtatttttgtacgtgatttctaccaacatctatgattagtgcatttaaactttctggtaccaagatgtcaacgacatggttttgcactctgttggccatttgatattgtagtgtagatcctaataaatcgagatcttgatctatgcccacaatttgcagttcaaccttcaaggcatctaataatcgtttatcttttgatgacatgcaaatattgggatatgtaacgtccccgcttcaagccttcattaggtccttacacccacggaannnnnnnnnttatacacgagtacatcactttggctgttttgtggactgatgactgacccta

SEQ ID NO: 102184 - DNA, 762 bp, Cannabis sativa
atatatgattatattgttgttgttcttgcaattatacattgttgaacttgtgttgaatatatgattatatttttgaccaattatacattgttgaatttgtaggaacatgagatttgttgtaaaaataaatctcatagaaaaaacgcttttttttttttatatactttaaaatagtttttttttttttttgcccttttacagatttcacacataaatacatatagcaactaacggaatagcctaaattgcaaccgaaattcgtataacaagccacataaaagccaccgaaaaaacccaaactgtaaattggaaaaaagaaaattaaaaataataatatatgggataattctcccgaaaaaagttgatttttttaagaaaaaaattctatttataaatatatatcttttttggttatttaagattttcacacctaaactatgaatgtatacattattatgcccctaaattttttatcacgttcaaaattatccttgaattactcatagtgttgtaaattgttttgtattttctatgataaaatcattaaaatcgtaaaagtatttaaaatctatacaattctatttttgtattttttttatgtttttgtgtatttatgaaataattcctaataaattttttgataaaaaaaaagcccaattaaaatttttggcctaaggccctcaattggcttgagacgaattgggtaagggaaattttatttacaccccaaaaattcctaagtacaccccattttaataattt

SEQ ID NO: 102185 - DNA, 1045 bp, Cannabis sativa
aattcggcctccttgattgcttcttgaaagttattaaagtcaacttcttttataactaaaaaattataaaaaaaagataaaaaaaaaccgctaaaaacctatttttttcaggattaggaggggcgggccgcggcatggaaatcctatgcctaggcatagccctcttttatttgggcagtgagctttttcatgcgtcgactaatagtattttggccataactctctcgatattgcttagaattagacgattcaagatgtttcgaaaagacaaaagagagatctagaaattttagttttgactttttcaaaaatctgatcagaacatagtcaaatttaagcttgaagttttagctttactttttgcacaattttttctattttatagatcatctttttcttaaatttgaccaatttatttatatattcaagtgttgtaacttgaaattaaagaaaacaagcataattttattccaaaaagtgacaataaagtctaaaaataacataacataaataatataatagactaaaaatatcctaacaaatttcctcaaactacatccttactcgccctcgagtaagactaacaactaaaaacaagacacataaatgaaacaagtcaatcaatcgaaacatgagcaatttttaagtaagataaataacatggttatgaacaaaaatttcacatataataatctagaattttaaatcaatcacaccctcgattcacctcaatcttgtttaattcatgaaatcataattagcacttaacttacagttgaaacaatttatgcatgccaattacaactatcaatctactgtcccaaaaatatctcatatgcttgctatacttactatcatccactaatataaatcaatgtacaactaagaatcaaaaggtcattctagacttgtaatgttaggcttagctacgggtagatgaaatggacatttaggctcacctataccataagtttctctaatcaattcatcccataaaataatctcgttatcccctttcattgtaattacatgagagatttttttt

SEQ ID NO: 102186 - DNA, 1493 bp, Cannabis sativa
taaaatatttccaacacttatcacccacgaacgtccatcaagggccaagccttggcagattttttgatagggggaataactccagaagaaaatccgcttgttcagcaagacgtgaatacttggaagttatatgtggatggagcatccaatgagcatggctcggctgcagtggtgatactaattttgccagaaggcttcgagtttcactacgccttaagatttcaattcgacacctcaaacaacgaggcttaatatgaagccttgatcgctagtttgaagatagctgaagtgttgaaagttgaaatcttatatgccatagtgattcgcaattgattgtaaataaagttctaggggaataccaggctaaaggcctaaaaatgacaaaatacctagagaaggtttggaagaacttggaaaagttttattatttcaaaattgagcaaataccaagagaacaaaactctaatgccgataccttaacaaaactggcctcgtaaaatgaattggatgaattgaaattgattccggtggagatgttaaacaagccaagtatttgtgaaaaggaagatgtcgagatgatagatagcttgcccacatggatgacacccatagtcaactatcttctcaacagacaacttccaactgacaaaaacaaggcatgaaagctcttgtattcagtgcctcgctacatgatagtagagggaaaattatatagaaggggctattcaatgcctctcctacggtgtgttcttcctgcataagcaaacgagatcattagagaaatctatgaaggcttttgcgaggaccatgcagtctggcaaagcttgtcaaagaagattattcgacaaggatattattggcctactataaataaggacactcatgaattcttcaggaaatgtgataaatgtcagagattctcacatatacctcgcatacccccaacggaactaagaatgatgacctcgccttacccatttgcaatatgggggatcgatttgattggggcactccccacaaggtgaggaggagcaaagtacgcagtggtggctgttgacttctttacaaaatggacggaggttgaacctctcgtttccataacctgcaaaaaagttctcgactttgtcatcgagaacataatttgtaggtttggaatacccattaagatagtatctgatagcggaacttagtttgatggtgaattattcactgagttctgagagaggaataagattattgaaagcttctcgtcagtgtcacgacctaaggcaaatgggcaagtagaagcagttaataaaaccttgaaggatactatcaaaaagaagttggacgcagctaaaggtcgatcggtcgatgaattgcctcaagtactttgggctcatagaataactgagaagatagcaacacgacatactccattcttgctggcattttgtaataccctagaattaagaaatagattagcaaaaccctaattagataattatgaataa

SEQ ID NO: 102187 - DNA, 520 bp, Cannabis sativa
tagaagaatcattacccatgtagagatacaacgtttacgtcttgaaatccattaataataggacagttgtttgctcaacagtatacgctaacccagcaagaaaaacaataaaataaaatatttttaagatttaaacacagccccctcattagaaaattataattaattcttgaaatccattactaataggacagttgttttctcaaaagtatatgttaacacggcaagaaaaacaataaaatgaaatcgttttaagatttgaacacagcccccttattagacaattataattaattaccaaaaaacacattaactcgtgaaaattttaaataaataataatagaatataagaatatagcgaaaagagaaattataccattaaatctaaacaaacagttattctatggacgattgtttgatcattcaaaattttaaagaaaagatgaataggagaagtgaaaacaagcttctataggagaacaaaacaattgcagaacgtccgacctcctacagctaaatg

SEQ ID NO: 102188 - DNA, 563 bp, Cannabis sativa
ttctaaaaaaactcctccaacaaacttcttgcttaaccctcctactaacaaccatcaaaacatgctcaaatcaacataaaacaacataactaaacttcaaaaaacaaaatcaaactatgcataatttcactttcttaaaacccaagaaactaaagaaacagttgcttaaagacttaccttggcttggattcacttagagctgctagaaattgctagaattgagaaagaaactagaaccctagctggttctatagggttcaaacaagagagagttttgagagagagtttattttccaactttctatttttgtaaaaaatgattttaatgaaaatatgttgttttatcaaatggatatcagcttaatatcaattaagaaaaatctgattattaaacataatataaacccacaaaagacaaaactctaataggcaaaatgaccgttttgcccttcccaaactataagtcataaaaaatcacttaggggtatttttgtcaactctaaaatctcaactatttttcgacattctcaatgtctaactatattgtcccactatactaaaaa

SEQ ID NO: 102189 - DNA, 636 bp, Cannabis sativa
  modified_base (341)..(343): a, c, t, g, unknown or other
caatccgtacgatccaatccaattaaatccgcaaagtgtagatatatatatatatatatatgcatttgtacaaattggattggattggaaaatttaaaatctgcactttgcgaattggatattgattgatatgtaaaagtaactgatctaatcacatacttatatttataaaaaaatgttaaaaaattatatatataattaaaattttaatgtaaaaaatagtaatttaaaaatctaatacatataataatcatatattttaaaacttaataaatcaaatgtatattccaatcttatatataatttttttttctaaatacaatttaaaataaaattaaacnnntctttatacatacaatttttttattctttgaatttgttattttatttagtttaatttgttattggagacataatataacaataatttattgtattttgttgctaattatgtggaaaaaaaatattttctgttataaatattaaataagttaatattgagaatctaacataatcgatttaatctatatttttgccgattaaattaaattagatttaagttattgtgtggagtggataaaatctaaaatataaaatttacacttaagtgtggatcggttgcactatgaataaaat

SEQ ID NO: 102190 - DNA, 652 bp, Cannabis sativa
aattatttaatgttaattaaatatttatttttcacatcattaaaatcacttaaatatatatatatatatataaaaaaaatattgacaataaaaccacttaaaaatatgatttgtcaatattattatataatttattaaatattataaaggaaaatcatcacatatactactttttgacttttttttttaattatttttacgattttagttgttatctgagttgctacgtaaattgcgatataaattgcagtttgaattgagttgcgattttagttacttcgtggattacattgtatattttgtaaaaatacaaaaagaaaattgctttgaaatgtataaatgaaaaaatcctattattttttataaatataatgtatttatgttaaaaatattgttatacaatacattcttgttaactactgtttaatctcaattttttttgttataggtttacaaaatggttaacagaataactatagtaaaatactattatgtctacaaaaaatattaatttaaggttttaattttaacaatgttaaaattgtggggtaaaacaatactaactttatcatatagggggtcaacaatactaactttgccatataggaggcaaaacaatattgttaattctatttttggcatatttaattga

SEQ ID NO: 102191 - DNA, 807 bp, Cannabis sativa
catcaagaaatggaccaaccaagtgtttcataatccgtaaatatgatagaaaggtgatacacacttataatctcaccataagatttgtagacaagcgacatgctacaacaaaaattgattggaaactacatcaagcctaagttcaccaacctaaaaataattcaaacgccacaagacatcagagaagaattgaatgataagtatggcataaaaatgaactgtatgaaagcatggagaggtaaaaagcatgcacaacaagaatgtcagcaaactcaataaaccatttttgcagcagcaaaagtatagcactagatggttcaataaaaggatggaacaagtgcatgcccataattgtggttgatggaacattcctaaaatcaacatatggagggacattgctctcagcctgtacacaagatgccaatggacacatttttcccctagcattctctgttgtagattaagaaaataacaactcatagtgcttgatctcagatagacataagagcataattaaggtagctgctcatgtatttctagacataactcacggctattgtgtttaccacctatcaagcaaccttaaatcaaccttcaagaagaatgtcagcaaactcaataaaccattttttgcagcagcaaaagcatacacagaaatttttttttgaataatatatgagcgagtttgatagcttagataagcgtgttagaccgtatttacaactatttggataccacaaatggtgaaaggaccacaacaaacacaactgatatacaactatcacttctaacattgttgaatctcta

SEQ ID NO: 102192 - DNA, 1422 bp, Cannabis sativa
aatcacaattaactgataatttccaaattagctaagcgggctttacagttacagtcattatataaaaaaccaattaaaaaggggagtataattttccacctaagggatttaccaaagtcactagaaggcgagcaatcactagatgaagaggtggaaggatcataatattcgctaaaatcgctatagcctataattttgaatatgtcaaaaggctcgattggttctaaatcccagctcacatctatgtgacctgccctatcttccatagtactgtattgctcgactataccataaaatgactcgtgacaattgatctggacatagaatctatggtaccaactatcaaacttttgagcaatgcggtccacaagaatagaattccaagtataaaaattaaaacgcgagtcttggaaggtaactaatttattacgctcagccctaactacagtaggtgaccaaccacattgattacctcaggatgctctaagatcgaattcctgaggggcattgctttgaaggtattgtgcttggccaagcgatcccaggcctggtcttcgggtggaaaaattatttgctaccaagaagtatacttgggaatcttgtaatcgcaggtgtattctttgtcagcgagaaggcccgctaatcacaagtttactttgttcaaaaggaatttgcatgatcgaagactgtaagggaagtcatcaggcgcctgtgcctactaaccatctcggggtaggagtaggtctcgtcaaaagagttgtcaaaacaaacaaaacgttagtcaagtacttgaaaaatgaagactcatgtaaataagtaagaggagaacaatcaattacggagtttgcgaaacgtggttgtgccaatgggggagagactagacgtctagaagaagttgtccttgaaagacactttatttggcaagtcaacaataatttttggctcgctagcgtgagtaccaagataggaaaagcctactgtggcattcttccttgatggaatggccttgactgagtaaagatactcaatctctacgggtgtgggacaaccccaattcataattttgtacaagactttcaaactagcgagaatcatgtaggagatgggagtcagctagaatggggcaaccccaatgtgatttatatagtctttgaagtagtctcgaagagggaggatggcccctgcacaaatatgctcaaggcttcaggcacccatactagttgaaccactagtgctagtctcaccattggttcctgggttactactaacaaaacgtgtaggggtagcaactgaatttgccctcttgtactgacctaacctggcatgattgctcgagtgcaattccacaagtcttcagcatgtcgcccgtatagcctgagatagattgcaccttcgattctattaactcagcctcgaaggtga

SEQ ID NO: 102193 - DNA, 553 bp, Cannabis sativa
aacatacttgttagtaaatctaaagtcctggtaaaataattccaaaagtttctcccctcagacagctttcttggggatgacgacaccaacattttagtgcaagactttgctagggctgaattagattggctgggtaggattagttttactgctttgttcttgtgtgcacagtttcttgttaacgtgctaatacttatttgtttgtttcttgaagcagctaggccaatgcacgagcttttggctaccctcaatcagacttacaatcccgactcggcccagcctcaaacacaagacttggaggtgatctccgagaatccctcttctagcctccctttaagcaaaatcgttcttattgataaagacggggaggtcgaggaggaagaggatggcgagactctcacccctatggaccggaaacataaaggcaagatggtggaggtcgaggctgccaagaagcccaggggagccgacactctggcccccagttctgattcggggatcccacctgaggcggaggagtacactgttcctcctagtattgtcctgaccccca

SEQ ID NO: 102194 - DNA, 560 bp, Cannabis sativa
tgatttagaagcatgaaaagccaagtaccctcatgatctctagccacaaagtcatatctgaaactatttgattgaggaaagagagctcattttacattagctttaatcatagcatagtttggtttagttcattgttcatctttctcacaaacaacaaaattgttatgaaaaaaattacaatgctatcatatattcttaaagagtaatgctagatacacacttaaattacacacaataatgtgtattaaatattagccatttatatttttaagtaaaaaccgcgtcacttttgattgtatggttaagattgaatggacatcattgtaagtaattagtatgtacaattcaaatgtgtgtttctagtattactcattttccaatgatttctcttgctctctctctctacaatttttagttttgagctaaaataggggatcccttttctttttccttatttttctttggtgaaagatggtaagaaattgacataaaataattacaacaaaaattggatgcttttaactaaatatcaaatttttttgtttgttgttaaatgttag

SEQ ID NO: 102195 - DNA, 576 bp, Cannabis sativa
gggtatatgatactcagtgggagagatatatactcacggggagtatccccaggtattgttggttttacaaaaacttattatgaaattctattgattgattttagccattagatacactcctaaaatgaatctagcccttcatttgttcctcactgcgtcaggaaaataatgactatggcagctagtgggtggtccatatgtatgtgttccttcttgactattgtaatagaattttatatatacaatgtgatttgattataggctcaacaccatcatgtcttgtgtgtcaaaacaaggagaacatttttgatcaaaccgattattgttttgattagattatgataaaaaaatattaataacttttatttgtataatatgtgagtacatatataaagttataatccttctaatgatgaatcaataaatagcttattcttatccttgtggtatatagattatcattagtttttcatggttttggtgagagtctcagtgaattcacattactattagtttctcattcttcccatagcataggaaatgtagtaaactccatctcttttttttttttttttt

SEQ ID NO: 102196 - DNA, 647 bp, Cannabis sativa
tgttgtaggcttaactataggggtaaaaatttccttaaaatcaattcttgcttcttggagatatctctttgctaccagcctatatttgtatccgttaatggaaccatctttgttcattttgacatgatgaatccacttgcatcctatgacattcatggatggatcataaggaactaatgtccatgtctttgctttgtgaagagctcccatttttgtattcattgcattgttccaatgtgaattattctaagcattcttaagattctttggttcagatggcagcatagtttctagaaggggatgcattgttgccatgtaagactttggcttggaaatgccatgttgtgacctggtgcgcatgctatgtgtcattgttcctataatagccacatgtggttcattcgtagaaggtgtaggagggtgtggttgagatgtagctgttggagcattggtgggtaaggtaactggagaggactgtggtgcaggtggagtaataaggttgctgttttgggttatgggaggtggagtggtttctggtgtgtggttctgattcgtgacaagtggagaaggttagcttgttgtagaaatggatggagcatgaatagagattgtcacaagagttttatttttgggtgagtgttcagttt

SEQ ID NO: 102197 - DNA, 691 bp, Cannabis sativa
agttgtgtgtgtatgcatgggagttataaaggcctatgattgtgtgaatacatatttatcctattgttaacgaagcactaataatatctagtacttttaataagtatatgttgccagtgacgaattcaaaatttgtattaggtgagaatttaattgttattaaaaaaaatttaagtatactttatttaatttatttatttttgtggggtttatttaatagtgaatagctttcaaattaactgaattaggagtttagtactctataatatataatatatatatatttatatataactaacacgtctggaacagcgaaatttgctaaattctttgtaaccttcttatgttaatcgatttgcaaataaagctgttcattgtgttgttagggcatcttatttatcgtcaggttgtacgtataatgagttgaatgctccgtcttttttgcgtgacattgttaattaaggctgaggcctgttaatcttaatgaatttttcttattcaaaaatagattgggttaaaaaaaaatttgtaaatgagtatatattgatgattactaaacaaattcaattatattaattttaaaaatattaaaccattaaattttaatccaatatcgaataattaaaaaaaaattaatttttatactaaatttatctatttaattacaaaaaatatcaaacaatgttttttc

SEQ ID NO: 102198 - DNA, 747 bp, Cannabis sativa
atgaagcaccccaacttgaactagaatcacccttagacgctattaggatccttgaactttcataatcattagtgtcttccctttcaaaaaaaattctagcgttgtcaaacttcttattgaaattcttgaaaattgaacaatttctaatcaaatgatcaagcttgttagagacatagcatcttctttgttttgtctttgatctagtctttttgttttgatttcactgatctttgttctctttcttggagaatttccctcgagcaaacgatccacatccgatatgtctactctttttcatctcatattttctctttatttctttaggcatcaatgcattctgaatctcctcaagtgttaatgtttctcttcaatacatcatatcatctatgaaatattcatatgaatatgaagacaatgaattaattcaaaataatgattgcttaatcttcatctccaatcttgatgtcagtattctccaaatgaagaattatcttgtgaaattcatccaaatggtctttaatattctttctcgatcccatcttaaatgaatataaattctaccttcaagaacaattgattgggcagagacatttagaatgttacagtcttttcatttaaaatctatctacgtaccttattcccgagacttagaataatggcattatgagttttgtttcttttcatttaaaatctttgtgctctcagaatcaaactttgcataacccatatggtgatagattttcatca

SEQ ID NO: 102199 - DNA, 599 bp, Cannabis sativa
ttttttttgtattgttattgtataaaaataaaaattattaattaccatatttttttttaactaatattgtatattatatgataataatatatataaagttatgtgtgtgtttttttgtagaaaaacaaatctaatttatttatttattttgtaaaaaaatatactactttagttcaaagatggactcatatagtattaaacattaagacatatatatgtttatatatatatatatatctttttcattattaaccgaacattaaattttatattaatcaaagctatcatacaacaagatttatatcacacaatcaactatctataattaaacaaaattttccaacaattataattacaaatgagacaactttatatacttaatagtacagatgcaaacccttcttagtgctcattatatcagaatattaattaattaaattaactaccctttttatcgaaaaaataaaataaataccatcaataattatatataatcttctctttgtaaatttatatatatatataaaaaaaaattaattattacattaaatatgtaaccaggttacatttacttttaatggttatatcattattaaata

SEQ ID NO: 102200 - DNA, 511 bp, Cannabis sativa
aaaataaattctacacataaatcatggaagaaaaagtgaagttgtataatttatatcattcttggagactttacttttggtctccaaggaaaaaatgtgtacatggtattggcatttatgcatttacaaaattgtagtgatcagtggtattgttagctgttattctactatttctatctaatcattgttaagcgcttaagtgagaaacaagttcgacgaaggcctcttcattgcagggaatcgtaagagctcccattggatgatcgaatccaaattcttgttcagcttgatttagcaagtcttggaatgatggctggttcaagaatgatatagggatagcaaatctcttcattctcttctccccaacataaactgccaaatacccttttggaacatcttttgtacttgagaaaggcttctgaatgagttgcttggcatgaactaagctaccaaaacgaaaacccattgttgtaaacttcttcaaagaaagaaaaaagtgggggatggagta

SEQ ID NO: 102201 - DNA, 520 bp, Cannabis sativa
  modified_base (220)..(220): a, c, t, g, unknown or other
ggtaaaataaattccaacagtgttcagggttcctttaatgtatctcattgtccacttgagtgtagaccaatgtttttctccaggatataccaaatatctgcttgtaacactcatggcatgtgtaatatctggtctagtacaaaccattgagtacattaggcttcctacacagctagcatagggtatattactcacgtgttttctttcagcatcagttgtnggagcttgagtagcagatagcttgaaatgttgagctaatggtgttgatacagctttggagttgaacattccaaacttatcaagaaccttcttgagatagttgcattgagatagtatgatcttttgaggtctttctctgcttatgtcaatgcctagtatcctttttgctctccctagatccttcattttgaattctttacacaacagctgctttaacttgtcaatttcagacctttccttcccaacaaccaatatatcatcaacatacaatagtagatagattttgttagaaaaatataca

SEQ ID NO: 102202 - DNA, 566 bp, Cannabis sativa
  modified_base (501)..(505): a, c, t, g, unknown or other
aaaaaaaaaaaagcaaatgtatttttaaggtgtgaagatttaagaaataaaataaaaaaaaaacggtttactatatcacttttcttatttatttatttatgcaaaatataaagacaaataaaaataataatggtaagagtaataaataaaagaggaagatttctgacgctatgtttggtggaaaattgttactatgacgtttgtgtctgctatatagacacgtgtcagtttttggcgatcattgtttatggatttgattttgtcttaagtaagattattaagtagtgattagttcaattattagatgacaatattttaattactagatttgttggtcactttatgtgacacaacttttttgtttcttttggtggaagccagctacttattacgtgctatgtattgattaaatttagcaattcacctaagctgagctttatctcaaaaacaaaagagttttattggataaagacacttgttcaataataataataataatannnnnaataataataataattataaagatgctttatttattttttttttgactagaaattttttgt

SEQ ID NO: 102203 - DNA, 678 bp, Cannabis sativa
  modified_base (628)..(629): a, c, t, g, unknown or other
cacaatctttctcactatgattgaatactggcttgatttgagtgggcaagatactcttatcactataggggttcgaatttgatgaagcaagagagggagatgtatttcgaaatagagagagtatgctcttttctttattcaacataatacactgaggagcttaagttatccttctagggttaggtttaacttatatggaattaaaaaaaaaatagcttaaaatcacttaagtggccagccacttagtggaccccactaaattttaattttaccatttatttaataatttatctttttctttcaaaactaccatattttaattttgaacctttaaatgtcaaatctatttacttaataattataattaattattaaataaaattatcatttatcttatttattcattagaccttaaaaagtctcttaattaataaatacactctaaaacatcttttcttctcaattaagcccttgcttagtgaaaatttataaataagacatagtccaaattagaattacaattagttaattaaaaccaattaactaagccaatattatctcaactagtgtggagaccataatcttatataatcaagcttccattaagtagatctaaaatttaccaagnnaatttcctaacttattaatttctctttatttcactatagattcataatt

SEQ ID NO: 102204 - DNA, 777 bp, Cannabis sativa
atggattgtagtagttctaccaaccaaaaaaaaattaagaataaaatttttttggttaaagaaaatgataaaaaaaaaaggttgaatttgattttaatattttttatattgatatactgtaaaaaagatatattttgatttttttttaattaagtagctaacttaagcatataaatttaaatttctcttttgctattggtcattggattaaaatataatagtttaatatttttaaaattaatatttacagttaaatttgtttagcaaccataaatagataataccaatatattgagagaagtattctatatatatttatatgttactatataataagaaggcatatccacaagtcattgttggcttttatgtttttttatgatgtttgtattattattgctatgtgacaccttaaagtattcaatacgatattgatgtggtacttaataatttgttagttgtttttgaaatctattaaattaaagtttgtgggagttaatattgaaatgcacaaataaagaaaagttttcttcctctctctctctcgtgaacagctctgagggctgaagccatggcaaaatcgcgaggaagaggacgggggagaccaaaatcatcagcaaggaaaacgaaacaactctcaaatgtgaagtcgaaggggtcactggtacaagaggatgatctcagtattgatcccttagcactttcagaagacgaagaggaaattgagggggtgaatgaagatgtattcagacaactttcgcctaaatcttctctgac

SEQ ID NO: 102205 - DNA, 942 bp, Cannabis sativa
tattagtcacaagttctttttatcacatataatagttgaataaattttttttattataaatattatttttattcaacacttgattttaatattaattaaaaaaaatagacaacaaatatatttaatattaatagaaatttttttacttaggtataataagatttatcgaaaattaataaataacaaataaaatttaaatttaaatattttttttattatatatgaatagatataatatgtatatatatattcatttagtactttgtatttttatgaaaaacatatttggtattttgtattttcaatattacttaattagtaccttatattttaaaattgtacatgtttggtaccttaaagtaaaatttatcaatttaaccaaacagatctcagttatatgtaattaaataattaaatttgaattcagaattcataaaattttagacagtttgattatattgataaaattttatcaaaaaaatttgaatttagagtaccaaatatgtatgattttaaaatacaaggtaccgattagcattattaaaaacacatagtacctaactagataaaacatagggtaccaaatgtgtagacacatccttatatgtaataaaattagatcgttgcttgtaattagaatttgaaagtttcttccaataaccgatccaatttaattaaaatacaattactcacttccactccaatccaattgtaactgcatgtccaattttttgtaattggattggatttgactgattcagtgtaattagatcggttcagtgtaattagatcataaatcagatcacaatcgttattgagagtttgggaaaaaaaaaattaatgttaaggtaaaaatatttgattacaattaaaatcactttgtcattatactttattttgcaaaataatatatctaacttataatttaactaaatagagaga

SEQ ID NO: 102206 - DNA, 616 bp, Cannabis sativa
tctttccttagtcaattttcttgtgattctcgtgagcaataaaaactcgaagtagacgtagcttcattaccgtcacgacacggggagtgaagtactatcaatctcttgagtctctctatttatttacttaactactaattcttctcgtcaatctagcaatcaaatgttgaccagatttctgcgtcaactcgtttgatttataaattcttcatgaaacacattagaggtagagaaaaacaaatatgatgaacataccaaattgatcgatcaatcaagatgaaaacattttgccacttgaattttaacatgtgccaatttatgtcctaaattttttcagtcctttaaaaatcttcccgaactattgagattgttagatttaaaattttctgtccaattttacttacaaaagtatgacgtggatgaaagttcaaggggtctgatttagtacctgtcaaagtataagtatacgatttggtagatttcaaagttcgaaacacgatttagtacatgaacaatattcgcattagtaaaattaaatggaattggacagaagtttttaaatccaacaattttaataattcaggtaagataatttgatacatataaagttaagaga

SEQ ID NO: 102207 - DNA, 540 bp, Cannabis sativa
gatggggctcatgtgttgtgggattgttcttggagtaaggaggtgtggaagaaatgtggtttgtgggatcatgtggttaagctcagatcaagtgatgtgttgttagttttccaatagctccataaggtttgttctccttccacttttgagtttatccttgttgtttcctggcacttgtggtcggttaggaataaatatgttcattggggttatcctcctaaggtgggagatattgtggagtggtgtgggaagtacattaaagattttcagtaggttaatgggaggactactggtgggggggctcggcagcaccaacaatgggagccgcctggtgttgggtcctttgtggttaatgtagatgctgggttttctttacaaaatgaaggggcatcttcgggtgtggtggtgcgagatgatgtgggaatggtcaggtttgcttcggtcaccgctgtgcggtttgcacggtccccgttggtggctgaacttttggcgattcgggagggtttgcgggcgggtatacaacgtcggctgccaatgttt

SEQ ID NO: 102208 - DNA, 636 bp, Cannabis sativa
aaaaagccaataaaaactatacagaattaccttgaataaatctagaattgtgagtgtgtgcaccaaaccctaaccttcttaccgcaaaccataacacataaatacttttgaaaaatataccaagtgaagtctcaacttcattagcctcacaagtccttgaaaatatttaaatatggctaaggtattcactcatagagttggaaatttgaaagtgagcactcaaaatggatagatcaatttatgacaaacatttgaataaacattgaaacgaagataggttataaattatttggacaaccaccataaagagtaccacaaaccaacttttcgggacttttaaacgaaaatagacaatcttttacatttattctaggagccaaaacaaatgaaaaatgaaatactacaaattttttttttttgttttttttttaaacaagaggcaacatattggatataatgatggaaatgtcctttttttttactaagagaaaccatataataatggaaatgttgctcttgtatccgttttttttttattttttttcaacaagaaaatatttacaaaaaggctccctaataagatttgtctataaaaattatccctcaaagcaacatccaatcaaaccctagtaccat

SEQ ID NO: 102209 - DNA, 1304 bp, Cannabis sativa
aaataattgttcaacaaaagaaatattcatgaaaccacttaaaaacaactaaaaataacataaaaatagtaaaacaaatgcacatatatacaacaaaaatattgtttggaataaactcaaaatatacacaattaaaaatacaaataaactaaacaacaacagtacccaaaaaaaacataaaaataatagaaaaacaattataaaacacataaacaataacataaaaataacaaaaagatagctataaatcaacagaaacaaaaaatcaattctttttaaaatatgcaaattattaataaattaactctaaataaactacaaaacattcaaaaaaaatatgctacttttattaatcatgtaaaaaatagaaaaatacatgagggatgctcttaattttttttagttagagagatattaattaaatttttttataaaatgtgattaattaaagtgttgtgtgttggccaaatatcaaaatacctaaactacccctacagtacataatcaaattaaccaactgtcggtgatcgagtcacacacactagctcctgcactactatttttaaggctcagttggttcgataaatggtggttgcttttcaagggaaatagattgagagaaagagtgaattctcatgcttttaagtgaatgagagagatgagttatgagtgcccattagtgtttgtattggtgtgatattgtgtgttatcatcaccataagaagaggtcaattacagaagcaagcttcttaagttgtgtaattgaattgttgtaatctctcattaaagatcatctaataaagattatctaaggcccttgttgtggctgttttatggtcggggatgtaggcaaggtgattcactattaccttgttcgacccttgttaagttcttgtgttctttgttgctggtttatgtttgctgttatattagtgcattagcttgaaatggtttcattgatcattgttttgtttaatgtgttcttaccgaggtgttcattcacaacaattggcatcagagctcaggtttcttgaagcaagaacagaataaagaaagtgatccatggcttcttcacgctttgaagtagacaagttcaattgagccaatgactttgggctgtggatgattaaaatgaaagcatttcttgttcatcagagtgtataccaagccattgacatgtacaaggaagaattaaaggagttgggagatgacaagaagaagattaaagaaatcgaaacaaaagcacatagtgccatcctgctgagcttgggagatgaagtagtgttgagagaagtgtcaaatga

SEQ ID NO: 102210 - DNA, 562 bp, Cannabis sativa
aaaaacaaaaacaacaaaataaaagctgaccctaaacaaagactggaacaaaattgttttggtataatttttaggggccgaggttgtatggattttcctgatgatgccaaaccgaccgtaattacaagttgttcaaggtctgcaagtaattgttggcccaatggaactatgtccacaccagaagagagacaaatcacagcctgattaaataagtacaatgcagctagcttcacaaggttgccagtaagaaaattgttgcaacttgttttgttatgattcacgatgagattttgcgatctgtgttggtaacttgtagaagaattacaaactaagctttctgatctgctgctacgtaacagagcacatatgctcatatgtgctagtggaggattttgctccagcacaaagaaccttgcaactatccatatttttaggtcaatcaaactaagttccagattgcttactgatacttatacatttaaaaataagtatttaaaaatctatatttaaaaatctagtaatctatttttaaattaaaaattatacctatattaaccacaaa

SEQ ID NO: 102211 - DNA, 829 bp, Cannabis sativa
gtacgacatactgaactcagtcctccctcacatgaactaccccaactgtgaatgcccatttaccttatttaaataatggttttaagctaattattatattagtttaacctaattaaaattaattagcaacgtaattaattttagaataaataaaaatgaattttttcattagattattttaaaattactttagaaaagcacacttagtttaatgaaataaattctagatagtaatttctaataaaaaatttatatattttctaatatttaattaagtagaaaaataaatttgttaaaataaataaactaaaatatattataattagaaaattaataattatattatgaaatttctagatagttattttttaagtagacttttggtatttttctatatatatttaattaaatagaaaattaatattttagttaattttttcaagacacttaaatatttgatatttttcttaagacatttaattaaataggaaaattatatttatgttgaaagctcagggaacgtcgattgcgacaaactatgccatcagagttctggcggttggattttctccaacaatgagggataatctgatgtaccctacgggtgcactgccctgaccaaagaagccgtacatcacttgatagcagggtgctaaatcagtaagttggagacccatattttcgtatgttgatttgaaaaaaatgttggaagaggctccattgtccaccatgcatcttgccacagtgatattcttgatttgtgcagtaatcaccaaagtcgttgttgtgaaacttgttgggttttgtgccctaaataaaaccctttaca

SEQ ID NO: 102212 - DNA, 720 bp, Cannabis sativa
ttttaatcctcatattgtatacattttttacattttttttttcctttttgatttagtctaagagcttgcattaattctctttgaattcttttcaatgcttgtagcctaatctatccaaattatattagaattttttttaaaaatttcttcaacccaacaaataaaaaatgaaaatatatatcttattgtattggaatttcaaatgataaatatatataattaaaaggtaaagaagatcgtggttggggcgttaatgagcttagttcacgagtcaatatcatggagctctttggctatggattattttacacaagtgttcttgccaaaattctaaccagagtgtgtggcgaaaattcgtaacactttgcacaaagggtgaaaaccctatttataggatggaggggttcttaggtgaattcagacccgctagggtttgaatgtgaaataaattcactaatggggtaaaatacattataatgtataatattgacattgagtcgagtaggtgatgcccaaattggaggttttttgttgtctgtacagtctgatgttggctggcggtcatgtgccactgatcgtgtacagtaaatgtcaaaagtagtggacgttatatgaaaggtgggtttcttttttgttgtgcacctttcccaagtctgacacagtggcaaactcttgattcgttgggatttggtatcagtggggtgacacgtaggactactc

SEQ ID NO: 102213 - DNA, 1066 bp, Cannabis sativa
  modified_base (302)..(305): a, c, t, g, unknown or other
tgcctcaaatatgcatgtagtatttctagtttatgtcccaatgcaaagtttgacccattcgcactaagaaggtcctggaaactaaagccttagttgagaatgtcaacttgggcgctaggtgaaaccctaggtgcccaggttaaattttgggatgcaggttcgtgtaattttagctcacataacgtgaatttgattgctccatgtcttcatggtacataatactgaaagatagtgagttgaaaacgggttatcgaagttcaaacttcccccaaaattcccgaagtcaacttggacgcagggcnnnngacccctcccagaccgacttgctatgattcgggactactcaactctaagaagtcatatttcttgccacgtgtcaaacattgatgtccacgtcataaatgatactctggtgtaaatagaatttttgtaaataaaagttttagatcgtaaaattataaataaaacataaaaatagagtattttaaaaaattctcgaaaaatttatttatttattattatatatttaaattaacatctaaattttaaataagttgataaacaatatcataaatacatattataatctaagacattaatattataataaattaaaatcaagccattgttgattaattgtaaaatgtaaatactccaattattattattattattatttaatattatttctcattaaaattataattaatcaaatgaacattttcataattgaccaaatatatagctatttaattataagtaatttcggatcacctaaataatttgaatataaaaaaatattatttcacacaaaattttcaataattgttaaattaagaatatgtgccacctctcgaaaaaagaaataaaaaagaatatgtgtcatctagagctgtaaatatgagttagattttttgacacagaggctcaagcatgactcgatttgaaaaaaatatgtgcttagacaggatacgaaaaaatatgagtttaggcacgacacgtaagcacgaatagaatagctcgaaagcataaaacattaaaatgtccaataatttaataataagaa

SEQ ID NO: 102214 - DNA, 508 bp, Cannabis sativa
gtttattttggagagaattgcttgcttttggagctttgaattggaaggattttaagcatggaattgaggtagtttctagctgagtttatttgaaatttaatgttgaagttcttgctagtttttatttcttgaaagcatgttttgtgttgttgtgtttgtgaagttgcgtgtccatggttttgggttttaatcttggtaaattgattatggaattgcatgaattggtggggatttatgttgttgagcttggagtaaaagtaaatagtattttctagcttgagaccttgtgttcttagggtgtttgctgctggaaagttgtttgaattgagtaagttgaagctcaagttcaagagcttgaagtttgcttagttgaagcttgatttttgggttatttgtgcaatctgattttggtagtttaatattggaatttaatgcttgagttgtatattttaaccttataatgtttgctagcaactttatttggtaatttgaaagtttgatcaagttt

SEQ ID NO: 102215 - DNA, 873 bp, Cannabis sativa
tatttcttgaaggagaaatcagaagtgttcgagaacttcaagaaattcaaagctctagttgaaaaagaaagtggtcttcctattaaggctatgagatttgactgaggataagagttcacatcaaatgagttcaacaaatactgtgaggatcatggaattcgtcatccattaacactgccaagatccccccaacaaaatggagtggcagagaggaagaatcgaaccatactcaacatggcttgcagcatgctaaaaagcaaaagaattccaaaggagttttgggctaaagtgatagcttgcgcagtctactctgtgaattgctctccaacaagaagtgtacatgagaagacacctcaagaagcatggagtggaagaaaacctggaatttctcacctcagagtctttggaagtattgcttatgttcatgttcccgatcagaagagaacgaagcttgatgaaaaaagtgagaagtacatcttcatcggctatgattcaagatccaacggctacaagttgtacaacccaattactggcaaaactatcatcagtcgcgacgtaaagtttgatgaagaagattattggaattggaacacagaagtagacgagtatgattttcttcctttctttgaagaggaagatgtagtggagcaaccaaggatggaagaaaaattttaagaacctattactccaccaatctcgccaactaaaaatatacaagaagattcaagtgagagctcaaatgaaaagatgtctgattaatggtgaaattattggtcttaaatttaaaataaattaagtttaaattaatattttcatgaaattaataaaatatatttttatattgaaaatattttagggaaattatagtaaatg

SEQ ID NO: 102216 - DNA, 566 bp, Cannabis sativa
tttaatattttttatggtattagacatgtcatttcccatatttgttaacttttttgttttgaatgccatatttagtggcattaagttttcttgccatatatatgtaaagtactatagtatattttcccatatttatgtaaatagccctaaaaaaaatagtaatagaagtcagaagtttcaaataagtaatttaaagaaagaggtatgtagaatttattttcaatgtaaggttgtaacacccgacaaaaaaaaacaaataatattatatcacaaaatgtaataccatgtttaaatatatattttattcaaaatgtattatattattattggtgtgaaaataattattttgttaatattatttaattaattatggtatatttatttttcttaaagctagggcttggcccattttatcaaaaactaatacggattggttcataaccagattgatatataaagcttattaagataggtatatattgagaaatttacatatatactattttttgaccaaaactttataaatatactgggacacggcaaatacaacttttttactgtccaag

SEQ ID NO: 102217 - DNA, 513 bp, Cannabis sativa
ttccacactcaactcacgaataacaggctttcgaatcgctcgtcgccgcttcgccatggaaggggcctggagagaaaacgcatgcctttttttaaaaggtattgttatcacttttttcaacttgtttttttttttttgaagcaacaagttattctagaaatatggcggtttacaagtaagaatatcagaagaaataatgtacgtaatataagtagcaagctgattatgtttgggagtttattttcgattgaactacaatatagttaaatatttaaatactaatattatatttgataaattggttaataaattagagaattatatatttattaatgtgttgttggaaatcacaataattattacaaactcattaatttgttactttaccaaatataacctatcgctgtataataaactagggaatagatctgcgcttcgcgcggttttaataatttttttaaaattatatatttaaaatttatttcttaattattaataaaattaaatctaata

SEQ ID NO: 102218 - DNA, 502 bp, Cannabis sativa
gtgttaccaaacggcaccaaaggttttgattttgatttcaataattgaggagtagaaattagaaaaacatgataaggttagggtcataatttacacgcaataatctttttatctagatattaagagagattaacaatgatcgatgtaaatatgtaatgaaacttttcctttccttgtacgttttggatatataaagtaaaaactatgtgactaagttaccttgtttgagaaaaatattctatcgtacttgtaacggtgtgcagggtaaacccaggaattacagacaaaatgtactgaaccatgccctggaacatctttcagagtgattgtttttaggaagaattggctatggtgattgttttttatcattaaagctcctggaattcccatgctttcttcccagtcaaagaacacactgaaacaagtttctttcgccgttattgtagtgttcgcggtgatccatttctctaaataggctgcatttccatggctccccctgtcg

SEQ ID NO: 102219 - DNA, 543 bp, Cannabis sativa
agtgagtctcagatgagactttaggtagaaccaatgttgagtaagtctagacaaagtctaaacttgtctattgtcaaactctttgtaaaagcatccgcataattttcttgagtgttgatctttctcatagagacttgtttggattgtatcacatctctaataaagtgcattttgatatcaatatattttgtcctctcatgaaacataggatttttcatgagatggagagcaatttggttatcatagtgaactgtgatatcttctaagttgatattgagttcacttgttaatcctttaagccatattgtttcttttatagcctttgcagcagccatgtatttagcctctatagaagacaaaaccactactttttgtagattagattttcaactgacacaaccaccataaactgtgaacacaaaccctctcaatggttttctagtgtccaaacaacctgcataatctgaatccatattatggctgtacatcgatcggtttgggcggtttatcctatatattttctaacccaatctaaagttcggg

SEQ ID NO: 102220 - DNA, 778 bp, Cannabis sativa
catcagtaataagatactaatataaacaagctcaaaagaactaatatttcaacatcagctatgatataatatggatcaaatattaaaattaaggatagttagcatgtcctttccattaaaagataatgtttccatagatggtgaaatccacataaccacatcttttaagcttaactttcttgccaaacaccccatcaccaagcgcgacgctatataagaacgagtaataactcggacatgcttccatttagctaaaggagaacgacataaccttttacaattgtctggcatgacaagcaccttcaagtacatatgaattcaacaaacatatatttaaaacaaaatatacaaaaataaaatactgcaacataatcaaattagagaataaaggaaaatatcaaatataggtaagtgacataccttatcagaaagtcgcagtgttacaatattccaagagcaattgagattcataaaaaaactcagcatactcataaaccaatttgtgtcatatttgtgatgatgatcagaaattacgaattctccattcaacaaattggttgactctattgatatgttgcaattaatattacctttataacaaaacgaaactaagtttggcaccgatttaattgtgacaaccttgatcatatcactctcctcgttcatatttctcaatttgaggcttttcaagtgttgatttgagattgtaagatgctccaaccccgacttatgataagaattatcaattgtcaaatcctcaaggagtgggaggcttgta

SEQ ID NO: 102221 - DNA, 582 bp, Cannabis sativa
ttgggatatgaactagacataccacaaacatatttgaggcattaaaatcaaattcagagaactttcattttttagcacccgaacacccggtgcctgagcaccccagctcccaggttgacaatctatcaatttgggccacttccaagcatcagatcaaaattaggaaacaagtgtttcagggaagaaataacccatcttgggtgccagaataagggactagcgcccaggttgacattttgtcaacctgggccaattccaaggagtttttctaaaaaaaattctgggcatattctccattttcaacaaagattaagattcaactatttccagtgacacatgaagtgaactactataaattgttaggtctctctaacttatacttcattctcgccagtccaatgagcgggtgtggcttagaaatatgtgtccaagttttttagtcaacattttggtgcttccattaagagccacaactcaagggagtcacttacaagatggttgcaacacgctcctcaagtattgacagagtagcccaaacaactggccaacaaattaggggcacactagtcactgaagttggaa

SEQ ID NO: 102222 - DNA, 1684 bp, Cannabis sativa
  modified_base (573)..(587): a, c, t, g, unknown or other
  modified_base (1632)..(1636): a, c, t, g, unknown or other
atgatatactatagacaacaaaaaaatatactatacaacagaacatatatacctgcaataaaaattaatataatataatataatattattaaaaaaaaattatatatatcatattaacaaccataaaataattctaccatacgtgccaaattatataccatatttatatataataaaataaaaactaaacatgcatgatctaaattaaaatgatatacaatacaatacaacctatatgtcatataacaaaaaatatgtaccttacaatagaaatatatatataataacaacaaattaaaataaaaatatatatagcatgctaataaaattatatgtcaaaaaatagaacttagatgacattttaagaaaatgatataccgtataacaaatacatatactatttaccaaaacatatattctaacaataatcataaaaaaaaaaacatattactaactatactatatctaaattatgtatcacaattaaaatatacaattaaaatatacataccatgtatacataccatgacaacaaaattgtatataaaaattgtatataataaaataaaaacnnnnnnnnnnnnnnntaaaataaataatatatcatacatttaagttatataaaaataataatttaatatatgtagcatgctaataaaattatatacctacattaattatttctattatattaacaaaattatgttcaactattatacatcgcaaaataaaaaatgaatatcatctatgaataataatataccatacaaaaagataaaaatatactgtacaataaagagttatttgcggcaaaacctccttaagtggctaggtttttgcaactaacccccaattctaaaattttggtggtaaaacctcctaaactcaagttccgttagcatttagccctttccatccatttttgggtgttaagtgccaggttggaatgtccacgtgtacgcaatgtacacatggcacaatttttattggtctacgtaaataaatatttttaaaaaataaaaaattaattattttgaaaataaaaaataaaaaaaattatttttctttttttttttttttttgcatttttatcttcacaccctctctctcttccccaaaacactaccaccatagccaccatcaccgattgtccctctaatcaaaatcaacactaaaaaaataacttgagatctaaataagaaacacaagaaaaataaaacacaaactaaatccaataaagcatcacaaaaaccattattttttcctggaagtttatcccaaaccctcaaaaacaatttttctctcatgttctctctttatctgaaaccagatctaaagcctacttccgctctcttcaagcaacaccaagacccagtgaacgaaagactatcggcatcgcgaggatctgcaacaacaaatgaggaagatgcaacaccttgagaggagttgcgatttcgtcttctcgtttgaagagatcccgtttttgtggtcaccttccacgagaacgacgagtaggtcgtcggggagagagagagggagaaccacgagtcaattcgtacggtggtggtgggttgtgggttcgtacggtggtgatgggttgtgggttcgtacgtgttgggttttatgccctannnnnaactccatttcaatgtaatctattttgttcaacatcaataaagaaaca

SEQ ID NO: 102223 - DNA, 854 bp, Cannabis sativa
  modified_base (770)..(770): a, c, t, g, unknown or other
tttctattttctattttgtctaataagagagactaataggctaagttataagggtagaaaataagagcatcttattctatttataaaatagcttcaagggttaagtttagaataaaaatagaattaaaaaagataaaagaattgctttaattgaacctttatggtcgaaccctagtgggccctacagagttttaagtttgccatttttttttaaatttatattttcctttcacaaatgtcatattttaattctaactctataaacgtcaagtctgtctatttaataattacaattaattatcaaataaaattgtaatttaacttatttattaacttgaccttaaaaaatctcttaattaataaacaaaccctaaatcttctttttattctcaaataaatcatttcttagtaaaattcagaaacaagacatagtcttatttagaattctaattgataaattaaaactaattaattgagtctataagacaaatatgatctcaactagtgttgggaccatgggcctatataatctagctccaaataagtagttctagaatttaccaagtaaattctctatcttattaattcctcctgactccactatagattctgaattgtactcctgattagatagaacactctattcaccaagaataaatacgctatatattatctattgtttcaatccaaataatcaaagattctatatagatgatttacatcgagtaggaaaaaatttatcgtcctaccccttaatgtattttatcctnaaaatacttagcttcctataaatgatatttcagtgaactaatataattactgaaataagagctcttccatttatgtctattaag

SEQ ID NO: 102224 - DNA, 600 bp, Cannabis sativa
agacataccatcaggacccggggctttattactactcatagcaaacagagtagatcgaatttcctcatgagagggtcttctagtaagatcggcttggtcttccgcagacaaacaatcccggactaaatcgttgcaattaagggcaatgccattgtccgttccagtgaagatgccttggaagaactccatgaattcattcccaataagctcccttttggaaatccacacattgtctctattgaggatgcactcgatggcattcctcctaccttttatggaagctgagaggaagaaaaattttgaacatttgtccccttccttcagccaagagaccctggctctttgtttccaatacacctctttcctcattcgggcttcattaagggtagcgcgcaaattccgttcagtctcccactgtctagatcccactggcaaactctgaatgagatcaagtcttctttccaggtcacgaatgagggtatccagattaccaaactgggacctattccaatgcataagagcgacccgagtagccccaattttcttgaagaccctagcaggggcccaagggaaatcaaccgatttccacgcagaatcaac

SEQ ID NO: 102225 - DNA, 792 bp, Cannabis sativa
aatgccatcacccatgtgcttagtgcagccacttccgatcatagaccgattcttcttgacatgaatggagggaccaactgtaacagaacatactttaagtatgagttaatgtggggaagagatccaaagtgctactgggtagtgaagaacgcctggaaagagaaacttcatcaacacccaatgataaatttctaccgaaaactcaaaaatactaaggatcaattggcgaggtggaatagaattcagttcaagttaattggcaaccaagtgaatgaggcgaaagcagctctacagcagctagaagatagagttcttgtaaatggagaggatcttgcaatggctagagacaaactgaccgaagctctcacgagggaggagattttttggaggcaaaagtcacgtgttaagtggcttcagcaaggagacagatgcacaaaattctttatggccaccactgtgatccgtcgtcgacgaaattatattcagcagatccggttggaagatgggaggtgggaggaaaacattaccaacatagctaatctgttcactgccagattcaacaacatatacattgataaaaaatcagcagctcttccggctctaaactgccttgcgaattgcatcatctctactcaagataacgagcatgtgaaggctttcccaacagatcgagaaattgaaaggtgcatacgctccatgggacaagaaagagccccgggaccagatggaatgcccacggggttctatatgcagcattgggaaacagttaaaagagatgtccttgatatggtc

SEQ ID NO: 102226 - DNA, 766 bp, Cannabis sativa
  modified_base (32)..(34): a, c, t, g, unknown or other
ttaaaaaatatattaagagtaatttttaaaannnatttaagtttatatttttttttttaataataaagtgtatttattattttatagagcaaatagaacttcctttaattttattgttgagagttaaacaatacattaatattatataagaaaaactttcttcaaactaaaaaatatcattatatatctttagtgcatatcttacttatttattttgttaaaatcatgtcaaaaatctcaattagtgatgtaaatatatgtcttgccataaatataagtcgaattgtaccgtgtcgtgccataaaaaatacaatcgtatcgtaacgtgttataaaaaatataaatcgtattgtgctatgttataaaaatatacaagtcgtgtcgtgctgtgcttagacttgtgttgtgctcaaatttgtatcaccctttactcggactgacctgttttcttatatgagctcaaattagtattctatttttcctcattttatatacataatcaatgagataattactaaatttatgtattttttatagtttcaattattttttatataattttttaataatttttttacataaaattacataaggagatcatcaaaagtattaaaatttgaatatttactaattgttgaccgaggttttcggcaaccaatttaataatatataagaaagctgtaagaaatttaatgcatgtgacttttacgtggttggggcattaatgagccttagtcaacgagtcttttttatttatgagagtatt

SEQ ID NO: 102227 - DNA, 634 bp, Cannabis sativa
gattttactagcatgtcatcgacgtagactttcatatttcgtccgatttggctttcaaacattccattcaccaattgttgatacgtcgctccagtattttttaaactaaatggcatgattttataacaatagagtcccatgtttgttacaaaacttgtatgttcttggttagagatatgcattttaatctggttatatccagaatatgcatccataaaggtcatcagctcatgtcctgctgttgtatccactaactggtcgatcttgggtagtggaaaacaatctttggggcatgccttatttaagtctaaaaaatcgatacaagtcctccaagtgtcgtttggattcgggacaagaactaggtttgagatccacgagggataaaagacctcgcgtatgaactcattagtcaacaacttgtcaacttcttccttaagtgccccttgtcttttggaatctaatggctgtcgtttttgtctttttgctggatagctgggatcgatgtttaaatgatgacagattacattagggtttatccctatcatatatgagtggctccatgcaaattgatcctggtttgcccttaaactcaattaattgctatttagtttttcttccaaatttttcccaatgt

SEQ ID NO: 102228 - DNA, 524 bp, Cannabis sativa
  modified_base (395)..(395): a, c, t, g, unknown or other
tttcttaaaaattatcatattaattatataagtactgatacttaattacaccaataaacacatattaagcatcatagttactttttagtatttctcttaaatgataaaatgtgatgatacagatcaatgatgacgttacgctaaatggttatattatgcttctagttttggtttctttcataatgaagtggaaaaatgtatgtttttataccctaaacaatttcattaaaaataataataatactataatatataaaagtgggcaaaatatgtgcataataaatttagggtgattctacaatacaccccttaaaagggatgtactgatgcacctttgacttgtttcggcattcagaaaaattaatttttagtctaatttttttttcatattcatntacgttatagctatttaagataacctacaaaattttaagaaattcagagaataatttacaatatagaaaacaatgttcaacagtttattttagacgcgtataaaataaaataatcacacgtgcaataca

SEQ ID NO: 102229 - DNA, 1052 bp, Cannabis sativa
ctgtgcttccctgtattgagataaataagtagtaatccattggaccaaatcacctgcatctggattagcattcgcaaaaaactttttaattctaaattcccaaatagaccaaagagtacacattagcaaagagaagtcatcagctttcagatcagtgtatgcagataacataaaatctttaataccagtatttctatgcaagatataaaagtggtataaaggagaaagtttccaaacctgtctcaccctggaacagtctaaaagtgcatgtattacagtttctagagaacaaccaagaaggagagggaacaactttcttcttacataggttaaaggctgtaggtaagatgtgatggaaagtttgccaaccaaagtttttaactttaagaggaatactttgatgccagaaaaatttccaccaactattatagaagctagtattagaagaggagggaggtaaagaagaagtattgacaaaatgataggcggatttgactgtattccaaatgaggcaatcgactttgtttgcataataagaagaatatataaaattttgtttgcataataagaagaatatataaaataatagaataaacaattaaattattttattatacatctaaaagcgataagccattactacaaaaatgacttctaaagtttaatgacacgctttgttctaaatatttttagtgaccctccactgtcagatggtaaaactcttacagagtctctcactgtcagatggtaaagataacaactatattaaaaaatgctatgaattgtatctattttttttttaatttaaaaaataagaacaatatcaaattttttattcaatttaattatatgcaatattaataattttttatttttagaaagtaaatagtatttcgttattattctttttccttaaaaaaattgagaaggctatatatatatggaacacttcttaatgggtaacacctattaatgggaactaaaaaaattaataaggtaataatctaataatcttttatggcaagtttctaattattatttttttaaaaaaa

SEQ ID NO: 102230 - DNA, 660 bp, Cannabis sativa
cctggacaacacttctaattacgagtagggctttaataacccacaaaactaggagataaacttaagttatttacctattcttggggattaattaacatgttatttacatattattttaatgtgcaacaaataggtgatatctcctcattttaagggatattaacatatcatctcttgtaagatctcgtatataaagagcactaaactaaacctaacgtctctacgctctgaagctcttagtgctaagttcaaatactcaaacttagctcatcatctcttctacacgccattagtagtgtagaagagactaagtctccctcatctcacctacttgagatttaccttttgattctcactattgtaatcttaagagtgccactccagaattcacaacacttgtgatctgagtggtattatctctaatatcaatacagctaaaaggcgagtaggtcattacccgctaactaaaggggtcgaacctctataaaaatactgtgtttttttttacttgttcttattctgtacacgtggtgatatccatcataaatacgattttgttgttggttgaccaaatttgaggtcaataggatgcactatgagaaaaatagtgcggattgaattggatgaacatccttacacgtagtacgaatagactagtct

SEQ ID NO: 102231 - DNA, 1097 bp, Cannabis sativa
ttgggtttaaagtttccctaggtcccccaggcatcattttgtgtttttttttatttggctgtgaagaaaataagactttttggtttgtgagaaatgggtgtctgagaaagaaaatttggggaaagaggtggttggatctgatatttggatcttggttttattttgatctattttgtttcattttgagaaagaagattctagatttatttgtgattttggagttagattttctttttgagatttgtgatattgcttatgatttggatttagtttacttatagttggctaagtggtatgtcttttctaaggtattagtaaagtaaataaggatcatatgtaaaggtttacattcgactagaccgatattaagagagaaaaaaatatcatacgtattgttatatctttttcaattcaatatcacttatttgaccatagatcaattaatcatctcaatcttgagatgattaagctttaagctaattttattattagagttttttgatttttttgttaccaacttacctatcagactagcttatacttatagattgggaactcggtagtttaattgagtgtgagcgttaatcatagatatggacatctatagattgcatgattatttagaagtgaaattatggttttctttaagcttggctaaatgagattaaattgtgaagtactcattttagtaattatattagtttactggaatattatttacaagtatctaagtatttgacggataaaatgcattgaagggtaaaaagataattttgtccctactcgatgtaaactatctatagaagatcattgattgttttgattgtaataatggataactcatagtgtgtctatattggagatatagagtgttccatgtaatcaagactgtagtttcaagtctatagtagaatcatgaggaattaataagttaggaaatttacgggagtaaatttcagatcaacttattggaaacttgaatacatatagcccatgatccctgtagtgcttggaataatatcatcttaagtagaactcaataaattaatttagtcaataaattaaaattagtcaactgagtatatcatgtttaagaa

SEQ ID NO: 102232 - DNA, 585 bp, Cannabis sativa
  modified_base (349)..(367): a, c, t, g, unknown or other
ctctttcatatatatgtatatttgtaatattatgaactttttttttttttgaaaatgtaatatttaaactttcaatatatattatataaaagttatgtggtagattgccattttatttttattggtataggaacatctctattttgatcacttataaaaattaaattcaaatttattatattattgtgtacattttggttataacttacattctactattttgcgaaaaatttagaataattttagtgttaaaaatagaatttaaatattcagttgcgagtaaaatgacttactataactataatatagactcttattacaatttttttttacttttagttacaacaannnnnnnnnnnnnnnnnnnaaaaattgtgactaattataaactatcattcttatgttgtgactaaatgtggctaaaagtattagtcacaaaattacaaattttagtcataatacttgttgtgactaaaactcacatttagtgacaaaaattattactaaaagtaactgtttttttgtagtgtctcattaaaaaaataataaacttataatttctttaaatatcgtaaagataaatgt

SEQ ID NO: 102233 - DNA, 591 bp, Cannabis sativa
aaattctgggtccgccactgtatgtagctaatgcatgggacacataattaaacttatttgtagaacgtagaatggtattacatgaatcaccactaataaaaactagaaaaaattaattataaaaacatcaaaaatataaccatgtataaacaatcttactaaattaaatggctttaaaatccaagagaaagtaggatgagagtgcctcctgctgaacaaaatctcgcttttcttgaaatgtccgtaaaacgagtgagatgaaccttgcctttcttgcaaaaaaaccccaataatgttctccttgtttcttctattaagaaatcacagtattatacatcatgataactttttctgatattattgcttcttccaaccaacgctcaacacattctacaccagtatccacgactcttgcaaaaagcccaattatgacatcttttgctaacaaactcgatgctttgtatgaagttttttgcccaattgtgacaggcaatagtccccttacgaatcacgagactattgcctgtcacaagataaaaatcgggtaagttgtccaatcccacaccgcctggggaaggtcaagtgtgatga

SEQ ID NO: 102234 - DNA, 640 bp, Cannabis sativa
  modified_base (598)..(598): a, c, t, g, unknown or other
ttatttttctgcactttgttttcgggtctactctcatcaacaaacaaagattattttatctttgttattattttttttttggttgtctatattgtgtaggttcttgtgtgaaatctcttgaagagcttgaaagagaagaggaagaaacagaaggtgattcggctgggtttgtgttgcaacaagggaaaggaagaaacacaacgtgtttcggctggtgttgatctgcagcaagagagaaggaaggagaagaagaagctcggctgggtttggttttctgttcaaagaaaagagaagaaagagagaagatgaaggaggccagctgtttgttttgaagagaggaatttttgttgctagggttttctaagcaaaaaggaaaagaaatattatatactgccttgttaatggcagtagggttttgaatcaaagggggtctggtttgagaaggaatattccttttagatccgcacaaaactagaaagacaatattacccctattttgtgactgttggggtgttgggtgtagaggcaatttcgggttgttgtgatttcctacagtggtatcagagctcggggaagcaagaagattcaacaacacctngaaacaacgtcaagaaacaagaaagatcatcaaaacattgaa

SEQ ID NO: 102235 - DNA, 855 bp, Cannabis sativa
gggtgtagtggagtgcagcctaaagtctcgggggactcaggttgttagtggggttcctatttctcctacatcagtctttagtaggggaggtagtggctcgaccactaacctgaaaagaaaggcacctactgcatctagtggtttaggtcaaaacaagaggttccgagggaaccagggtcgaggcaatcatcagggtggctccaaaatccaatacacttacccagaatgccccagctgtaaaacgcatcacctgggagagtctagagggcaggggtgctttcagtgtggtatgccaggacattataagaggggtcgtccccaactcaagactgaagcacagaagactgcagcaaaacccgctccagcaagggtgttcgcgataactcaggctgatgcagaagccaacccttcagtcaacaactcttacttctctgtgttatttgactctagggccattcactcttatgtggcagccagaattttcagtaaattgggtagacagcacgatagttatgaactagggttttgaaccttactgcctggcgcagaatgaggaatctccaaaaggtggattaggtctatgcagatcagaattgaggatagggagttaagttctgacttaatagaaattgatttagcagattttgatattatactgggaatggatttcttatcaaagtactcaatcagtaatgattgtaagaggacgatggtaatcttccaaccagaagacgaaaaactgtttgtttttgttggatcggttcagggatctcagatccaagtaatttcagtactaaaagcaagggaattgttaggagatggatgtctagggtttctggctgtggtattggatac

SEQ ID NO: 102236 - DNA, 754 bp, Cannabis sativa
agccgaacccaaaatcgctttccttaatcggatctagagtgtaatcgatgttgttctcatcttcctcaaccaatttattatcaatgggtctaacttcattttcccaacctcatcatcaatactatcattcttctcgtcaatctccaaacctaacaagccttccacccctttaagcaattgactgaaaatgatatatatacatagtttgaactggaaaaaaatctaaatctcggcacaagaaccatcccgagtctgcaagagataagtaaaacaaactgaaagaaaaagacaagacaactattgtcgtctctatgttgcttgcattattgatctatgcattattaatttgtatatattgaacagtataaaaaacatgtattttgacttgtgaggttcatgaagagaaaaaaacaattgaaactaattttttaataaaattaatcatcacatattaaaatttcaaatcaaacataaagaaaaaacttatcttgtcaattgaaatgcttaatcggtcacttctcttctccatcttattctctattttactttgctacaatgtcttgtaatttatatctctctaatccgtagcaaggactctctgaacggaaatgcagagggggcgggcttggcctttgacagcgatttggtggcggcacccgatcagaaataacattttatgttgcatggtttacatgatttatttcatgattgtttaatgtataaattctattaggtccagaatatatgtatttgt

SEQ ID NO: 102237 - DNA, 903 bp, Cannabis sativa
gtaaaataatttccaacacccttacccttgcatccttgctacgtccttttgtcttagtggctacctttaagaaccattggatgtagtccttgaggggctcatcttcctgttgcttgacgtctaccaaatcatttggctcaattaggcattatcgagattgagaaatttggttgcccaaagcatccactagatctttccatgagtcgattgatcgaagagggagcttaaggtatgactgctgagctaggtctgtcagtgaggtagggaagattatgtacttaacattgtctcttacaccatgtagattggtctacactttgaaggaatggatgtgtgatagtggatcttcctttctggtgtattgatgacaagaagggttcttgaactttggaaggattggtagggcttttattctttcagagagtggtgagtgctactctttgtcaagttcaaattcaaacagcttaggggtagtcattcctttcactaatgttgctaggttatcaaactctgccctgttgacaccatggatgttggttatcaaacaagaggcaagaaagagtttcatcaactactgaaaccgaacaaaatcatggcttagaatgctaatgggggtaacaatggaggcaacaacggtaataatggaggtgtcgttgaagatcaagcaaatggccacagactcagtgattacattcttccaactcttacgggggtccagtcttgtataagaccaccctccgtagatgctaacaactttgaaataaagcctgccatactccaaatggtgcaatattaagtccaatttggtggactcccatataaagaccccaatttgcacttgtcaaactttatggagttatgtcagactttcaaagtcagtggagttagtgatgatgccatccg

SEQ ID NO: 102238 - DNA, 953 bp, Cannabis sativa
gaactttaatctgtaccaaattaaactcactgaacgttcaatgttcatccatattaaatttttcttactaaaattagaaaaaaaaatccttaatttcaaatatcttaatagttcagaggaaatttttaacggcaaaaaaagttcaggggacataatttggtacatgttaaaatttaaggaacaaaaatcttaattaacctaaaaaaaaatatatacataattcttaatggaatgttttgtagttactgtgatgaagcgttgtgattttggtaatgagaatgtaaaattaaatctatgtttattatgattttattagaatattaaactcttaagattgccttaatcttaacccctattaactaattaactccctagtaaaacttttacaccaaacacctcaagtttccttgcctaacttaccgtacgtgtaagtaatttactaatcaaattataagaacaaggggtatgcataaatcgattcaataataatcgatcgatccaattataacttaccgctattagatatctaattgtgatctgatcgaattggatgttatttttgaatattcaatcagatcgaataggatcgaatgttggatggggtatccaaaaatccaatacattcaacatccaatcgaattaattaatgttttcatttaatttgaatgagtaattagattttatgttgttataggtaaatatatatatacatataaaatttaacattaaaattttattttttttagacgggatagattcaattcaatccatgatactaaatctaaaatattagatggattgaataaattaaaattaaattaatagatacacatgaaatacatcaaatggatacaactgatctaatccaacaccattagatgttagatcgattgggtgactaaaattaattggatcagatgagatagtaatatataattagatcgaatttaaat

SEQ ID NO: 102239 - DNA, 653 bp, Cannabis sativa
tgatcaaacccagaaacgcaaaattaaaagcatgtaagaaaataaagagagaaatcacttattgtttgaagttggtttttggagcaatgaatagtcctgcaatcgacggaataacgaacgatgtgatgatccccttgaatgcttgaggtcaaaaatcaaattggacgaaactcgcaagaaaaatgtcaatgacaaagatggcatgcaaggtttcaaaatagtctgggtatggttttttttgcagaaaagcttgaaaaatttccaaaatttttgaaatggcaaaggtaatgaaaatatggttccttttttcgttttatactcttgcgttgatctccgtcagattaaggagacaattgatccaacaggtaaaatttaaaagaggaagtgaaaaagatagttattaaatgctaatgtgcctctaaactacaaaactgccaaaatcagaggatatgcgttttttcaaaaatgattatgacaaatataccctctataatcatttaaaaaacacttttcattggaaaaactttttaaggggaaattcttatacccaaaatttgactggcacttcagaggaggacacgtgtcaatcttggagaatatgaatcaacaaatataatgacaattatataaaaatattaaaatggaataactca

SEQ ID NO: 102240 - DNA, 702 bp, Cannabis sativa
gtaacagagatcgatttcacggcctggttcgacaatcgagcagtcgatttcgcacggttcactggagtcgacgacggattgaaggtgaaagctcccgagaagacgtctagataagtcgactccagcgatatccacggcccatacatcgggaaaggaaccccgctaatgctcgccaccgtgatcggagaagaaagagtgcaccctcttctttgatgtcccattacaccgcagttataacaaaagatgcccatcttctcatatttgaactgaatccacctttgggagcccgattccagaccgatatagcatccagcaaacaaaggttgattaacatttaatctaatcaaaactttgagtgccttactccggggtgcagaaaaaccttcatcagcattcacataaagcacctgaccagcttttttccccaataaattgccattatccgctgagaagtagtcccgagggaggttgaaaatatgtatccatattttcacactattaaacacagcagatagatcctttagaggctcccaaaccttcaacagaaatgaatacccacgaacacaccaagggccgttctcaagcgcccaaatacggttccccgcactcgtgaagccaagttcaaagcagttacggttattggcaccctcattaacagctaccacagatacattaaatttccaaaccttttccacaaagtca

SEQ ID NO: 102241 - DNA, 646 bp, Cannabis sativa
tggaattcacgtgcatcccaaggatgtgccttcgggaccaggagaaacacaggaagagtcctcgccaagcacccaaaggcctaaaaatagggaactgagccccatacgatatccctctaaagggaaccctaagagaaatcttacattattccacgaaaagaataaaaaagctcaatatccgcaaaaagtctactctgatttcccgaaaggaaaaggtccgcagagggtaaagttctctcgagagagcactggccctcaggaccgagaggaccgaaaaagcgtatcagtgtatcaggaacccgaggaaagaggtaggaaaaatcacaagcatccccctactgacttaagacagaagcttaatgataagcatggtgatcttaggaagcacttagagaaaaagaagcaagaaataactgtgtcataactaatataaattattttcttttttcttaatcaggcagattgaatttaaatttttgtaaaatataatataaatcgaccaaattggctgacgtaaaatcttaattttcatttcaacatagtaaatgagctttcaggtaaaattttcatctttatctaacagaacccaataactatcatcactaatcacaattatacacaacagagttagttttcaacacatgcc

SEQ ID NO: 102242 - DNA, 703 bp, Cannabis sativa
ttcgactcggaccttggactcggactccaacctggacccttgacctggtcctgacccgaactccagacctcaaaccccgtccccgatcacgacccagacccgtacctaggacccaaattcggacccagaccccagacctaaactggacctggacctaggaccccgaacctcggactcggacccggatctcaaaccaagacctgggcttcgatccagacccggaccccagacccgtacatgtacctaggacccaaaccctggtcctagaccgtaccagacccaagacccgaatccgaactcaagaccaaacccgaaaataggattaggacatgtacccatgacccaaacccaaaccgaacttggacccggaccaagccccaacttgaagtcggtgttggggtcgagtttattgaaaataaattataactttgcacaactttttaatacaagtcaataccaaacatagtattgtatgaaataataatactaatacaatacaatacaatacaatcaaatacaatataatacaatacaatacaatacgacatatcaaacaactcctaaatactaactttttggagataacttttcaagttaaactcttctaacaccaattggtctatatatatttactagcttgaacaatttttcagtatatatgttttaaattttttcgatgtataaactttccaaaaaatttaca

SEQ ID NO: 102243 - DNA, 1119 bp, Cannabis sativa
gtttgggttcgggtctagatctcgatctaggtcggaatcgggctccgagttgtggttagggcactgggtctagttctaggtttgagtctgagtcctaagtttcgatctcgatctgagcttgggtttagttctgggtctagtcctgggatccgattccagtctgggttcgagtttgggtccgggtgcaggtctaggtttgggtctgattttgggtctgggtcccaggttcaggatcgattttgggtttgtgtccaggttcttgtactagtttgggtcgggggcaggtttcaggtctgggtctgggtccaacttcagattcgtgggtccaggtcaggtcctggttcaggtttgagtcccagatttagatcttggtctgggttccggggcataggtccctagtctaggtcccccatccaagtccggttcctaggtctttgtctaggtccaggatcgggttcgggtaccgagtcttggttttattctaggtctcggtctgagttcgggtccaggtatcgatcccagtcctggtccaggttcaggtttgggtccatgttggggtcttgatcctggtctgggtcgcgggtctcatgtcccagcgagggtttaggacctggttagttctaggtcccggtccgggtctcggtcgaggttcaggtcccaagtctcaggtcctagtcctagtcaaggtctcagtccaagttctagtttgagtttgggttttggtttgggttcgattctagtctcaagtttgggtcctagtcatagttccaattatgattccgggtctgggtttggttccgtgtctaggcatgggtctaggttggggtcgggtaatgagtcttcgtccgagtttgggtacgggtttttaggatcccagtctgggtccaggttcgattcctgggtctgggtcccaggttcgtgtctgggtctacgtctgggtccgggtctaggtccagtattttgatctcggtctgggtctgggtctgggttcatgtccatgtctaggtccgaatcccaatttaggctaggggctttgtttgattccaggatcgagtcccgtggtccgggtttgggtccaagtccgtgtcggggttcaggttcgtgtcctgagtccgatcc

SEQ ID NO: 102244 - DNA, 805 bp, Cannabis sativa
tatcatcattcgaatcatcaatatcagcgtcattatcatgtatctcattcccactattgtcaacaccaacatggtagcccatactttccatagcattagaagaattaaattgagtagcattcccccccttatgcaggactgaagggccacaaaatcctccaacaccctcctcttgtcgaggctgttgttgtaacagtaccgaatcagtcgccctaccaccatggaattggctggcaaacatctcgtcggtctcattcccatcacgcaaccactgcgagcccaccaggttatttctccgtcgtggttgagccctcatccaagcaccataaggctttatcatgagcatctcgggtggtgtatcaaaacgcttagggaaaaatctctcagaatgccctattatattgcagataaaacaaaacgtagggagatattcatacttgaattctacccagaacccttcctccagtgcagtccgacggagcttccttcgtcgtttcaaaggaacagtgatgtcaaatgtaacccgaacacgcatataatctctccacacattctgaaagttcttaggatcagccttaacatatgcaccaacaaaattacccaacttctccacaacactcgcagatttaaacactggttggagaccatgaatttgcacccagatgtcaagattgtttagcactacccttttttaatcatctccccttctgagcttgtgaaaaacaaactgagctctattaaacgtccacgggcttccctccaccaccgtttgaacatcaatttcatgaaagaattgaaatagata

SEQ ID NO: 102245 - DNA, 903 bp, Cannabis sativa
agaagaaaattagaggatgtttttttgtttaagaatactccattcaaaaaaagttactagttataaataaaagtaacttttaaattataattacttatatatttttttaagttctattgaaaaagtatatatatttatataaaaataattaagtcttaattaaaaatatatttatatatctatataatatatgtttttttatgtagaatcaagaattttattctacatttagatgtaatatttgtataatatcaagtttatattttattttctcagttggaaagagtaaataatgtgtcaaacaattatatagaaatattttttaaataatgtgtattaattaagaatttttcattattattgttgttatattttattcttttcggtgttttaaactttttttttttttgagaaattttagaatgtggaatttctctcatccaatagacatcttcatccaactctagagcctactttactaagccgtgggtagctctattggcttgcctacgagcatgagtaaaagtaactctagggaaaaaggattgaagacaacgaacatcatcaattagatccaaaaaataagataagtctgtatgagaagaggtcaaagtagaagcttctgttttcacttttgcgattgggatttgttgttgattagcccacctaagactatgaaagagtgtctttgcttccatttcatcgcttctaaaacagccttggactgctttggataatgcagcaataacttctcctttgtagtttcgaaccactactccaatacccagtaccttatctttaatgtggactaccgcatctacattcaattttaataatattgacatctagtggcttccatggtatcccatttgcttgcctcacattgtgatttgaagcatcgtg

SEQ ID NO: 102246 - DNA, 895 bp, Cannabis sativa
gaaaatatttttccatgcattgctactaacccaaatgttttaggttcttgccctagtactaaccatgcaggtaactcaatcaactttgatctaagacatataagtgatgaataaggaaagaacactgttcaggtggaacaaggaaagaacactgctgaggtggaacagggagagaacactatttaggtggaacagggagaaaacactgttcaggtggaacagggagaaaacactgttcaggtagaacagggagagaacatcgttcatgtggaacaaggaaaaaggagggaaagtcaggcagaggacttggaggactaccagttgactagagacaaagctaaaagagcacctagacagaatcctaagtatagcttcaacatttggaatgaagacattgcctatgcactattaagtgctttgcaaggacataagaacaaactagaaagttgtggagaagctatgaagtgcaagaatgctaagaagtggaattgtactatggatgaagagataaactctttgagtaaagagaagacttgggtttgtgttccaaaacccaagggaaagagtgttgtgaaacatatgtggccctttagacagaaagaaaaatgcactaagacaaataaagagttagaggatatgagtcagatcctcaactctaatgggattggttcaaagatgtatttcatgttgagtaccataccagatacaatatatactatagttgttgttagcaaatatatggtaatgactgggaaaatacattggttgactataaaatggactttaaggtacttaaagaggacaacatgtgttatacttgcgtttagaaagtcacaaaaccaaatggaaggattttgtgacttgatctatacaagagagaaaaacaaggtgacac

SEQ ID NO: 102247 - DNA, 576 bp, Cannabis sativa
tcgccacagccacagtaagcctcattgtgaccataagctagctcaccgcagccatgaatagatgaaaatcaatttttcagtttgattcttctcacctcgattctttatcagattttgatgctctagacttgtacaaattacaggatacctgaaaacacagaaaacaagcttaattctatcttaaaaacattaaaagcgactaaaaacaactataaatgttacataaaacctaggctaaaaatagcttaacaacatgttcatgtaattttagctcttggggcttcgattaggttgtttcatgtcttcatcgtacagaatactgaaagatagttggttcaattcaagttattgaagtccgaacttccatgccagagaccctaaagtcaacctcggcacagggttaggatcttctcctaggtcgattgctatgacccgggtctactcaactctatgatgtcatccctcacaccacatgtcaaacattgatgttcacgtcaccagagaaattttctaggtgaacagaagccttgtaaatcaaaattaactatttataattaataaatatatatgaaacac

SEQ ID NO: 102248 - DNA, 579 bp, Cannabis sativa
ttacattgaactaagaaagaagcagcctggagtgagcgactctccactttgcatcacaacatttgaacaacatgcaatgcaactaaatacacaacaattcgttgacactagagcagtaacacaaaacacaaatgtttaacaacttgttttacaaattacaaaccagccatcgtatcaagacatagaatatgaagatgaagcatcagaaacaaataaccagttcctatcaatgtcaaatatatttaaagtagctgacaatgttgctgattttataattgagaaaatagaagaacacgagaagaaaaggaatgaagaagagaagagataataacagatcatagggttttcaaaattgaacaagggaaaatttacaaagataaaaagatgctgaaatgtgcactatgcttctatattgaacaactttcaattcaaaacaaagagatcagaaccaagggagtacctggttacatgtattgatgataactgtaactggttaccgagagcatcgaaattcaagaatacaacaacattcaaagtaaggaagtatgtccagggtcacaaatgctcattggatgtaat

SEQ ID NO: 102249 - DNA, 822 bp, Cannabis sativa
gcgcggtatagtcacaaccgggaatttcgggccaaactgggtttgggcccgaaatgtaaatgggattgatttaattggcattttattagtgtgtgataatctgaaattaattgtgagttatttatgcatgaaatgactaaatgacccttgtgagggtgtatgtatgaagttaagccatgagggcaaaatggtcatttgaccatatttgatttacattggttaaaattgtttttttgaggaaaaaaggattaattttctgggttattcctctttcttacccgattctcctctctctctctctagctctttgaattttcaagatttctttggtaaattgcttgggttagcttgaaattgaagtgaaagtgttggtgaatttttgtgctagcccttcaagtgattcttgaggtagtttttataactttaattccttttatgttgctgaattttaatgtaaaaaggcatgaattagttgatatgtgttgttaatgcatgtgtgaaggaattgtggtgtttttatgtgatttaggtgttgattctttgatcttgttgtgatgttagatcttgagccctagatggaatgattagggtatgtttttatttaatttcaggttttagatttagtgattagtgctggaaattatttgaggagcttggttttgaagctcttgttcttgagcttgaggtttgcttggttgaatcattaattttgtgaattatatgcaatctgaattgagagtttataattggattcttaatgcatgtttaggtgtttaatctccccaatgtttgcttgttattggatattttaaattagaagtt

SEQ ID NO: 102250 - DNA, 540 bp, Cannabis sativa
gagctcaatttttgataatgttttttagtataacaaacttgaagataatttctaacacgaacagatacagaaaatttaactaattctgtctctaagtcgaattattattaagttttattttgacaaaaaattagtttattgtcttatttgtactattttagaaaatgtatggtctattttgtcatttaacaaaatagaaagtacaatctataacttttacaaaataatattacataatatttaccctttaaaataaaatataaggcttaatattaaattgcataaattaccatcaatattgatttgagaatcaaaattgtaattaaaaaaatgaaggtttgattgtgtttatttcaattattttgggttaaatagtagataaaataaaattaccaaaagcaaaagactaaagtgaagtgttgctttagaaaaggtgaatcccaaattataaatcataaatgtttgtattaaaacaaaagtaaaaacaaaacatatgcgtgtggcttaagaatattgatgacaatatatatatatatatat

SEQ ID NO: 102251 - DNA, 654 bp, Cannabis sativa
ttccgcatcaacaatagacaaaagatcaatcggagcattatgctccttaaaaatacgatctgacttaaacaagacgctctagcaacacaatgagcagccctatttgcagaccgtttaacaaaattcaaagacacactattgagagaagaaagtaaagtacgacaatcttgaaccaagtacccaaattgagatggcatcgaaactgaaccaagaacagcctgtaccaccacaagcgcatccgactcaatctccacctcagaccacccattacgcttgatccaactcaacgcttctttcactccgatcacttcagcgatttcagggcctacatctcccaatcggctacccgagatcccttcaagcaatctcccatttgcatccctagccacacaaccaaaaccatatttatgctccgcctcaaagatagcaccatctacattgattttaatgtagttggagaccggtcgttgccactgctctacaccagaaaacggaccaaaaaccagcaggggccccgatttttgaacatgagcaacagaccactgttgcagaacgtttcgggctgaggcgaaaacacctgctgcagtgcaatttttttgcttccaaagaacatcatcacgagcattccaaatagaccagctaaccatagcagca

SEQ ID NO: 102252 - DNA, 603 bp, Cannabis sativa
ctcacatgccttctccgggaggcatgttaaatgctgatccctttgattaaagagacttagctgaattatcccaaagttaaacttctccagtttacgtgtctcaatccggttgatccacgtattttggacaaaatcagaggcaacaacgtgcaatgcacgtatgcttagtttttcttttttaattaagtaatgtgttttaatttatactaaataaagttatacataatttatttaaataaataatattattgtattagacaattaaatgtttaatataaaattttaattacagaaaacatataatagcgacgaagctttttcattccaattgtttgttgactaaaattaaatgaacttcaaatattgttctaaagatagggagtttttgccttttgtgtaatgtgaacttagatttttatactaactagttaataaaataaatctcactttgaaatatggacttcgttattgtcttattgattcattttatataaaaactaatactgcattgctattgaatagtccacgaataaatcctctaattcctctaattagatagtaaaagtaagtgagactcaacaatatacgattgagtagatatag

SEQ ID NO: 102253 - DNA, 1191 bp, Cannabis sativa
ggtaatcattcaattcacaactaagcaaacctaatttttaaccctagaatcattctatgaactccataaattaacacagacctgaaatcttaaaagccgtaaccaaaacctaatccaaacttagaaaattcaaagggaaaggatgtaagacttacctccaagcttgaagaactcttaaaccttgctaaaacaactgagaataggtaaatacaatgaaaaatttctccaactcctctggtttctaggacagtcgagagatgagggagagaagataacttttcttagttcttttgattaattccttttatttctaattttagtttctaataactcaataaaagaaagttattattattatttttttcagcctagtatactctaggttccttaataaaacaaataaaattaaatcttaacaaatgaccccttccaaataaacacttaagcctaaaataaaatgtaagggtaatttggtcatttataacaaatcccgtcaaaccgacaacttaaaattctaaactagttcggtataattcaaattaaattcatcttttattgtcgtgacatttctaatttccccgtcaagttctacaattaccaggcccaaaaatattttattcaaattatgccacatattccaatataatctccgtaattaataaattatgctttatttattcttatctccctaaccaactcataattagattaagtaggattataaccctactctaataaccacttaatcacatatttaataaaatatgtccaattaaaatatcaaaatatttttcgggatattacatttgatatcctccatgaaacatttctccacacattctcgaaacaaggtagaggggtgttgtttttttgtttcccccaatcctttcttccacacttaatatttcattgaaatttcccaaaataatccatggaagacttgtatacttggaaatactaatcaaatcctcccataattgccttcttcccatttcttcatttagagcatatacaaaagttaccataaacatctttcttcccgctattgcaatgacttcaaatgcattaattgaatagtgcattgtaaaatattcactgcaaacatccctggattccaactcaccattattcttccccctttatgccacacattatttgttgagaaacaccatcccgaaaacatatttacat

SEQ ID NO: 102254 - DNA, 643 bp, Cannabis sativa
atagtaggactactagtagacactaaacgggagagatttcgaaatgcacgatcactcccaattccacgtgcattccagctcacaatcttcatgggggcgggcaggcctgctcaagggcacagcctgcaatactagtagagacttcgttggcttgaggattgtcagagcgggagcgcttgatttgatgcctaagctccccattgaccatctcggtctgccttttgaacttgtctttggagtcgggcttgttccttttccttgaagctttcgagcccgagggggtggccactcgtggttggtaggtgagattcatggcttcgagttttttgcttgtatccaggagggggaggttgtctggaagaggaacatgacagtatttggaactggtggagttggagctgctagagttttggggtgtgatagtgtgactcgggttggagataggagaggctttttggacactggagttactcattgtggcattgaggagagcagtgtatgaggggttaatggtctcgggttgggtgctgatggtttggataacggtgtttgtgtttgcatagacatcaggttggaccatgggaggagggtcttgaatgtagggtgtggggccggatttgtataggcccacttgttgggattg

SEQ ID NO: 102255 - DNA, 606 bp, Cannabis sativa
ctgttaaaaagtgttatctcatacttatacatcaattaattttttatttataaaaaaattaaacttctaataaaatcaacaaaattaattaacatatttaataaaatttaaatttgttaatatgtcaaattttgatatatttaacacagtatgaaacattaatttttaacaaaagatattgattttcgctaataaatagagaattggtaagagtattagacactagtcgtgtctagttattatattaaattatatgagacttaatatttaatttgactgataataatattaacacataggagagtgctagccacactgctactacggttggtgtagatgttagagcacctccaatttgaggatgttaaaaatttacacattatctaaaagtataatattttgttttatctttcttccatattattttttaggctcttaattctaaaatcactccaatgtataatactctttaaaaatattataattatattctcacgcattattatttaatgggatattggcggctaaaccacttgaactttacgttttgtaacacttaaccacaaaaactgaatttttggtggctaaactacctaaaccctggtt

SEQ ID NO: 102256 - DNA, 688 bp, Cannabis sativa
tttattattatgaaaggatatataattaaataaattaaattgaaaagaatttcagtcaacaaacaacaaacaaacatacaatatatatatattggtattgaaacttattacaataaattaaaattaagtactaaaaatgaccttttgaagagaaaaaagaaaataattaagaccttaattatgttcagataaaatcgtccaacaaacataatattcttcttatatatgagattgatgcatgaaaaagaaaatgattaaattaaaccttatgttcagacaaaatcgtccaataaacatataatattcattcttaaatatcatgacattgaagtttaaaattaattaaagaactgtctaagtagcaacaaaacctccagtaatttctccccatgcatcaatctcatctccatcttcaaatcccaactgaaaaaaaaaaaaaagaaacaccacacataataacccatcatcaattatatactagaaagtaataataatgataaaaattaaatctaatacaatttaattatatttttttaatatacaaaatttaatttagttttaaatttaaatatatttaaataattttactaaataagtaaataaatttaaacattttaaacaataaaactaataaatttgttaattaattatttaaattaacgtctaatttaaatgtaaaaaaataatt

SEQ ID NO: 102257 - DNA, 658 bp, Cannabis sativa
gcaaattatatataactttaaatattaacaacttatttaaatattaatgctacataaacaaatatttatactaatatatttattttaatttatatataataataataatttctacacgctattatattctaattagtgtgatgtatatacaatagaaagtagttataattatattttgtaattttaacaaattatgtgattatatatatactaaaaggtatatatattttacaatacattatgttatgtaaatattgtatatgtatacttataggtacatattatgaaattgtatgtatatatatatttttaaatgattgtatatagatattaaagatatatatatttaaatacattatgtgatttatatatactaaaaagtatatattttttaatctaacgaaagaatgtaatattaaaatataattatgcgttttattttattaaatctaatgtgaatataaaattaaaaatacattagtaaaataatataaaaataaatacgttaaaaataaaaataaataataataataaaccatattttgatgaaatatattattattaccttttagtatatatatacaatcacataacgtattgttttgtttaagatatatttattgacacaaagatgattctctctagaagaacaaatatc

SEQ ID NO: 102258 - DNA, 510 bp, Cannabis sativa
tacttgggttgacccgttttcttatacaactcaaatttatactctacttttctacattttatttttataattaatgagataattactaaaactatgtgttgacgctgaaaagtagccaacaccagctcgctaaattggcgaaatgaataatgaatttaagtaaaaaaaaattagagagatacatgcacacaatatatagtgtttcactcatcatgtcacgatggtaatggagctacgtctacttcgagtttttagttctcacgagatagtaattatagaaaaaggctaagtgtttaagctctagtttctagggagagatgctttgaccttgtaggtagttttttgaatatgaaaaataaagtaagggagctctccttttataaatgaaggagccattgaaaatatgaataaaataatgaaaaaaaatacaagttaattattttttaccacaaatgatgatctaacggtagaaattaacttttgaggttgatcgtcaatttttagagccca

SEQ ID NO: 102259 - DNA, 655 bp, Cannabis sativa
ccaataattggagaaactttatacatttatctagctgtcttagagcatgccattagtgcggctttagtgcgagaaaagagtaaacaccatcaacctgtttactatgtcagtaaaagatacctgggggtagtgtcgagataccaacctctgaaaaaacttacattatgcctaattcatgcattttgcaaattacggccatatttccaggcacatccaattaaagtcttaataaatcaaccactaagacaagttttatcaaaacctgatgctttgggaagattgataaagtggtagattgagtttgggcaatctgacataacttaccacccgagagtgtcaatcaaaggacaagttttggctgactttctaattgaaggaattaactcagaagaagacccatatattgagcgtgaggcagaaacatggaaactatatgttgatgggacttcaaatgagaatggctcgggggtaggagttataatgatgttgctaaataacttcaaatttcactacgcgctaagatttcagtttgatactttgaacaacgaggcagaatatgaggtcttatttgcgggtcgaagaatagccgaggcactaaaagtaaaaaatataacatgctatagtgactcgtaactaattataaaccaagtcttgg

SEQ ID NO: 102260 - DNA, 684 bp, Cannabis sativa
tttaaattatatatgttttgacaaattggtttctaaatattttttttttgataaactagtctccaaattatataaatttttgtaaattggtctccaagttttatattttgataaattagtccccaaatttttctttctttagaaatattaagtccccactattaaatattgacatttttattatttattttacatactttaatttattttttgtgttaaattcaaataattttattttttaaaaaattttaatacttttaataaaaataattatattaatatttttatttattatattaatattaatattttaatactttaatttattatattcatattaataataagaaaaaagagtataaatactaacatacacgtatgatggcttgagagaattctagccccttatattttttatattttatcatttatagtatattttattgttgatttatgaatatgcggaattataattttaataattttttaattgtatgtatatttataaattatttaaattttatatcaacgatataatttcatgagttcgctgcggaatataaattaaaaataaaatttactttgatagtttacaaagaaaaatattattatttaagcctttccaattattctttttttcttcttactttgacaaatttgaaaaaattgtatataaataaaaat

SEQ ID NO: 102261 - DNA, 516 bp, Cannabis sativa
atggtgatcacgagcaacacaaccgaaaccaaacttttggtgagcttcaaaagtcgcaccatcgacattcaccttgaccgtatactcatcaggtttacgccaacaattacttttacagttttataaattaagtacttatactgttaaaaataaacattaaatttaagtcattacaaacttaaaattttgagtacttatacaaatatttacccaaataaaattatacctttgaccgtataattataattatatatatttatgtaatgttccacaaatttatcatatttatttagtgtaatttctattttgtaagtatgtttactaaaattataacatttttatttttaaattatttttataaaaccatggttaaggaaaaaaaaaaaaaaactatgtacggaaattataaggaaaaagaaaaaaaaaaattacttccttatatatttgtaattgcatatatattttgtaataaccattcataatttcattttccagccaaataataataataataat

SEQ ID NO: 102262 - DNA, 520 bp, Cannabis sativa
tttcatctttggaggcatttttaaattccaaaaaatcttccaaaaccagtttgcttgagactcctccatattcaccagccccttcatctcttgaacccgtttgtaagcgcttttgactgagtataaaccagataattctccgttccaaaccaggtggtctcgggtaggagcaatattgactgggatttggagaattaattccttgtcctttggttcaaaaaggtcatttagcacatctaagtcccaactgagcccgtccattgtgaaaagattggccactttttcattaacaagccccggatgtgttgaagttacccaagcattaagcttatccggcaaccaaggatcaccaagaacattgatattcttgccatcacccacgcaccatcttatcccatgtgccacaagattttgcgcttcaagaatactacgccacacaaagctaggattagatccaatctcagctgtaaggaacgtaccattcgagtaatatcgagctttgaagatgcgagcaaccaac

SEQ ID NO: 102263 - DNA, 1294 bp, Cannabis sativa
actttaccaataccctggaaaggacataccacttatccaaagtgtaagtaaactttatcgctgtttatcacgtcagtgtaaatccagtgcactgatcatgagacttaaactttggagcatataatcacgattactttccactgtgatgacaccactataattgtgaataactatatgttctagatttatcagaaattgtatattaaaccataatcatgaaaataacatgtaaacttaaatgactctaatcttctattgataacaaataagattataatgaaataagttttatttagggcataaaatctcaacaaactcccacttgcactaatataaaactagaagtgcatttcaatcaatccattatcttgatatccatatcaaatgtagtgtgtttaactatacccaaataacaagaattgtagggttgtagtaagcaataactttcttcattattacttccttttgtgttgataaaatattatgcaacatcatttttctgtacactactacaaatctgggctttagaggcagtttttaaggcccttcagcgtcgattttagcaaaatttgctattgatgttgatccaggggacgctaaagggtcgaacataaccgacgacatagtgtacaatatagcgtcggttatttaaaaataatcgatgccataaatacactatggtatcaattatatactagtaatcgatgacatatgccctaataaccaacggcaaaggcttaaaaactgatgccaaatcttcaataattaatttatttttccagtttaaaacctataataaattcagaagtttaatttgtttaaattatatatttgttaatttatatttaaattaaattaaatatttattttttaaagttaaattaaatattattcaaattaattttatgattagccaatatacttaaataaattttatggaagcaaaaattacaattatattacacaaatattttaaaattagtctaagtgttaacaagttaataaatttaattacaagttaacctaaaaaaataagctagggaagaaaaagtcttatacatttcagcatcaatcgtccaagccttcgtgaatcactgccaataatcgttctatccactgttactgaaacggtaacaatttagtttttggatcatgtgtcttcttttcccgaaactgtataaagaagtaaatgtttatattagtatatacattattgtttgttaatataataaataatatagttaataattaaaacttacagctttttgatcgtttatatgatgattagggtttg

SEQ ID NO: 102264 - DNA, 767 bp, Cannabis sativa
ttaatccaattccctgtgggatcgacctcacctgtgtgagatttactacttgattgcgtatacttgcgtagtgtttataaattatagcaacaaatataggcccacgtgttaagctcacacgtctcttttacatataaggccttgataggatttatctcggttttagttatcaagtctaacctagttatgccttacttgcataactcttctcatttattcacataatatattatcgcatgtttattcataatttaaactttgggtaataaccctaactcatgattttatctaacaaccatgtaacatacaattgcaccatcgtgctacactctatgtgcttagttcactgtcttacccaatttctaatgtatgaggagaattccaatccacaagttatcctgactgagtatcggtattcttagtcacaatttttaggtttcacacatagggttaatcccaaaatcccatttcataaaaattaacatttaggtttccaacattgaaccaaataatagagctcaaaatgagcttccaacgatatattaaacatctaaaacagagtttggagtaaaaattattcccaaaacaaaaaatgctaaaatgaactgttgtcatggggtcgctgcgaccagaccatatggtcgtcgcggtaagattgggcaggggaaaatccatgttctgggttcaagcttggtcgcggcaaccacgagcttgaccacaaagactaggcttaaaaactaagaaaaacacaattttcaacattttga

SEQ ID NO: 102265 - DNA, 643 bp, Cannabis sativa
cccaataacttaaatttcactatgcattaagattcgaatttgatacctcaaacaataaaacgaagtatgaatctttgttggctggcttgagaatagccgaagcattaaaagtcaagaatccttatattatagtgactcacaattgattgtgaatcaagttctaggctagtacaaagaaaaaaaaggattaagattaaataaagataaagatggcaaaatatttagagaaagttcagaagaacttggagaagtttggtaattttaagattaaacaaattccacgagaacataactcaaatgctgatgcactggcaaagttggcctcgcaaaatgaacttgataagttaaatcttgtataggtcgaagtttttagcaacccaagtatatatgaaaaggaagaagttgagacgatagatgccttgccggcatggatgacacccatactaaaatatctactcagtagagaacttcctatagacaaaaatgaggcacgcaggcacccagactcttgtattttatacctcgttatacaatagtcgagggtaaattgtataggaggggttattcaatgcctctcttacggtgtgtactgccaacagaagctaacgaaataatcaaagaaattcacaaaggcttttgtgga

SEQ ID NO: 102266 - DNA, 700 bp, Cannabis sativa
tttttgggatgtcttcctctcaaattctcaattgatgataacctgagcaaagatcgatcttagagaagaccgtcttccccttcagttgatcaaaaagatcgccaattcgaggtcaaggatacttgttcttaatggtaagcttgttcaactttcggtaatcaatacacattcgtagagacttttctttcttcttcgcaaataataccggagcaccccaaggagagtaactcggtctaatgaatcccagattcagtaactcctataattggatctttaactctttcaattcagctggagccattcgatacggttcttttgatactgattccgctctcgaaactaactcaattacaaatttaatctctcgggtaggtggcgatcacggtagatcttctagaaaaacgtcaaggaactcacacaccaatcttatattctcatgtccaaatgtcacaggttggctggtatccactgcagtgattatgaatcccagacaacctctgctcatcagatctttagctttcaaaagttttatccttggtatgcgtgtcccctgaactttacccacaaacactgccgggttagcactgccaggctcaaacacaaccatcttttgcttgcagtcaattgttgccccatacttagacagaaaatccattcccaagattatgtcaaaatcagacagttgtaactttattagatt

SEQ ID NO: 102267 - DNA, 1180 bp, Cannabis sativa
  modified_base (599)..(601): a, c, t, g, unknown or other
  modified_base (865)..(868): a, c, t, g, unknown or other
aactcagaccaggaatcgaactccgacctgaactaaaacccaaactcgaactctgaattgcaaatggaactagaaccgaactaggattaggactccaacccgaactcgaaccaagatcaaaacccagatcaaaacccaaacccgatcataacccagacaaagtcctaaacccgaactgagactaggactccaacccgaacctagaccggtacaaaaacccacacaataactgggacttggacttggaatcataactcaaattggacctagatccagaactgtaaccggaccaggaccctgactctaaaccagacctagacccgaatggggagccggacttgtataccaacccaaacctggactcaggacccgaactcgaacctgaactaacaccgaaacattgaaccagactagggacacataaccaaggtcgggacctagaaccgcacccaagtctcgatcccgaacccaaactcaaaaatttgagctgggacttgaaccagaaccagacggagacccgtgacagtgatccatatcttgactcgggattcgagtaacgaggcctggaacaaacccgtagtcggtgtctagatctgggnnncagactaggaccagaacccagatgcagaaccaaacccgaaccaagacctcgacctgcgacacaaaaatttgaacatgaataagaatcgccgaactagtacactagagcaagacttggaccttgacaaggacccgaacacagacctagcctgagacccaaactgagactggaactcgggctcggacacggtcatgtacccagaccggaactgagacgcggacatggacctaaatctcagacccgatcccaaacacagacttggannnngatagggatctggatacgaacctggactcggaccaagacccagactgggatagaaatgcttgacctagatctggacccagatcctaacccagaccaaaacttggacccgcacgcgggacccaaacttggacctttatccaaacctagacccatatcgcggtctagacctggacacaaaccctgacacaaactcggacccgtacccaaactcgaacccaaacaaggttcagaggcaaggacttagaccaagcactgaatccagactcagatcgggattggaacttgggaatcggacccaacctagaccaagac

SEQ ID NO: 102268 - DNA, 613 bp, Cannabis sativa
gatattgaacctatcactggcctacacccaccatacacacacaattgttaacaaacaaccactatcaaaataacaattgcagcctggtctaatctagggttcatattataagacggaccaaaataacacaacgattgaaatttggtcttctagggtttacagttcaaaaaaaatttgggagaaagattgatcgagtatcaaaaacgaataatttattaaataaataattaaaaggaaaaaagatttaagatttaagaactgaagaagcagaagaaaaagaagtacctgcatatttgggtctcggaggaagagagaacgagttggtcgaaccgccaaactatttcttacctagtaatgattaaaagcagcagcatgtagtgatagtcaaagaagagaaaaacttcaccagttgttttcttggttttcgtttgttgctcaagaacttgttcgaatttatatacactagaaactctatctaataatactctattaaaaaataatctctaatttgttataaaaaaatcaaatgacaagagctaattataaataagaataacctataaattgtaattaattatatattttttaaatcccgtattaacaaagtatacct

SEQ ID NO: 102269 - DNA, 1005 bp, Cannabis sativa
  modified_base (937)..(953): a, c, t, g, unknown or other
tgagtgatccatgtccaaaactgacaagcatgccaaacattgaagaacaagcagcttcaatctttacaaggaaagtattcaacctagtcaaaggtgagataaaaagggaaaataggtattcttgctcaaagtctgagattgtacctaattatgatttatttctaatatcaaagtatatgagtaatcatcctaagtgtaaggttttcatttctcatgatgaggaagacatcaaatgtgattgctattggtttgagactagaggaataccatgtagacacatttttccatccatgaagcactcaaacaaaggtaattttccaccttgccttatcaattctcgttgggtgaaagatgtaaaagacattgatcctaaatcagttggtaaagagagaagatgtccacataccaatacagtacaaaatactaggtatggtagaatcaacacccaaacgagtttggtatcatactatgctaccaaatctcaaagagcattcgcaaaggctatgactgtgatgtcaacattggtagaagacctacaaaatatgacaaacaatgaagatgatgatgatggaaatgaagattttcggtttacaattcaaattgacgatccaaaagtataagcaaataagggtaggccaacgaaattacaatcctcccaaagattgtttgttgaaagtggtagtaaaataaaggagctaagtaagtctagattatgcaaaacatgcaaatgtactggacataactcaagaagttgcccacataagcaggacgatgtagaaaaaagctcaaagcgacaaaaaagttgaaagagcttcttaaatttggactgattcttaatttttataaggttataatcatattgtttgaagtgttttttttttttatattataatttggatggacattattgttcgaaatattttaccaggatctagannnnnnnnnnnnnnnnnttcattaacatcctaatataaattctaaaacaataaaataaacatatataaa

SEQ ID NO: 102270 - DNA, 1161 bp, Cannabis sativa
  modified_base (825)..(829): a, c, t, g, unknown or other
  modified_base (992)..(1013): a, c, t, g, unknown or other
aggctgaaaaatattgagaagaacacaaggagagaggaattcgaaatactaaggaaggagactctcattaactaggtgtttgacaaagaataaaaactagtgtcagataggtggataagaatgagagccatcttactctatttatagtatttcaactagggtttaggatttaattatatagattaaaaaaagacaatataataggcccaaaaaaaaaaaacactaagtgaccgaccatagtagtgggcctcactagttacaattttgccactttattttataatttatcttttctttcaataatgccatatttcccgatttcaatcctataaatgtcaaaactatttttttaataattgtaattaattatcaaataaaattgtcatttaacttatttattaattagactttacaaagtctctcaattaataaataaatctcaaaatctcttttcttcacaattaagtcagtgcttagtgaaaattcataaataagacagactaattttagaattataattgattaattaaaaccaattagctgagtctacaagcagtattatctcaactagtgtggggaccatgaccctatgtaatcaagcttacaataagtagatctaaaatttaccaagtaaattttctaacttattaattcctcctcactctactatagatttagaattgaattcttaattacatagaacacactattaccaaaaatatatgtgatttgaattactcattgtttcaatctaaatagtcaaagatcctctatagaagatctacattgaatatggacaaatttaccgttttacccttcaatgtnnnnnatccttaaaacacttagctaccacatataagtgatacttcagtctactaatataattactgaaatgagacctcaatcatttatctttattaagtcaagctcgaaggaaatcatcatttcacttctacgtatttataagagctatagattctatatctatgatnnnnnnnnnnnnnnnnnnnnnntatcatgttcccaagatgtaagtattgggccgatcaaagctttaacgaataactctaggaacacagataatacatttaagcagaacctaactatatcaggattaagatctattgacctaagattaactaactgatattgacttagata

SEQ ID NO: 102271 - DNA, 624 bp, Cannabis sativa
tgatttggttcaacatcaacaacagtatcaagggaagcatatccaacttccttgtggctcttttgtctgtcgaagtcttgagaagcttattaaaatcttaaagctgagacacaaagagtattaacaactcgcaataaatagctggtaccagtattatttgtctctttttcttggaggtttcattcttttcttcttctaataattctgtaagctctatttcttcatggatcagaaaactgctacttgatatggttactgagcgcgacagcaagcaaactggaaatgtgcctctcccccttacagagtcatatgatttctgtgaaagaacgtatacaaataattctcattcatgtcttgctcaaacaatactaacttaagaaatgaggcaaattaatcctactatacattgtaatatggctatttaatatttttgtccacaaaattatgatctatgtatcatagtatatacctttaatttttcaggtcgttaaaagtagtctacaaactatttagagtattgtaaattgatcattttgtgaggttttattacacgtgacaaacagaatgatgatgtggttgtgtagacaattgtcacgtcagcaccacaaaataatttacatgttt

SEQ ID NO: 102272 - DNA, 695 bp, Cannabis sativa
acccagagtggactaggatccgaactcaaactcgaacggagatgacctacatccaaacccgaacctagactcgggacccaaacccgaaattggatccgaactcggacccgaacccagacctaggactcagacttggatggaagacccacacctggactcgaacccaaactcaggacctagaattgggacaggttcttaggactcgaacgggatctaggtccgagtttggttcggctcctggtctgagtctaggtttgggttcaggtttgggtccaggtcccagatctagtcacctactaatgttgtgtccaagactcaagtcctaagtcccaacttcaaatccacatctggatcccgatcttgggtcgaggttcagcttcgattcgggtcacgtctccaagtttgggccccactgtgggtcgaagtttgggactaggtctgggttcggccctgggtccgggttttgtctgggtgtgagttcacatctgggtgcaaatcaaggtctggatctaggtttgggttcaggttcgagtctaggcctaggtctaggtcctggtcaaggtttgggtgccggtctagatccaagtctttgttggggtctgactctcggtctaagtcttggtctcggtccaaatcaaggtctgggtctaggtttgggtccgggttagggtccaagttgtgtcctagtctgagtc

SEQ ID NO: 102273 - DNA, 869 bp, Cannabis sativa
gacatttcgatcaactccgatcaccatttaaaaaatagttggtaccgttggaatcaacatcatgagaggaacattctccactaagtcatttcgatcaactcattactttttcctggtaagatttgggtatctttgcccctttggaagcattctccggtgattctagtgcttatttgggatcacgagttgtactttcgcgatctactcgtctagagggtcattttgatatatatatatatataatactcctattttcaatgacgttttcgatacactaatttttaccgccaccgattatctttgtgcaccgcttaggtgaagattcagaattttaaactttaaatataaccttgttatatgttattgaattcggtttgaagaatatattataatgatgataattatttattcaaatgaaaagtgtaggacaattattttgagttgactaagctaattggagaaagtttgatgatcctaaggaggtaggaactcaacttgattattggatttgatttaatatgtgtcaaataacattagaaatattctaatttttatgatttataaagtatttaaaaaattgaaaatataatctacatatatttttgaactattttggggcactaagttgcaaatgtattttgtacaattatttatgcatattatgatttttgagtttattcaagatacaacttttatgctgcccaatttttctaaaacagaaatggaatattttttttgttattttttttttttttttgcttgcttttggttagactgattattggtgagagccatgtgatcatgatttgtgcatactattatttcaggacctagtctatgggttatcataggtagatcaggtgtgcact

SEQ ID NO: 102274 - DNA, 626 bp, Cannabis sativa
atccaaaacataacttaaaattcacaaaaagaatactaatatactaaaaaaaatacaaacatacattataagttgtaaaatattattaaaaatataaaacaaaatacaaattaaacgggtccctgtcagggcggggagtatgattcttgtcctcaccccgtttagcattcggggacaaaaagtaatcatgtccctgccccgtttcccatttagatggagaatccccaccccattagggggtccccacggggccccatccctatgggagaaatgtgcatccttagttgacactaaaaaatggtcaataaaattaatgtgttaaatgtttaggatatggatatatggttaacgaggaaattaatttgtatgtgctatcactgcaagggaaacgcgttttagccagcacgtttcaacaaacttgaagctttttttggagatttttttttttgaaatttttacaccacatactaaaatttttaattttttttttacttttttactgtggggtagaatgtttttcaaaaatattgtgttaagttttcacagttgttctacggttgtttcttaattgttccactgttgttttaattattctgttttgctgttttacgattattttataaaaa

SEQ ID NO: 102275 - DNA, 693 bp, Cannabis sativa
  modified_base (37)..(40): a, c, t, g, unknown or other
agggtccaattgataacttttgtaaaacagagggtcnnnnatggtatttaccctttaaaaaataacattgttattgagtattagtggtacctagtatttttaaaaatgtcatcttgtgattggttagcgatacttctaaaaaattattatattaaactggactcaatacttagttagaccaataacaatattaatacatatgagggtaccaagcatcactggtgtcttttagcatttctttttaaaaaaatatcttttaagaaatattactaaccaatcataaagcgctacttataaaaagtgttggacactactaatgtccaataacaatgctattatttaaacgtataattttttttttcacattatttaaaaatataatattttattttatctctttcatttcgcactcttatttttaaaaatactattaaaaaatactaacataagtttacagattattatttaatatattatttattttaattataaatattttcatgctaaaaattcttatataaaatataaataaacatgaaatttaaaaatttgaaacctatgaatagttgacttttccatacttagaactataaatttttgaagctatattgggggtgcggtgggtggggtggggtgaggtggggaatgtgtatgaaagccatatatgatagtgaatttcttagtatgaataat

SEQ ID NO: 102276 - DNA, 687 bp, Cannabis sativa
gattcttcattctatttggcttagaaggttgaatgttaagattagtaataatatacttgatgactgagactgatcacaattgtaaaacattctttacatttttttttcatctttattcatctccgttacacaattgtaaaattcttaggtgcacttcaaaaccaaaatgaggggaaagtaggaaaatgagttatttgaaaaaagctaattagaatttttacctcctaaattttaatatgtactaaatcatgctcctgaacttttctagctgttaaaaattcttcaactattgagattgtaagatttaaggacttttctttaattttattcaatttcactatttcagtgattatctatgtactaaatcatgctctgcatactttgatatctactaaattatgcccctcgaactttgacatatattaaattatgctccttgaactttcatccatgttagattttttttactaaaattagacaaaaatccttaaatctaacaatctcaatagtttagagggcatttttaacgaacttaaaagttcaaaggcataatttagtacatgtgatatagggataaaaatcctagcctttaaaaaataaacatatgttataatgtagagccacacaactataatgtgtactccaagtacaactcattcaacatggtaactgaaggcaggtcattac

SEQ ID NO: 102277 - DNA, 1423 bp, Cannabis sativa
taattaaataatttgttacataaatagtcattaaattattaccttcccaacatttgagtaatttgttcgggaacttgttggccacgtatatggtctaaatggatcattttccctagcgcaatgacctctagcatccaatgcgcactaaaaaattatattgggatataagtaacatactataaaaataatttcaagttataatatagaaacaaacaattagcactaaaaaattaaatagtgtttacccgatattctagggaataaagaacatttggtagttgttattcatcaataataaccaagcagccaatcgttttgccgcattctcaaaagactaactcttctcttcatcgttgatactattcactacgagaagctctgggtcgtaaaacttgaaaatttttctcaaattttttatgctctcccagatgtgcctgcataaaattgttaagtaatagtgtgttataataattttactagaatttgatatatgaggctaattagattaaagaagagtatacatcattccaaacaacattccctggttatcgatgaagtcacacaatgccacctactacaaatcatctctagataacgtgatctggagatgcggtgctatgaatattcgaagcaccggaattgtgattatatcacttttatgtttgattcttagaaatttagcaaccatctattttaattacttagggattaaagctatgacctttggtgagaataattcatcttcttcatcagcaccaccttgtggagaaggcatgggaccttttcccttcgacacatcacatcttgattgcagttgagcgagtggaccctatacaaaacacaccataatatatcaaatttgatcctaattctacttgatttttggcagcataacggctgtaattaaatgcctctaaaattttaaacatgcctatataatgacaaataacatagatataacagttgtttattaatccatcccatcacagcacaaatatttgcataacctacttcactatggttgaatatttacgatattcaaactccactaatcattaataattaatttataacaaaagttacctcgggtgttgcaattaggtatttaggccaagaaaggaacatgtttgctacttccttaatatatctgcacctgtcaattgagattgggatttcagtagcctcttgcaaaatttatgaaatcagaacccaggcatgtgaatcatcgtagtctttgcagtgaactttgattggaccctcatgttcatacaaatatgctcgggccacaacattgtcgatattgtcagagcagagatatactggctgattaagggccctctattcatcaaaattgtacaagagcggtggctcgttaagggaaacaaactcctcagcataaatttctggtcgaccctcatcctca

SEQ ID NO: 102278 - DNA, 740 bp, Cannabis sativa
tctttttaatattaattttaatataatatgagttaatatattttatttttgaaaaatatcctatacgattccttttttttttatctttgttaagtcatatttttcatgtctaaatttgaaggttttggtctttactttttttgttcttttttttgttcatgtattgtgttcgcaacgtaatagatactacatagtagctttatggtttggagctaatatatttatatataaggaggtgacatgtgataatttagatgatatatgttcagtgttctctttgtttgatttcaagtcctgtatttatttatataaaatatattagtattggcctaactattgtatatctgaactggaaggaacaaagaatatataaatgaaagttttttttagatggacaaaagtggaagttgaatcaaatagaattttatttgattttttatttattaaatcatataataactaaaagtatttaaaattatatgaattatttaaatgaggagtaatttagtcatgttgcccctgattttgcccaatatacgtggaccaaccggacaagaacacgtggatcaaaacatcttaatacttgaattatttgctaagtctttatgaaagaaggcaggatccgggacgtgtctcccggagaaggcatacggagcccccctatgctctgggaagcctaagtaacatcaaagcatctccgcgaggtgtcaggcttcccctgagcagtcatttcgcattta

SEQ ID NO: 102279 - DNA, 735 bp, Cannabis sativa
tatatactttctaaataaaacaaattgtattcactcatttatcttcaactagaaaaaaaaaaattgaaaaaaaaaagagaatgcttttctctcaactctctctctctttcgattttacctagaggcagctagggcttgttgaaatttgtccttcattctagttagttgcagctggatttaagtgttcttaagtgttaggtaaactcttatctttactctcttaagtttcttatttttaaaagtggatcatgcatgtttttgtatttttggttgttgttcttgctgttggggtttgatatagttttcagaagttattataggtttagaaatgttgatttgagcatgttttagtagttgttgattagtttaactaagttttgagtttttgaactcaaacttggagctttaatggcaagtcttgattctgagctttgattgttgttttgttgctttgattatgttcttcgggatatatagagcaggtctagaaattttggtatgatttggggttgtttttagtgagatatgaatttttgaacctttcctgcactgaaccggaattccggttcagggggaccagtaagaaccagaattccggttggtccccaggaaacccctcaaaaccagaattccagttgggaacgggtctaccggttggggcagtttttgggaaccctagtttttcccatttttgtgttgttttgggtatttccatagtattcatcgatagggaaa

SEQ ID NO: 102280 - DNA, 584 bp, Cannabis sativa
tttacagtttgggttgctccggtggttttttcagtagtttttccagtggtttatatgtgggctattatacgaattttggttttaatttaagttgctccgtcagttgctatacatgatgcttattttgtttatttgtaatgaaaataaaatataaatttgtaataatatttatttattattatttttatttttcatcctactaatgtataatttgtttatgtacaattaaaatactattgtcccttcaagctttagaggaaggatagcgatttttaaaacaaattgtgtgacgttaataacattaaattgcaatctgctactaagattttacaactgtgtttgattttactattaaagttccctacacttactctaatgattttaagatctttattaaaaaaatttacaagtttattatctagatttttaagagtgttcttaatttgtgttatttatggattaattgtacatgcattatgaattaaaaaaataatttgtttggctagatatgaaaattcatattttttattaaatgtatagtattattttgataattatggcatgtatagtatttatttaatgaa

SEQ ID NO: 102281 - DNA, 530 bp, Cannabis sativa
tttaaaaatcactaatacgcctatattagttagggtgttacatgttgctactcttgacacgtcatcgtcgttaaaatttgtgtaaacatttaccgcccaagtttctagcggtatgaccatatggtaggaactttcttgtgctgtccggttcttgcccttgttgttgacgacttggcaccaaaaatactacgcctatactaaaattacattccaacaacctaaaaatattttacccaaccgttactttttttacatttaacaacatatcctaatgataatttttccctttacaagcaaagttaaattacaagaaaaaataaattactttcaaaataaataatctaaatatttacaaagaaaaaattataataatccttggaagctttgaggtttccatcttcatataggctctccacacttcctcttccaaacttcttacttgaaatttgaaatttgatgaaatttttagcacttcttttttgtagtttcctccatggccggaaatggcattgaatccttgggatttttga

SEQ ID NO: 102282 - DNA, 528 bp, Cannabis sativa
ttttttgtttttttccaagagatgttttttattatttttcatttcagtttcttcatttgatcttctcctcattttgtattagttttttgatacttttttaatagtgtaaacacgttttgtatgtatttttttgggaatatgtttttgtctagttgtttccagtctatttttatatcatcaatgggtaacaattagatttatcatggatgttgatgttcaaagattttttcctgtattgttgttttttagttttattatagttttgctacttgcttatgttatttctttatatttgttttctttgtgaaatgcaggattgggttaacaaatgcagtcccaatgatttctacaaatcgaagtgtgtatgtacgagtaatttctctgctattaataacattaagaatactttgtctgtcaatttattaactatgttccgtgacaccgagtttaatcatttttttaatatacctgactttgtttttcacccacaagttgtacgtagcgtacttttgagggaagtataccagc

SEQ ID NO: 102283 - DNA, 1172 bp, Cannabis sativa
  modified_base (62)..(72): a, c, t, g, unknown or other
aaatacaaggtctattttatcattaaacaaaatagaaggtccaattggtaacttttgcaaannnnnnnnnnnaaaatggtatttaccctaattataaatataattataaataaattataaaataaccaaaaatggtttattatttttactgaagatgtctttttgtaaataaaaaaattcaaaaagtaaaaataattttttttttgtattgatgtatttttgtaattattttcaaatttttggtttgttattatgtaaatttttgaaaaaaaaagatgtaatttgttttaattaaaatagggaatgaaatgttatgtttggttggacccaaatcttatgaaaaaaatattattttatgtatagtatgaattcttgaacacctgttttgtaatgattgcacgaggtttaactattttttttatctaatacatgaacgctttttttttaaaaaaaaaaatgtaatagtacattttttttttttaaaaaaaaatgtaatgtaaaaaatgtaggaattcaattgactatattaaaattatttattctgttaaattactctaatattttgtaaatattgataaaaatccaataagtcattagtggaagtttgggtaacctaactaaatcaccacactattttagtgggtaatcacatgtaacatgtatatatgaaagctcctaattatattttattaatataattccatccaataatagtctaggtttaaccttgttgatctattccattaaaaattagacaaagtcatactattatccctatgtaattatccgtttatagggattattttacaaatatacaaaaataataaaaaaattacaaaaatacagttttacagaattttaaacattttacgattttttcgattttattttacagaaaatacgatttttttttgtactcttgttaatttgatgttgattttttgttatttccatgttattttttgttcttattttgatgttatttagatattatttttatgtaattttcttaatgttttcgtactatttttataaaaaattttaaaaatgtaaaaaaaaaaatctttaaacatataagtataatttaaagaaaatacgatatattatgtgattattcattatttatatatattataatattgtatatgataatataataaataattttattt

SEQ ID NO: 102284 - DNA, 704 bp, Cannabis sativa
aataaacaagacaatttattaagaacatcactcttattgaaaattgtaacatgaaacctcttaatgcaaaggactgtagagaacaataaaagttcataaatcacttaattaacaccacgagtaaaattttcccgtgtttcaagaccccaaagtaacaataaagagtgtgttaaactattagcaggagtagaaattgtagaacatgaatccgtaagctcccaaacagtgggaggagcccaaagctttgatcgcatgcctgttaaagaatgagtcaacgactcatatgcagtggcttggttaagggaacttgttgttgttgttaataagtcgataagagtattgtttcgatagatatagaattcattaatatctgaacttgttagtttataaccatctatttgagtgattggtttcaacaattcattctggttctatatttgttcgaataaaatgtttagttaattttatgcatctaaccaatttttttttgtctcccacctaagctgcacatgaaaagtccaaagccaatctcgaagaacaataaaacttcatagggtcattctctctagatacaggtagtccacatctttacagatcaatatgtttatttcactgagggtgtgtttggaagtaactgtgtaattactaagtatggtaattactatggtggtaattacacgatattttaaaatacaaggtgtgtt

SEQ ID NO: 102285 - DNA, 918 bp, Cannabis sativa
gtagttctcaagctgccaaaaggaatcgataccctttaggttcttgattactatcttagaatcactctccaccataacaaaagggtgatgcattgtggtatgaaaatgtggatacattgctatattagaatatactagtagtaagtaatagtagtagtaccatatatacaagtaaatgtataatattataaaaattgtgaaaaaaaaaataattacataattctatacgagtttataaatatttacaaataaatatatatgtttaggattttaatttgttgattactttcaattgattttctaaataaaaaaaataaccgcataaagctaaatatgtaaatataaaaattaatatttatattatgatatattactaaaataatgtatttactaaaatttaatataaaattttaaaaagaatatacaaacacacttacaaattttatttatattttataaacagtttatatatatatttattaaatatttgattagtattatcaatgtttacaatgctattattaatttagtatgtttattatgataataaatatcatttatttatgaaaaattaaaataattttaaaaataaaatacttaaatttatttatttagttgaacaaacactttattttttatttattacaaggtcataaacaatgtaacacttatgtttattagttattaaaaaatgtgtaaaaaaataagttgtaattaaatgtgaccttatgtataaatattatgtttatattattattgataatgtttattaattattaatttaatatatttgttataataatatttgtaatgatatgtttttttttaataaatttatgataatacgttgctataatattttattaaaatttaaatacatttatatggttattatttatttttattttatatagtttg

SEQ ID NO: 102286 - DNA, 782 bp, Cannabis sativa
actcatttaatgttaaaattcttaggagaatttttaaaaatataattatttttttatgttttatttataattttataatttaaagtttttatttataaaaatacgtttttgaagtttaaaattacaaaatatacttttcttagcataaaataaataaataaataaataaaaaattaacttcatgataattataaatcaactataaataaattataaaacaattaaaataatctcaagacaactattaaactataaagtaacaaaaaaaatatttattatttttactggtagaatatttttataaataaaaaagttcaaagtttaaaaataaataaaaaattgatgttgacctatttttgtaaatttttttatctattacattaaaatttcataattttatcatattcatcaaatttgagtaagataataattttagtaagatactaaattctaaatattaaaggaattttcccacaaaccaattaaaattttaaatttttttgtaaactttttatattttagggtattttatctatgaaataattcaaaatttaaaatactatataagcatgactaaagaaaaatagcactgctattaaatcaaaatacagtagaatttctatccaagaagtaaattatattctaattaagatgttataactaaatagagttacactaaaaaaaaaaattttaaaaaccaaaaaatatcaacgtaacaataataacaataaataatcattaatactatatcataatagatatattttagagtaaatataata

SEQ ID NO: 102287 - DNA, 702 bp, Cannabis sativa
atggcctgaattaccgatttgagaagaatctccttaccagctttcctcaaaagcaattgaatatatatactacataaaaaaataatgataatctcaaatatccttaagtaatcataccatcagaaaagccattaattagcgcattacaaataaacaaccagatgaaacatgtatacaattgtcacaatcaaatataaacttggtcaaaataaattgtctatataccatatgagaagatatatgcgactgaatctcaaacccaaaatattccagtgtagaattattcaaagaaaaaaaaatcctatttttcaaaatctacaaattttataaacaaaaaagatcaaattttcaattaattcagtaaaagtgactctaatattatttgttaggatttacaaaatattttaaaaattcaaataattacaaatctaatcatatttctaaaagtgttttaatataaaaaaatcttaaattatattttattgaacctttagtaaattaaaaaagaagatgatgataacgagatgagtagaaatactaacctgaagcaactgtttgcacagaagattaggatcttctaaaaatacacttttttctttatgtatttgtctctaatgggaaaagagaatacaagaacttaatattttttggggaccacaatctatttatagatcattatagaatgagttttggtatttataa

SEQ ID NO: 102288 - DNA, 707 bp, Cannabis sativa
atcaagaccaagtttgagacaaaacacatcaaatcgagagctggataaaggcttagtgaatccatctgcaatctgatctgttgcaggaacatggttaactcgaaccagttgttgagagattttctcacgaacaaaatacaaatccaactcaatatgcttagttctagcatgaagaactggattggcagtgagaaggacagtgctaagattgtcacaccacagaatgggaggtctaggcagtcgaatatgtaactctgaaaacagagaatgcaaccatgtgagttcggacacacttgagcaacactgcggtattcagcctcagtactcgaacgagaaacagtatgttgtttcttacactgccaagcaatcaagttggatccaaagaagattgaatagcctgaagtggaccttcgatcatctggatcactagcccaatccgcatcactaaaggctgtgatttcaaaggctgaaagaggcttgaatgtcaaaccgagagacagagtgccacttaagtatcttaaaattcgtttgacagcaagccaatgtgtagtgagaggatgtgccatgtattgacacactttattaacactataggagatctctggacgtgtgatggtcaaatattggagcgcacctacgattgaacgatagagtgttggatcaggcacaggatctccatcatgagcagataatttcaagctactgat

SEQ ID NO: 102289 - DNA, 638 bp, Cannabis sativa
gtggggccacgccaggagattgattaggggagagaaaggggttccacgtgctcggtcaaactcaagatcattttttctctgcccgaccatgctttggaacatactccttagttcgtctagctgttcttgcacagcttgactaacctgttcagcattttgcccaatttgagtcacgttagtatctctctgagcgggaatttgagcacgagttctgggctgtacgatcgtcatgccaagttgatcgtctactcctcttcttctgttcagatcgtttctgaggtcatgagtcgtccccaacctttcgaatacaaaaacaccctgctgtctcagtgattgattgacttgtttgacaggtggaatggcaccgttggcctggttggaaccttcgggtatgacttctcctgatgaattactagacaaggtctgcccacctactgctttgcccacaggccgaacctgtgatcaaagatttggcggctgaccatttatagtctgggaagtattcatcggtggaacttcgtctgtttcacccagggggatgacattcgggggttgcaacccgaaattttggtaggcttttcggatcagcacagtagcttgtcgactacgattgtcaatctctgcatgatgagccctta

SEQ ID NO: 102290 - DNA, 573 bp, Cannabis sativa
agattttaatatactaattttctccaataatgtagcaccttgcagcaaagaggcacctgccaaggctggcatgcaactcctgcagatgtatattacaattacaatgccctcactctcaaataggaaatgtagtttctaaactcataactatgctgcaagtaatcttactattttttattctaagatgattggattctgttatattatctaccattatggaccacattctattgtttacatttctgaagttatactctgatatacttttaataagtcacaacttcacataaattatttgcaaagcaaactattcctcattatcatttggcagtaaattcatgtgttattaaacttatggagtaagcaaggttatttgtattagctttaatcttcaaaaattaagctgtaattaaatgccttctgcttaataattgtaatttttcttgcagttacttggcagctcaatgcattataagaagcaccaagtgggaagtaaatatttgttcatgaccttgtactaaagttattgatttttcttttctttttgtgacattagattttaggcaactaatt

SEQ ID NO: 102291 - DNA, 1026 bp, Cannabis sativa
aaaattaagatgtagaaatgatagtatgtcaaaaaaaaaaaaaagaataaactggtgaaaagtggcccaaaaaaagaccttgcacgtgcccccacgcccccattttagttttttttaactgtcggacgacatgtcatttttcgttgggtgaaaatgacatgcagcaagatcataaaatgacccgtcgttttgtgctgcaaagggggatggaccttatgtgcatatggcatgttgtttttatcgtctctgtcatttaaaaaaccccaactcgtgggtctgcgggtctgcaactcagatcgacgcgacccagttcatgaccttgtcggatagaccatgtctgaccaccaaatccaacgtcgtttgaggggttttgttccaatttcaaccctctatcaatttccaaaatccattttatccacttccaccaaaagacattacccataaaacataaatcccaaattaaatttcaccattgattaacacctccacaacaatggaaaataaaaaaagaaaataaccatccagaacatatataaatccatttaaaatagtaaaaaatctcatatttagacaacattaaatatattaatccaataaagaaaaaaaaataatgaattttagatttgaaaacaaaatgggctagtttaaaatattttagagttctaaaattaaatatactagctcttgataccaattgttaaactatcacataaattatgagctatccatacacacattaagcattaatcatcattgctcataaccattaaatccaagatcaatactttatttagaacatctaaaataatacacacataccccccattgagccatctatatgagccatttgaatccacgaatcaccaacaaaaaaacacaaactcaagattggaaaagagcacgatatgaatgtaacgccctaacaagtaggcatgctacccaagacacttaagaaatcctaatcccctaaacaggattactaataaaattagcacggaaatgaaactttaattacaaatggaagaa

SEQ ID NO: 102292 - DNA, 538 bp, Cannabis sativa
ccatttatttactgcatacacaatggccatcaactatttttcataaatagacttaagtctacctcgtggaccaagagtgtggctgaaataagctacaggtcgagatccttgcatgagtactgccccaaggccatatcccgaaccatcggtctctatagtgaaaggttgagagaaatcgagcattgctaacacaggaactgtacccgtggttgtttttaattctcggaatactttacttgcctcttcattccacccaaagcaatctttcttcagttgatcgattaatggccaagttatttgcgcataaccaaccaaaaatttacggtaataccctgtgagacccaaaaatcttctaagctcgcggattttcagggaaccggccaatctgtcatagcagccaccttgcttgggtcagctaccactccttgacccaagatgatgtggcccaaataagccatttggcgctgcccaaactcacattttttcctatttgcgaaaagctagtgctgttagagtagttgtagtactatggtgagat

SEQ ID NO: 102293 - DNA, 581 bp, Cannabis sativa
aagtggcttgactttaaatatgagaggcctcttgacttttgtttctattgtggttgtcttgataataccaaaagatattgccatgcttttctgcagaaatgtgatgaaactcactctgagcctctttgtccttttactatcttattgaggggaaaagaaaaaatatttgataagagtgcacctttccaatacccacactcaccaaccatgacattgcttaacatccctactgttgatcttagcatccctgctagggattcttcggggccagccattcgattcccctcattcctcattaatcatgtcacttttggtttcacttttacccattcccaacaatctgcagctattatgatccctacacctattaatcccaatattggaggaatgccaccatcttttagtaggtttggtcttggttcctcctccaataattctgctttcacatcttactctactgactctgttttggtagctgcttccacaaatatggcttgatcggaatctatgatggaagccttccatgctcaaactcatatccctgccaccagctatggagatctagctcttgatactcatac

SEQ ID NO: 102294 - DNA, 1498 bp, Cannabis sativa
  modified_base (200)..(211): a, c, t, g, unknown or other
  modified_base (242)..(253): a, c, t, g, unknown or other
  modified_base (280)..(291): a, c, t, g, unknown or other
  modified_base (319)..(330): a, c, t, g, unknown or other
  modified_base (373)..(379): a, c, t, g, unknown or other
cttaactaacaaatcaaagaacacaaataactctcttgagattgaacctaaccatttcaggattaagatcttttgaagtaagatcaacaagtgatattgacttagaaagatacaacagtaagactatactatatttaccaagattaatatcggtcccagtccaatgtatacttcatacatctgaaacaagcatactttgnnnnnnnnnnnnacatctgaaacaagcatactttgccaatgtnnnnnnnnnnnnaaacaagcatactttgccaatgttctnnnnnnnnnnnnacaagcatactttgccaatgttctggannnnnnnnnnnncttatccaaggtgtaagcatactttatcgctgactatcacatnnnnnnnaatccagtgcactgatgaatcaagggacattatcttttgaagcatataatcacaattactgttgacctcgcttttggccaatgacagacagtctagattgtaagcgacaagtagtataatgtatatgtaatataatagagtaactaaacacccaataattttatagaggttcagccccgagtagttcggtaatagcctaatcctcttagtttgtattgacataagaacaaggaacgtaatgatccctttccttatggctcttgcaatgatatctctgaatatgaattcttagatcagatctttttctgcccagtgagaatgaagcactatttatagggctataagctttgagtgaagaatttcccttcagattacaattgatataagtggaaagatttcatattaaatacagaatacactaatgaagggattcggatagcttggcgtatctctgtgatctgatcctaaataatagggatttcttctgtgactcatgatgcgaaagctgaaatttctaagtgtcgacgtgctgttcggattgcttactgctcggttaagaaggcttcgtccgagcgaatatatatggtgtcctattcggcatatctcttgcgagcaggtatataaagttgtttcaacatgtcaccatcgtgtgatgccacgttagaatgtaaaaattgggataacctttgccccccaagtgtgtacgagactttcaaagttgcgtgtagacttcatccgaactacccttgcatttgaatgtgtgacacgtgttaggcgcatttgtttgcgattcgaggtggggctgaccaagcgcaactttagttttgggctaattaatgctctgactcaatgaattcctcgaaacccggctttttctcaccacgtttgacggttacacttaattatatttgattcccaatatttgcttttggggggaaccgatgcgtctaagacatttgaaatgattgcccttttttcactttttctgcctataaatagggctgagcaacattcacaaatttacttttaccaaattttccattaaaccaaacatagagcaaaaagggtttttaccccaagtgtgtcgtgagatttctaccaaaagcatccaagcagcct

SEQ ID NO: 102295 - DNA, 793 bp, Cannabis sativa
tcatcaggacattgaggctgaaggccgatatccattaatagaaaagctcacattttgcttgattttagcaacaagaaaactaaggccctactttcaagctcatcttgttcgggtatatattgaccaaccattgcgccaaatattgcaaaaaccggacgcctctagacggttactcaagtgggcagtggagttgggccaatatgagattatcttccaaccccgaatagcaattaagggtcagaccttagcagactttgaagtagaatgcacgggcaaggaagaaagcatatcaacaaacaaccctgagccagtacaaatacgtcagccaagtaatagtgaaaataagctgacttggaaactacatgtggacgggtcggctacagatcaactatccggtgcaggaatcgcccttgtcacgcctagggggaaacatctgcacactactgtcaagtttggatttaaagcatccaataatgaggccaaatatgaagctttaattgtcggtctaaaactagcctgggaaatgaaggccgagcacattgagatctgtagtgattcacaactggtggtaaatcatgaatttggagaatacgaggctcaaggggaaaagatgatagcgtctctgagaaaaatacaggaactgctcgcatagttcaaaagctatgctctcaggcaaattccaagggaagagaacacgatggctcatgcaatagctcgacttgcgagtagtaatgtaaatgatagagcaaatctgattcttattcagtttctcgaagaacctagcatcactggc

SEQ ID NO: 102296 - DNA, 848 bp, Cannabis sativa
  modified_base (155)..(159): a, c, t, g, unknown or other
  modified_base (353)..(356): a, c, t, g, unknown or other
tcatcattttacttctatgtctaaatagaagctatagattctgtatttatgattagtgctcccactcaattgtactatcatatttccaagatgtatgtctggggtcgaaccaattggtaagcttcaacgaacaactctaagaacataaataacannnnngagatcgaacctaaccatataaggattaagatcttttgatttaagatcaacttggtgatattgacttagaaagatacaatagtaataaatttataatatctttaccaggttcaatatcggtccagttcaatatatactccatacattcattactagcatactttaccaataccttagaaaggacataacacttnnnnaaggtgtaagtaaactttatcactaactatcacattagtgtaaatttagtgcattgatgaataatgagacataaaattttaaagcagataatcccaattaccttccactgtgttgacatcactgtaattgtgagtcacaatatgttctagatttaacagaaattgtatatcaaaccaaaagcatgaaaaagacatgtaaacataaatgacttctaatattttattaataacaaataagattatattaaaataggttttatttagggcataaaatctcaacattgtacatgtgacatacacaattaattttctaatctcctctcacacttaagaatagggtatttataaggtctaatggcttgagttatatagttgtctcaaatagataagctgtcacttttgcgccgcacactatggatgcaggaggtggtcttgtgccttgcagctttgtctggtattaggtgatcgcagatcacagagatggtgcttgca

SEQ ID NO: 102297 - DNA, 659 bp, Cannabis sativa
ccgatcgaatccaagcacttaattataattatatatatatttttaaaaaattataaaatatataattttattatattatatatttttttgatagcatatattacattattctatagtaatatataaaaaaaaagacaaacctaatttctaaacctaaatataatccttccactttctcttctcctaaatataaccaaaattttcttctcttcatcactgtcaatctctgtcgccgttcaactcaccaccgaccaccgaccaccgactagtctatctcttcagtcgacggtagactccactcgctgccctcgccgaccagtccagaacttcagtcgaggtctactccactccctgccctcgccgaccttagacaaagggttatcatttgaaagcagggcttgttattgaaggtatggaagttagacccaatattattattaagcattaacaaagtgctgtttatttctttttctaatattcattcttccattgttttttaattgtaatgttaagagtttcttgaaataaatacatttgtttgtttgattgtttgatcttatgttcaaattcaaggttaaaattgggtttcttctctactcaagattggtagcccaaaaatgtttcaggggtgtgaatacgggaggttcgagcctcttctg

SEQ ID NO: 102298 - DNA, 712 bp, Cannabis sativa
  modified_base (666)..(673): a, c, t, g, unknown or other
atggaggtggaagccaacactaaagtgatcggtgacatgaaacgggtggccttacaatctagacttgcagttggttctctcttgtggggagaaatgcaaagaagaatggttgagacattatttgaattcatggcttaggcacaaggctttatcattttggaagacgcttatcaacaagcatttgaagtccctccagcaccggctcctgttgcttccactcttggatttacctccacagctcctgttcctaaacgcagtataccatgacagtctacgaaccatctgcgtctgtacaagtacccacgcaaacccatttctctgggtatagagcggcacataccagatgcagtctcgctcccagacaatcgaaagcaaaagttctaaagcaaatcgtgagccaatcccagaataaaagaggaggaaagggtctaggacgaagtaaaaattccaaaaaagccaagaaagaatattagccgagatacaccgagcactccagtctagtggatactcgatagaatatgtataaagcaacttgcaacatggtccaaggccccacggacgcctcaaggggggaaattcaaaagagattttgagtaacaggtgtgagtatcacgaaaaagtaggacactccaccaatgaatgtaatgttgggctttgtgccctaannnnnnnnctatttcaatgtaatcttttatatacatttatcaataaa

SEQ ID NO: 102299 - DNA, 537 bp, Cannabis sativa
tcacttttctacttttaaaaacaaaaaactaattaaaaaaatgttaccaaacgccacctaaattaagttaaaagtttcaaatttctcttttattatttgccattagattaaaatctaatgatttaatatttttaaattaaattaatatttatagttacatttatttatttattttttttttgaaggatatagttacatttatttagtaactatcaatgtgtaatacccattaaaaattattctatatatttatgaaaatagctaggtgtcactaggtacgtcttatctaatatataattttagtggttaataaatagtaattaataggagaataatctattttataccttatgttcccatcatggccttctaaaaatattctattatcaatatatagttctatggatatttctaatgggaaattttaatttttggccttaataatacaagttatatcaaaatttatacttttccttaatttgtacaaatttagtccattaattacatgaacttcccattttacccttttttttaaaa

SEQ ID NO: 102300 - DNA, 524 bp, Cannabis sativa
aaaaattatttagagttaaaagttgaaaatgaaagagatggaaaaaaaaaaaaagatttcacgtgatttttaaataaactcaataacatgttttcaacttttcattttttaaaatatacttatacttataaatttcctatgtcttcctaaaaaaattgttgctctcataatgaagccaatcactttctctctttatatctcttgtcctttttcttaagatcaattttttttttaattagtaatttgcggcataaatatttaaatttaattttcagttacaaataagtatttaagtttaatttgacggtaataatacttaagttataattttagaacttctataagtatctaattattaagtgttaagtaaattgtcacgtgtcaattcctgattagtgtaggtcatgaatttttattttttttaaaaaaaattaatttaaataaaccaacaacaaaataacacgtagataacattacaacatttttactcagtaccggcggaagtaataccggcggagccaaac

SEQ ID NO: 102301 - DNA, 553 bp, Cannabis sativa
attttacaacttcacatatctctaacatgttaaatttgactttgaaccatacttaccaaatctttgtactcattgaagtttaaacttagttttgacaacacattaaatttgagattgaacccatacttcacaattatttgtacacaatgttgaaaacatatcaattcccatttctttaaccaaatgtaaatagacaatgaaacttatcaaacttagtaaatttgagttttgacaacatattaagtacaaaacatactctttttgctacttcacatatcaaatacaaaatgtgaataacatatcattttgcaacgtcacattgaacccatcacataaataaatatttctacacaatgtagaaaagagatcattttcctactttagggttcttttaaccaaatgtaaatttcaccatgatctatacttctctaaaatttctacacaataaagttaaacattagttttgagaacataacaaatacaaaacataatcattttgccactacccatatctttaacgcaatataagttggacaatgatgaaaaggcaaat

SEQ ID NO: 102302 - DNA, 652 bp, Cannabis sativa
tgtcattttaatcaacacttaactgaattgttaaaaggggtatggatggaatcacacaaattgttaaattgagtatttttgccgttatttttaaaatttggatacttatttacaacaaacttaaaaatttgagcatttatgccgcaaatttccctatgtttaatttgtttcacattttacacatgattatatgttcttcatatcattcatataaatttcatagcagttgatatcagagttattttttatctttgtcttaatatttgagttgtgtatacacacacatatatatcagttttggttcttttatagctgatccgaagaactactttttgttttaatcattttagtacatattattattattaggattgtctttattcatcaattctaatagtttctatgcattaaaataaaattttcagatatatatatatacatatacactcgtatatatgcatatgcacgttcatatatatatatatatatatatatttataattttacccatatatattatatataatacttaatgaattcatgattgttgattcaaaaatctaaactagacttctaaaccactcgctcgctagattggcgagaatataaaaagttatagagtaatttatgagagacacaataatttattgta

SEQ ID NO: 102303 - DNA, 504 bp, Cannabis sativa
aatcgttcgccggtcaaatcccgatatggtgattctatctgaaacaaggttggttcttgataaatttgaaaaactgattcataaacttcattttattgagtttgtgtacatacctccaattggtctctcgggcgggtttggggtatgttggaaacaaggggttgtttgcaaggttaaggaagcggataaaaatgctctgcttggttcgattgaatctgatcctcctgataccaaatggaacttcattggaatatatgggccgcctacaatgtcaggaagagaagatttctggaatcgtattggagactcgatagtaaacggatcgtcacccacagtccttattggtgacttgaatggaacacttgcagatcatgaatgcctaaactatgccaatcaaaggaactcagctagatactcctttgacttgaggagaatggtggcgcgaaccggcttggtagatcttggttgccttggcggaaaattcacctggttccaaaaggcctc

SEQ ID NO: 102304 - DNA, 578 bp, Cannabis sativa
cacaaatctgcttctcaccatactgcaacagtctattttctgtcattccatgtctagcacctgcaataaaaaataccacaccacagcaaaactattagtaatggtaggaagttgaaagttatatatatgtaattatagagtatgtatataataatatgtatatatatttttattctcttttttttcttcttttttttctttttttttttttttttttcttaacaaggggtggcacaccccaaacttattacataacatatatatatataactagatatagtcttgttcctccgctctcggggtttgcccaaaatgtgattcactaaagtcatggaaaacctggaagtcctttcttcaagcttcttttgaagtgatggagctctttgctcggttgacctcaccacccccaaacttcactccttggcctttcaccaagaattttcttcttgaaagtacatcacgtagttccacaaccccatcggggtatactctcaccaccaagaaagatccatcacaccttgaatctagtcgtccatgagtagccttcgataaatagttggcaaaaatcacttgttgcc

SEQ ID NO: 102305 - DNA, 682 bp, Cannabis sativa
aaagcccattttcctcataacttcttgaataaagctccattctactcggtcaaaggccttactcatgtccaatttaagagagacaatccccttccttcacgcggttctattcttaattgcatggacaagttcgaaagccactaaaatattatcagtgatgaggcgcttaggcaagaaggcactttgagtttcttaaatgacatgtgggagcacaactttaaatattgcaacaagaactttggtaatgagttttgaaataacattgcaaaggctaatcggtcaataatctttcatgttcagaggcttcttattttttggaattagggtgataatggtacggttcaagggagttgggtcagctccatcattaagaactcccagtactgccttggagactaagtcccctactaaatcccaatgttgttggtagaacatggcggacatactgtcaattccagggcttttatccggactcatacttttcagtgctgcatcaacctccgctctagtaaatggttgtgtgagaccgaggttcatatcagcagtgaccatgataggattgtgtcaagaacagaggacattgcagcatcatccgttgtagaagcttgaaaaatatttttaaaatattcttcagttacatagaccaaatctgaacgtgaatgcactttgaggccagcatcat

SEQ ID NO: 102306 - DNA, 707 bp, Cannabis sativa
  modified_base (260)..(266): a, c, t, g, unknown or other
ttataaaatttaattttgtttaattttgtgcaatttggttctttagctataatataatctaaatgcataacaatagcaatgagaaataaacagattgcttttaaatataatgagattgagtacccgacttaaataaacatctccaatggtaatattttagagaatgtttgatgaggtggaaagtttaagtgacaaaatataaagatgttataccattggagattaaaaaaaaatactattcttaaaatttgcattgatgnnnnnnnatggcattgatactatgtttttttatacaataaaaaaattagaggtacaatatatataatagtttaataaaaaaaaattatatatctaataatgtgtgagatcataattatagcatttttaaaaagtattataccattagagtgtttttagaagtaaaagtgtcaaaaatcatgtgaaaaaaaaatatattatatatttagataatgtggagatataaaatataatagtttttatctacacaagaaaataataaagaaaaattggataattgggtttccaaactttcacccacttttttagatggagttactaaaaattaagaagagaaatgatattggagattggtaccatatttatatataggtgtgatatattccatatttatatataggtgtgatatattgtagggtaaatattattttggacccagtgttttgtaa

SEQ ID NO: 102307 - DNA, 637 bp, Cannabis sativa
caatgtactaaattaaaaagagaaatgctaagagtatatacatagcattctcagcaattgtaatattgttattagtataatttaatatataagtagatgaaatactacacataatattatgatttgtcaagatttgatacaccattacggaaagaagaattgtacaactagttaaacttgatttgtggaaaaatcatgatactattgagtgagactttatagagatgttaattgcctttaattttccacaagattttatacaacttgttatgatttgtgttcgaacactaatgttctctttgatgattcatggctctacgcataggttttttgaatcgaaaagatgattgcgccaagaagatcccatgtctcccttattgtttgtacttagaattgaatatatatctcaaatttcgataaaagtggagagtttatctaggtttaaataccaaaaaagatgcaagcttctgtgattgaatcatttatactttgcagatgatcttttactattctatcatggatattatctctctataatattaatgttacagcgactcaagtttttctcaaacacttcttgtagtgagataaaataagatgaggtgcaataagtggtagatgcctctagtttctttag

SEQ ID NO: 102308 - DNA, 910 bp, Cannabis sativa
ggacgtcgtgcacgagtttgatatctttttgagatttctacctgtaatgcttgcatttgctcctgcatgatcatgtattgtgtagttgttaattgaataatatcgtcggaagcttgggcgggtgttattggtagaaaatggcccataatggtcgtaggtgttaaagtttctccaacatggcctgaaaaataaaggaaatagattgagggggattgtggcagtacgccccactcttcccatcacagcatcaactgggtggtccttccaccagtaataggaacatatattgatagtgccaatgttgatggtttcggtgttggtgttcatgtttgtctattcagtagccattttaattctcctcccatagtcttagataaacgtttctcatagacaacatcaaatgttatcggagaaatttaaacaacaccaaaaagagaagtattcaaacaagataagaatactcaccagtagttatgcaagtactcacttagaattcctaacacttaaattttaggctacgaaatagacaaaagctagaacaataacataaaaaacataagagaattatagtgattcagtcagaactcggtttgcttagtccacttttataatagttttcagcttagcttattagagttggtatatagaaagtaggtgtccgttaagatataaacattcaaagaataaatacaagaacagtttcgtctgttcttatcttagttgcagcaacacgtgtgacttactaagtcgcagtttgttcattcatattcactacaacattttgactaaataccagcggagccaaaccgccggtattaatgggattattaacggcgaaaaaagtattctgtcggtattacttttgaataattaaaaaataaataaatatttattaaattatagtattccc

SEQ ID NO: 102309 - DNA, 924 bp, Cannabis sativa
gcagccttggctgccgcaacctctcgttctaactcagcatttcttcggttcgattcagccaggcgttgttgaagttgcctgttttctaattccaccagtgggacatatttggtgggatcataagcgtcttcactttgcctctctgggatctgtttgccagttggattgaagtttccatcatttctcccagtacgtggggtttcagttgtgttggttctttaagatccttgaggctcctttccagggcgatgggtggtctcctctggatggcttttttcatttcgaggggtattatccaccatagatatagatttgtaatttgtgtttagaaggagggtattttttgagttttttttttcattataaaagctctcaatggaagcaccaaactgttaatgtagattttttattaaccaaatatatgaaccattttacataataaatatactacagagttaatgataataatatgaatgaacaccagatattttttttgtagttttgtagttaaaatctacatactccacaagtccatcttattaggaatgataatctagatacagagtacaaattctctctatcaatctaatagatagctttttctctcaaattttccatcgtttttaccctagattctgcccctatttataggtgtatagggtgacaattattttctttgggatctgatcattcataactgctcatgaaacgtggacattccccatatttcatttttatgcacatgggataatatttaataactacccaaccactctcttgtctttatctataaacggttataatgactatgcaagttttttctcgctaagtacgagttgtccttcttcaccgtctttgtagaaaaaaatgctaagtatagacatatttctcctcgcaatactcgtttactacgatggtattagc

SEQ ID NO: 102310 - DNA, 553 bp, Cannabis sativa
ttaacagatactcattccatttataaaaattattttcagagcaagacaaccattcacaaaataattgtcaatattaacttctgttatgttttttgacagaatatactatataattgtcaattttaacagaatcattttttttttcttcaaattgttgtatctattcatcgtataaaaataaaactctgaacaattacatccaatacctttggatttgaatatacaaatatgtatatctcattaatttcactataaattggagaaggcgaaaacaaaaaaaaaatataaagaaatcaatatcacacttttttccctacttcgaattggctaccatcaccattaacggcacaccaccatcactattaatgacaccaccgaccattaacggcaccaccatcgaccaccacaacaattaccacaatttattttaatcaatttcaaagtcatattcaaacacaaactaaaaaatattatcaaatacaacactaaaacaaaaaaaaaaaatccttaatccaaaatctgaaacaaaaacaagaaaagaaaaaaatcacta

SEQ ID NO: 102311 - DNA, 726 bp, Cannabis sativa
tctaagaaaattacaacataagtcctaaaaagttaattttgatacagataaccttccaacttcaaaaaattactataatagtccccaagctcgagattcttgtaagtctattggtcttcattttaacatatctgttaattgctcctaaaaatattacgtgttgatattaagctcgtattttatcttcgttaccttttcttaataatgagaaacaatttgaaattgtaacataagtctccaaaaaattcacttttatacaaattagtctccaatcttaaaaagttgcgataaaagtctccaagctcgagattctcataaatctataggtatccaatttaactgctctatttgtttctcctaaaaatacatgttgatattttattggtctaaatcataattttaatttaaaataaataaaaggtaaatataattttagaccatgtattttgcaaaagttactgattgaacattctatttttcaaaatggtacaaaatagactttgaacttaatttttatcaaattaaaacttaataattacttgacttgaatgtgttatgacaataatatatatatatatatatatttttgcatatattcatactaaaaactggttttagattgttacaataaaaaattgacgaaaattaagttcaggatctattttgtacaattttaaaaagggtaaatactattttggacccagtgttttgcaaaagttactaatt

SEQ ID NO: 102312 - DNA, 578 bp, Cannabis sativa
taaatattattaattaaaaattgatatttaattttaaatatattaaaaataatattctattttgatttttagggtttgaaattggaaaaatccaaaataggggaaaattccaaaaaagcaaattttggggtgttggctgcccacgctgcatgtgcagccctcgagaggctgctagcaggcctgcccgcgcatggggagaaggagcagcagggtgggcagccgaggaaacttggcgtttgcagcctcctggagcccaatttgcagcgtcttgggcaaggcccgtgttcgatcatgtgcgcattcagacacgaagttgtctgaagatgcgcgcgtggagagatgacttgtccgagatgcctggtgcgcatgagcaccatctcgacaccattaacactcgattttcaaaccttcataactttgtcaatttttaacggaaccaagttccgtaaaaacttaatttttcacaaggaattcaaataaaaattttcagaatgaaataaaattatttttatggaaaaatttcgtaaaacacattcaatcatcaaataacacataaaccaacatgaacacatctaaat

SEQ ID NO: 102313 - DNA, 578 bp, Cannabis sativa
cttatacacattaatgactaatttccttaattggtacttatacaatatatatatatcaaaataaaaaaagattacctaattattattcactaatatatataattacattcattcatctgctaaaaattgtgtagtatatttatgggattattactttaatttttagttttttatacacaataattgatttttctgcaaattaaaagctacaaagctaatttatgaattatattattaattagtaagtaccagaattacggcaattgaatttcattctaatgatgattttaaggagaaatttttatacgattgtgaagcaaaagtatatatatcaaattaagaagctctttggcatgtgccaaagggatttgaggaacatgatataggttcaaattcatgatatatacaaagtaatatataataatgacttgtatttaattagggtacatatatagaatagtactcatcagtctccagcctaggatatattaactgactataaccctaatttagggtataacttaattatgcatatggtgtgtttcctattaatttcttttttatatatataaaaaaat

SEQ ID NO: 102314 - DNA, 633 bp, Cannabis sativa
tgctgtaaagtgttaagtgccaaatacctgaagggtaggccgttcttggagggttcctttaagaacttggattcttggttttggaataatgttgtgagaacttaatatattctaaaaaaaggtgaatgcaagtttatatcagatggcaaggaaataaatacctgggatgatctgtgggttattcatggccataaattctatccaaagcctattaatcatctccctgatggttcgaagaaagttgtaaatttactccttaacaacagggagtgggacatctctaaaccacacactctcttcgattaagaaacgatctttaatatcatcaaggatggtaagccttgtggttaaggaagggataaatgggtctggactaaagaatcgagcggtttgttttctaccaactttgcctaccttattcaagcctttgaccgcgcgccctgtgtgtgatgtcgccccagagttgtggaacaagttatgaaggtctaaagtcttggaacgtcacaaggttctttggtggagcattatttataatgctcttcctatctctgccctcctcgttaagagaatgcatattgaggaggttattgtcctctttgtggggagggtgagaaaacaatggagcatcttttc

SEQ ID NO: 102315 - DNA, 687 bp, Cannabis sativa
aaaagaccaaaatcttaaataaaactagcaatacgtggctcggcacgtacattcacctagtgtatatataatattgtcaaaaaaggatagagattatatagtaataaataaataagaatggaatctggtttttcacaaaagatgaatttttttttaaaaaaaaaaacaacttttgcaagaaccaaagcaaaaccatgtgcatataacatctttcaaaaatattaattaaaatataaaaatagttagttaaacgaaaaatacaatttacaattactccattaaaagattcttagcataaataataatattttctgtgtattcttcatttcttgtgtattcatttcttgtgtttttcttcagaaactgaaaaccatggctgagttaatggtgggaggagctcttctctctggtttcatcaatgtcctctttgataggattgcttccaaagacgtcctttgcttttttggaggggacaaactcaatcagaagctgctcaaaaagttgaagactgtgttgctttcggctaatgcgctgttgaatgatgccgaggagaaacaacttggagacaacaacgtgaggaattggcttgacgagttaaaggaagtactttatgaagcagatcacgtcatggacaagatcagcactgaagctctgcgactgaatgtggagaaggatgaactcgaaagc

SEQ ID NO: 102316 - DNA, 506 bp, Cannabis sativa
cttagtcccaatatttcttcttcaaatgaccctatatcagcctcctcctcctcaaaataaaattcttcttctgctgacactgctgtttcaattctggtatgtcccatagactttctttttctgatataaaccttcccaaacggaacaaaccccttttcctcttcttgttctacctctgccattttttccagaataggagactttactgatttttttattatttcaaaatctgcccaaaaccatatagttgcagctctaaattcttctcgagactttggtttgagtgattttaatctcccttcaaaaaagtccttgataatctgctctgggttcttttttacacaaatagccctcttttcttttcctttgctagcccacggctccaatcccttactcttggagttataaaataattttatctcaggccttatttcaactcttttatgggccaaaaatatactaaaaggcccattatgataataaatcaaaggcctcaactccctatt

SEQ ID NO: 102317 - DNA, 835 bp, Cannabis sativa
ttgtgtttaaaatcaaatcaaatcaaatcgagacttagtataattattagagttagttccacattgctaacgtgtagaaatatattatcatatataagaagaatggacaattcctcccattgtcaattagttttgagatgaaacctcattcattttatcttaaattctaatatggatggtatcaattgttctgttgtgagccaaaaagacgagccaagcttccactatctcccctttaacctccatttggaacctttcggtgatcactttcggccaatgtgtgacagttttcgttataaccatatataaaatgaatgggctactcctcccattaccaaatagttttgagatggaatctcaatcatctcatcctaaattttaacaataataataaaattgagagcaagtgaatggtgtaattaagtacctgcagcacaacaacccaaaatgaggcctcgcaagtgttgaggtggtcttgtaaagtggataacaatccatccaagtaatgaaccaataataaatgtaatgagaacatttacaggcataaaccacctacacacaacacacacaaaaaacaaatctgaatcaaattcatcaccattaaaaaacaacaaagattctttcttttttttttcattacttacaacttgatcatgctatcatatgttacggtatttgcgaggctggatcccacaagcgcaggattgaatacataaaaaacaatctgtggtatttgctataattaattagttaaacacaacacaaacataattatatatatatatttcatggattgattaggattttgattacttactgtgtttaaatatttgat

SEQ ID NO: 102318 - DNA, 514 bp, Cannabis sativa
tctaatttctagagttatcagtgagtaaagggtatgcccttactcacatgtgtgcctacaaatatctttattttttatgtagagagagagaacaatttttatttacaaaacctctactaagattcttagagagttttcttctttgagagaaataaaaggaatacaaagttaccattgtaaacacttgtaatacttaaacactcgcctgcaaggctaatacaaagaactcgtgaactaaagattgttaacgctcgaaccacgtaaaaaaatccatttgtttatcatttattgttttatattttccttaagctctaattaatcagttttcaaaaatctcgataaacagtatatatatcaaactgaaagtaaaagatgaaaagattgtttacctcttgaagcttatcaaataatttagagtgtagtcgaataatatcattcggtataaaacatatcgtatacatagactgttttatcctaaggacgtcgtgattgctagactgtcgtacacacttcg

SEQ ID NO: 102319 - DNA, 776 bp, Cannabis sativa
ttaccactagcagaaggattcgattccgtgacggcatcctttgtagtctgctccattattacatgttgctcagcctcctcagcaattaaggctagctctaccactttaccactttcttgtcttgtacaaatgtacaaagtgtaaagtgtcatgagtagtcatgagtagtggtaattagtggtaatgttcaagtcccgactgatggtggcgttcagtcctctcacatacttctatatggcctggtgaaatctgtaggcactagatcacggccacatttggacagccgatcaaactccagagtgtattcgaccacaaacattttcccctgagttagcttcacaaaatcttccatatgtgaagtcctcactgcaatattatataatttttcttcaaacagactcttaaactcatcccaagtcattacactgacatcttgagtctgtcccacaatatcccaccaaccgcgggcatgatcttataacatgaaagctgcacaattaactctctctgttcccgtcacccctatattatcaaggatgcgggtgattgtactcatgcattgctcagctttgattatgtcagtacctcccagaaaagttagaggttgcagcttcacaaaccgttcaaacacggagtctcgatgtggcatcatgaaccccgggttacccaccactggcataagtgctggtggtaacgcttgttcaacaggggcagccagtgccggttgcctcaattaacacaactcttcctcttgacgaagtatgacacttcgcatt

SEQ ID NO: 102320 - DNA, 640 bp, Cannabis sativa
attaatctaaattatatactagacttaagtgaaaatgaagatatagtggacaaccccctcaaatatcaatttcgatttcatatcttatggttttttttttttttttgacaaagtaatatatcatatgatcttatggtttctttattttaaaaaattaattatagtatgacatgttaagtatttatttaatgaacatgagctgtataatatttttagttaaactatataatgttattatattttcaataaatttattcattacttttaaaaaaaaattaattatatagatgtaaaatagcttttcatctcttccaagtaggtaggcagaaaatgaatatttagagcttctaatctatatttgaaatgaagttagacatgtgatttaaagtttgaaaggaaaatgtggtttagttttaagtaatattaaataatagacacaagataaagcttgatactcacacatagtcttgatcctatcttttgcaccattcaactttttactagccagtttggtacaatttctaggaaagtactagaaagcacctaagttgtaactcaacattatttaagtgtaatatttgcagtggtgtaatttattttcagatttcatatattatattatttataaattaaataatat

SEQ ID NO: 102321 - DNA, 668 bp, Cannabis sativa
tatcatttaacaaaacataaaatccaattggtaatttttacaaaatacaagatccaaaataatatttactcttgttatagtagatgttccatctgtttttgaaaaattaaaaaaaaaaaaaaattattatatcgaaaacaagattcaaacatttagctacacgcgtataaaatatttcaatcgcgtgtgtaattaaaattttgaattctattttcatccttgtaaattattaagaatttttcttaaaaaaaaaatgagatgtctactataagtatactatataatgtagcccgtcgtataaaaaaaaaggagtggaaattacactgaacatgagattttgaaacaatatttaaaaaatatggcatgtttttgtttgcccactttttatggcatttcatgtctttgaatttttttgtggtattgagtttgaagaaattatagtaaatggcctcaaataattggactatgttactaaatgtccttattttaaaacttgtaacaaaatgaccattttagattatttattatttatattatcttttgttacataaaaataatcaattatttttttttgcatatattttttttttttaaattagaagcaaattacttaaagattatggtatatctatattagttttgttaaaaaaaaattatttgaaagttat

SEQ ID NO: 102322 - DNA, 581 bp, Cannabis sativa
attatattttttatatacatttatgagataagtttattatatatattatattataaatttataacagtaaacgtaaatgaaatgaaactctcatatttttttatcaaaactactctctcctttttatatttattttcttcagttttcaatccaaaacttagcgatctaagctccggtagtagcgagatagaaaattttcagaacaggaaagctttaggtaaggtttaattccgttttaagtttaaaacaattagtttcgtataggagttttgcaaattagaataggattgttctcggacagttatgagactaattatgatgctttcttgcaaaaattgaggtaagtttgggttagaaattgagtttagatatttttataacttaagttcgaatactagcttattattaagtccaagtttcaggctaatatggattcataccgtctatgggttcatattgtctatggattaaacaaacatttttttttagtcgagttaaaaccatctctgccgaaggacgttttgatggttgtctatcgagcaattgaagcagtatcatcttgtagacatcagtagccccaa

SEQ ID NO: 102323 - DNA, 659 bp, Cannabis sativa
tttctacaccccgttaaaaggggtgtaataaactattataacttttatctatttggagattcaagagaatttttgaatcgtgtactagtttgaagacaatttataaaatttttctgtaaattcaaaataatttataatataaaaaattatttgacacatgtataaaataaatagataatttgaaaaaaatacaaaaacaaaaacaaatttttttttttacaaaaatatagtttgtatggagtttttaatatttttacggtttttttagattttatttacataaaatacggtcttttagtatatttttatgttatatttttgttattttgtagttaattttttattatttgtatattattttttatactgttttgttgttattttcttgttactttcatttagtttttttgtatttttataaaataccttaaaaatataagaaaaattgaacgtaaaactataattttttttataaaaattggtgttatatataattattcataaaataaggtcataccgtgcaacaaaaaactctattatcaacgtaacaatttttttcgaatttcttaaaattttacgaaatatcattagattaaattgtgagatttttacaccacatactaaaatttttcatttttttttcttttttactatgggac

SEQ ID NO: 102324 - DNA, 745 bp, Cannabis sativa
  modified_base (674)..(680): a, c, t, g, unknown or other
gtttacggtggcaggtttcatgggcctggacgtttgaatgtcgacgacactgggctcgtggtctatggtggccacgtttgtaattttttttggttcagatttttaatttatttttctagatgtgttagatttatatttaactgatttggaatttttgtgcatgtataagttgaacatttttataaaaggttgtattttagatttttcagtatcgaactttcttaaatctttaactgggtttcaattttttttaagatacagtttctaacctttttggtaaatataggaatataatagaaaaaatgatataattttaatatatatttttaattagaattgatttaatctatcaaaattatataaaaagaaaatatatatataaaagaaaaaataaataaatgaaacttttaatgccactatatgtaaaataaattaaatattatttataatttataaaatttgaattaaatcaaattaaatattatttttttagaaaaataattaatatagtggtacttttggtgtgtcactatatctccaaaaatattaataataaaaaaaaagatatagtgccacttcatgtgtgtggttgttaccttttcagtctgacaaaacctgactcaatatgcttgtagtgacacgcagaaaatgaatgcaaaaggttttagtgacannnnnnnagtgtcactaaaaattgtctttccagtcaccctcattagttacgcgcgttgaagtgtcactatac

SEQ ID NO: 102325 - DNA, 1058 bp, Cannabis sativa
gatcataaattgtgtaactcttctcttcatataattactcttaaattagtaaaagatgtaactaatttaatttagatgtgaataaaagatagctattgaaaatatagctattggagacttaatatattcatttataaggtgtataaatagttcaaaatcaagtggaactggtttagaacaccgtatataagaattggtcaaatctgaaaaaatggtaactagcaactagttactatttttttgggcatacaagtgcattcatttttaaacgtttgggagtctttctaacagtcttaaactcctctaaatcacttaattaataccataaatgcccaatttatgattggtaacatccaatacctttatagtagccattcatgttcatatgggagtgaaaactctataattaatggtcaccatttgttctcttgtgagacatgcatgtagtttaaatcacttgttgtggtaagaactttgtggatatgctcatccttaaacactagattgaacatatgagacttgataatccttaagaaaatttttaaaattttcctaagtgtccacgtgagggaaaaaaatgacttataggacaaaaatattcttgagccttggtcaagcttattgtgtcttcttcatcatcttattcttcttcttcttcttcttataatacttttatttgtattgtaagtattttgattgtaattttcctattctctcttgtaatgggtaaatttccaatagactataggtaattaagatccaaatgatggcagaaatattaataaatctaaccctaaaaatcgaattaatttatgatcttccattcaaaaaagaaaattatgttcctctccctcttcatttttatctataatacattgtgccaactcatgaaacatttgtctcaattacattttagtacgagaaatttgccacctatatatgtcgagctcaaccgagtatttgtagtacatagcgtagaatgcgcagcaaatatttttttgctccctattgcattgacatatgtcactatggtctataataacccctaaaaatataat

SEQ ID NO: 102326 - DNA, 775 bp, Cannabis sativa
  modified_base (27)..(30): a, c, t, g, unknown or other
tctggattacattgaaatagagttttnnnnagggcataaaacccaacattatggtcgtagtctgcatgaaaaaatgacagaacttggttgtgtctcttttgctcatgtcctttttcattggagagggtttcttgtatggcaccatagacaaggtagttgcatagattgtttctattctattaggactgagaaagtagtgaattttgaggcattctccataggatgctgtttagagttgccgttgaacttgcttttctttccatttccctgtgtattgccgttgttcgaccttcttccattttgattcaaactattgggattctgtgaattctaggtggatgtagcagttgtagtggtgtgtttaaatttttcttgtgtcccactgtatcttcacaccgtacttcctcttcaagtttaatgaatccatctgctcgatccaaaaactctaccatttatcccaccgttaatctcttaatatccttccacagttcttctagaggctcaatgcccccagtgttgcggccaaccttccttcctcagtcagccccttaactttcgttgctttagtcataaacctgctaatgtaagctcttagaggttctcttggcatttgtttcacttctaccgagtcttcaaggtgtgagagaagctgatgagaggggaaaaattgtacatggaattcaaatgagaaagaaatccataaattgaactttcctagaggtacctttaaataccattgctaggcgacctgtactagcctggctggaaaaattct

SEQ ID NO: 102327 - DNA, 596 bp, Cannabis sativa
ccaaaatatttagtaaacatcatattatcacattacaactccacctaataggcagaataaaaatctagtatataaacatgattaagccctaaactgacaagatcattttgaataagaaaacatgaaaaatatagtttataataatacaaagcattacctcaaattgaagttaacaaattaaacacagagggaaacagcttacaaaaaatttaattaatatataaaagaaaaaagatttaagaatgtcaatcaaaaaaacttcatgaaggcttctgttcattttaccctaggagtacaactcatgttaggaaaagattccaagcaagtcattcatatacaaaacccacaaattatttatcataaaaacatcttcatgaaagcaatatcactacaatatggtgggggattagggtttcagaacaacaatggaggaaagagtctcttttgtacaagtgaaaagagaattgggactaatcaggcctttgaacttcccacttattttagttcaaaaacaaatttgaagccaaaaatcaagaacatgcgcacaagatgcgttgccactttgtacgtcattgggcaacgcattgctttctagg

SEQ ID NO: 102328 - DNA, 564 bp, Cannabis sativa
tcacctataccatcaaatgtttaaataattattatcatcacattctacattcaaaattgagtccaacgacatataatatgactagatttaaaatttggggttcggaaacctcacctaagcggtgcacattaacaatcggtggggtgaaagtcggtgtaccggaaatgttgtgaaaataggggttgtgtatattgaaatgaccacctcgacgagtagatcacacccatgccagccgtttgtcaaaacagtacacgatatcgccagaaagtcaccggaaaggggcgaagctataaaaatgtcaccgaaaaaagtagcgaaccgggaaaaatgatttagtgtaggttgttctcctcaacaagctgagtttattggtgaagatgtctcgttaaatggacaccggaggtgaccggaaaatccgttcaaagtttgaacccccgaactttgacttgcaattccgagctaacagcggcgaaagaagcggcgccgcttaggggtgaggtcgccgacacttgggctttcgatttttccagcatttggggctgggcggtggccggaggtgggtcg

SEQ ID NO: 102329 - DNA, 522 bp, Cannabis sativa
tgggagtatcgggaaggaattgaatggaataatatcgatttatacagatacgtttatacggatacagaagaaaagattcgctattgattcaaacgctgtacctacgggatagggatagagaaagaggaaaaaaccgaagatttcaaatagtaccttttttttatcgaaaagtcaatctgatttattttgtacatttcactcaatgagaaaatgagtcagattctacaggatcaaacctatggcacttaaggaatgatggaaaagaagaaaataaaaaatgaaataaaaaaagaaaagagagggaaaaataataaaaaaaagttatagtaaatgaaaatgaagtagaagagcccaaattcaaaataaatgaaaatgtgacggaattggtcctagttactcttcagaacaaactggaagaagggagaggttctcgaacgaggaaaaagatccaatgacttcaaaagaattgaacgaggagccgtatgagatgaaaatctcatgtacggttctgtagaggggcag

SEQ ID NO: 102330 - DNA, 509 bp, Cannabis sativa
aagaaacacaatactataactcgacttatgaatgatgagggtaattgggttacttgggaggatgagttgccgaatgttatggttgattatttcactaatttatttacttcaaatagggccgattactcaacagtggtagaggagattactctttcgatcaccgtggatcagaatttgtctttacttaggccagttttggaagaagaagttagaagtgctctgtttaatatgcaccctgataaatcttctggtccagatggtatgaccccaggtttttttccagaaatagtgggaaatagtgaagcatgatgttgtgaaccaagtttgtcagttctttgcgaatggcagcattcctgatggactgaatgacacgaacattgtattgatcccgaagaagaagcaacctacttcgatgggtgatcttcgacccatatccttgggtaacgtcttgtataagatagtgtctaaggtgcttgcgaatcgtttaaaagaagtgttgcctcagatca

SEQ ID NO: 102331 - DNA, 594 bp, Cannabis sativa
ttccattggaatggatgctggttttgctccaaggtaacatgtgtcagctagtagttgcaaggtgaaaggtctttcagatatcccttgtttggttctgcctatttccaagccaaggaagaacctaagtgagccaatgtctttaagtttgaactttgtgtccaaaaattatttgaagtgaatgataattgactcattgttgctagctacaatgatatcatcaacttagatattaggacagctagcatgattgttgttgttcttttaatgaacagggagttgtctgaaagggattgatggaatccttcagttttgagagtggtattgaattttttgtactattatttagaggcttgtttaaggccatatatactcttgttgagtttacaaacagtgttgagaggggcattgtaacctagtggaattttcatgtagacttcttcatggagatcgccatgcagaaatgcattgttgattttcaatttggtgaacattccaattgtatattgcagctagtacaagaaaattttaagtgtattgaattttactatacgagcataagtttgatcatagtatatgccttgttttttggttgaa

SEQ ID NO: 102332 - DNA, 500 bp, Cannabis sativa
gagagagagagagagagaataaggtttagttttattatttgagggtataattagaactgaaaaatataagtagcatatttactgtaatgtttaaaggggtgaatattatgagaccatggaacacatttaatttcgcatattttcctttcaaatttagtattttgtacatttgtaaatatacatgtaaatatggaagtagtgatgacagactcacatagagacgaaggttggcaatcgctcctaaaaaaaaattaaaaaagacaaccttacgtagcaatgatattttttttttaatattttttttcataagtcataatattaataaaaaaatacaatggtttttcgttcttaaatttatagctacataaggttcttttttttctccggtcaggcccgccgactttccctgggcataggtgcagcttggtcggcgttgtcactacaagaaatgtcacttttaccagcacagttcgttgctgcgctggtaaaagttactttta

SEQ ID NO: 102333 - DNA, 819 bp, Cannabis sativa
tcaactttgaagttcatcatcactagaagttcatcatcactagaaatcaattcatcatcactagaaatcaagtcctgcagcaattaaaacaacatcaaaacaacattaaacaaactataaacaactttctgccataattttttttttcaaattaatgaactacaattagagaacatttcaaacaagacaaataaaaaaaaacaaatcataaaccttaacaatatttttctttggaagcttcaacttgtcaacaacatcagaggtctaatcgcaacctgaaaatgtttggatgaaaaaattattaaataatgaaccgataaaaatacaattaataattatacaatactgcaagtatatcatgtattgaacaacattaaaacaacaatataacaactaaaaaataacgtaattataaaacttaataaatatgcaactaaaacaattctaattaaaactcaaatacaactgataaatgtaagacctaacccaatgatctagttttttttttaaagaaaacttaagaaccctagaataagaaccataaaataactaaattaaaactaaaatacaactatttagaaacagaaaaaagtaagaaacataaatcattgacaattcttctaactaaatacatcggaaaaaatataaacataacaaaacaaatctttgaaactagacaaaggcaacaaaaactaatacattaatttttaaagttacatcctcatcatcattatctcacattttccttgaaaaagcctcttcaatggatgacttggtgaaacaacaataacaaaataaattaaaagatgaaacaactat

SEQ ID NO: 102334 - DNA, 699 bp, Cannabis sativa
tgcatcttcttcataactctcaattacaaaattccagcttactcaaaagatggctttcacacctcaatatgggtagctctattccaacaaggggcctgacaaaaaactaaaacaaaaatcgctcaactctgtacattaatactttaatttatcatgattgcacatatgcaagtaacttgaatcttttaacccaacctcaaaagtatgaagagtacaagacactaagctaattatcatccaaaagcataaacaagttttgccaactaagaataaaagaaggatagatacaagataagaactactcaaaaaattttgtacgaaatagagaacaaaaagaaaagagttagacaatgcgaacccccaaagattttctgtgggagtcaaaccgacttaaatctagagccttagtgaaaatatcaaccaattgcttttcagtatcaatatattccaattgcaatatttggttgtcagcaagttctctaataaaatgatgtcatcaatgtgttttgtacgagaatgttgaacaagttttttggaaatatttatagcactggtattttcacatgcagaatgataagtaagaacagaggtgagagtatagcaattatcaacagatctaaacccttgtaaaatgcattgtttatcactgttaagaacaaaacaatgatcaatgttaaaattggcggtgtaacctgatgg

SEQ ID NO: 102335 - DNA, 510 bp, Cannabis sativa
taacgttttctttcggtaaagtatttttttttgataatcaatttgcgacataaatatttaaatttaaatttcgagaacaaataaatatattttaattttttttaaaaaaatataatttaaatattattaacgttaaaaattaaacttaaatcttatttataattgagaattaaattaaagtatttatactgcaaattacttccaaaatatatttaattaaatataaaaaaaaatctataatgcgcctctaatggcatttctaatagtaatattcttgagaatatttgatgagatagaaaacttaagtgacaaaatttaaaatttatatagatgtcacaacacgataatattgatgatatatttttttaaaataaaaaaattaaatgtgtaatatgtatacataattttttaataaagaaaaaaatttatatatctttatctttatatataaaatatggttatttaataatttttattggtttgacaaaatattttaagaatatataatat

SEQ ID NO: 102336 - DNA, 918 bp, Cannabis sativa
atattgaaattagttttatttagggcataaaacccaacagaaaccctacaacggtttcattctgtgccataacttaataattttcatactacaatcgcccgtatctaataaggtatgccgccagttagaaatctaacagcggtttcgatctatgccataaccaggcaattttatattattgtcgctcgtatctaataaggtatgccgctacttggaaacctaactgcggtttcgatctatgccataactaggcattttcatattactactgcccgtatctaataaggtatgccgccaattggaaacctaacagcgatttcgatctacgccataactaggcatttattactgccacccatatctaataaggtacgctgctagttggaaatctattagtggttttgatctatgccataaccaagcatttttatattattgtcgcctgtatctaataaggtacgccgcaagttagaaacctaacaggagtttcaatatatgccataactaagcattttcatattactgctgcccgtatctaattaggtacgcttccagttgaaaacctaatagcatttttgatttataatcatgactttataatagtttccccataggtacaattaacttgaatgtcagtatctgtatatcacattacttactcaaacaagtttatgccatagtctggcattcatcatatatatacatatgttgcattgcctgattacgcaatctcagcctatgccatatcttggcactatatttatatcacctaattaggtgtatttatacatcatattgcctaatcaggtaagctcatcttacaatttaaaatccatctatcatatcacctaattaggtgaagttgtatgtcacattcatattattaatgtctaatcaaacagtctatgatcacaaaat

SEQ ID NO: 102337 - DNA, 600 bp, Cannabis sativa
tacaagtatctagtgtttaatccccctctctctctctctcaatatctaactctctgttgttttcttgtgcatgtgagatcatcaactcctccttcaagctttcaacctctagatcttgaagagaacactcaaccgtacctggttgtgtatttgatgcaggtatatatagatctagggttctggctatcagagtaaatcactggttttgagtctagtaatttaagttcttctagaactcctttcacccaaatactttccttaatggcttctgtagttgcaatgtattctgattcagttgtggacaatgcaacaactggttgtagttgcactttccaactcacacaatttccccccattagtagtatataggctgaagtagattttctactatctctgtccccaagcatagtctgcatcactgaagcattctattgctgttcttccttgttgttgcttgtatttgagtcctaatttacttgtccaaattaagtaccttagaagccacttcatagcaagccaatgtgtcttaccaggatttgtcatgaatctgctaagtacactaatggcataagcaacgtcaggtcttgtgcttaccattag

SEQ ID NO: 102338 - DNA, 651 bp, Cannabis sativa
catgcaacataaaatgttatttccgatctttattaataagtaaatctgattatattgaaatggactttatttagggcacaaaacccaacagtgagcccccgaccaggggcacattcccttatcaggatttgtggcgcgattatcgagggcaggaaggtagcagtccagctcgcccaggtacccgtcctggtcgagagtttggaggtgtgccttcgaaatcttaaatggaggacttacccacctggcacccaaggcaccctgcctcctatgaggaatcgcctcaggaagctcctcactgacgtagtccacgccctctaccagaatgtctccgtcagcattgactggttgcccagcctcgctgtactccccgaagttaggggttcaacctcttcctctccctctgccttggaaggactgcccagatgcacctcgtccagctcctcaaactcctggacctcagtgtccccctcacggtcatcctccatcgggacggccgaatcctgttcggcatcagacagagtggcaagccgagccacttgagggtcagaagtgtcggccagaggcgtggttttcttcgtatgagccatcatcctatggctgggtacgaggttagaagattttccttcgctagaaggaggactagcacgaaga

SEQ ID NO: 102339 - DNA, 805 bp, Cannabis sativa
cggaggttctttgtggagaagcggatgcctgctgtttagctatttctgtagctgtagaaatcggatccaagtttgtaattgtggagagtgactcgagggtgattatcaatgctctcaatgggatggagtctcgttggagccttgaaaactatgtctcattttgtactaagtcttctccctcttttattagttgtaatttttcttatgttcgtagaacttgtaatttcgccgctcataatgtggctagatgggcgtttgctcatcaggtgtttgggtctatcccgatttcctatttacctgacaatatattttgtaacgaccatgaggtctaatcctatttgaatctatgatataaacgtttttatttcaaaaaaatatatatatttttatatctaaaatgtggttatttaatatgaggagtatatttaattttaatatttttcaactttatattttttttttaaattatgttaatttattaaattttaaaaatatacctaacaaaaattaaaattaaaaatataactaagtatacgtaacaataacctaatatatatatatataaacataaattaattaagtgtgagggtgtaattaattaattgtatatatacatgtatatctttggaaatttatgtaggtagaccgctttaaaagttctttttaagtaaaaaaaaaatatttatatttgcatttaaaaaaatcaatttactttttttttttattagggaaatttgattttctatacttagaaaatcaaaaaatttgatttctaaaccaataatttaaaccctaaaaaaactat

SEQ ID NO: 102340 - DNA, 651 bp, Cannabis sativa
  modified_base (414)..(421): a, c, t, g, unknown or other
gttaccaaacacaatttttattggtgttttcaaaattttaattttaaaaacaaaaaactatttttaaaatggttaccaaacataccctttgttttaaattatatttttcacatatataataatagaatataaatttaatctattaaattttaaaatatatttatatcatatgtattaaattcttaaattacttcttttttgcattaaaatattaaatgcatatataattttctttaaaaatatatataaatatgtgtggattagatttgatcgattacttttacatatcaatcaacatctaatccgcacaagtgcgaattttaagttttctaatccaatctaatctgcactttacggattggatcggatcagatcgtgcaaattgaattggatcgagtattttatgaacacccnnnnnnnntactatttctttagctagagaggcaatttaggatagttggtgtcgacattatgatggagatggggtgtaaatgttaaaagtggttattcattggcatgatcactacaatttgaagagggaatggttgattcaactaaattggtaggatgggggaaaggatttggaaccttagtgtgctacctaaggttcaggtctatgtgtggcaaatgttttatttagccttaccagca

SEQ ID NO: 102341 - DNA, 684 bp, Cannabis sativa
attctctcacattttccctaatccacacatcccattgtgtaagctgttattgatgttcgcataatatttcagtataaattcttaacatattatggagaatttcatttagcatacagaaagtactgtattctatcagtgtatttcagtattcatacacagaattatcatattgtattctttcattcctaaacgaaacctttcttttgaagaatgaaaaaacaaatctgacccagacataaacatcttggcttttcttttttttttttcatcctaacaaaattgctgtatttatatttaaaaattgattcaaaactcctaacataaatcgaaatcaatcgtaacctagaaaaaatccctttctccatatccttctctcactgtgtctccttcactcggagcttttctatcaatcccagcctcgtggatgactccctttgaactaatgggaaatattagacattcttccatgttcttcataaaatactcaatcaaatttaatttgcacgattgagttcaatttaattaaatttttttagtgtgcatgtctgtatttgtataaattggaatagattgaaaaatctaaaatccacacttgtgtaaattaaatgttgattaataacatgtagaacaataaaacctctatctaagaataccccattcaagaataatttctaatttgttata

SEQ ID NO: 102342 - DNA, 828 bp, Cannabis sativa
ccgagggagatgaaaagactagtgaggttgttggtgaacatgatgtcaagagggctatcttagagcaaaatttacagggagtatcagatgaggatgctgatcctgatagagttgaggtgaggtgactttaatattttttgcattttttttacttctctttattctgaaaatatgttggttatataagtctcatcattcttcttgggtccaagtcaaaatgtggggctcacaactctttcacctcttcatttgacaatagacacgataagtagcaaattcttgtattcaagcactctttcccttgctctcttctcttattccctggcctccctttatccccgtccccaccacaaacacacagacacacccgaccccaattcatgaagctttcaacttggatgtatcatgtttgtcaaagtagatccctcactccttccctggcttctattcttattcctccccaccacactcgcaccgcagtgcgcacaccaccccaatccttgacttaattagaccatgtaaatttatttatgaagatcttttgccataccaaatttataattagtgtgtctaattccttggtcactaaaatttcgtgggattggtggtatttatattattactccgtttatttcatatttttttatcaaggctgttcaaattttctttcaatgttaatgaatattaactagcctgcaattcaagctaaaccaagtactggaaaaatatgacattttgttattaatacaatttgtatggctgtggaatttctgtgatcaactgttcttattcggtcatttcatgggtcacatttttcagtcacgatct

SEQ ID NO: 102343 - DNA, 501 bp, Cannabis sativa
actgaagttgtgtggattctctctgtcttggatgaaataggcattaaaccagttggcaaaccagttatctggtgtgacaaccaaggagcacaacaacttgcctccaatcctgtatttcactctcggacaaaacatattgaggtcgatgttcactatgttcgagaactggtcactcaaaacaaacttactgtctgttatattccaactgaagaacaaccagctgacatttttacaaaagctttaaccttccctaagtttaacttcctgtgtaacaaactgtctctgggaacctcccagctcagtttgaggggggatgttgagaccgttactgaaaacggttaggaagttagttaggtgtcagtattctgttaaggtggttagtcagctggtgtatctagctgtgtataaatacctgtacatgtactctctttacatacagaaataaagattcactttctctcttgctttctctctgtttagtactctgttctttgttcaact

SEQ ID NO: 102344 - DNA, 518 bp, Cannabis sativa
tatctgtttcgacatttagaaaacttttttagtctaatatttttatgattgtgtacgttatagctatttaggactacttgtaactttttagaaaattctgaatagtttataatgtcgaaaataaggtttaattaataattacttaccacacgtataaaaaaaatagttgtgtgtgtaataaaatatgtaaatcttatttaaattatttgaaattttgtgaaaatttacaggtggtcctaaatagctataacatacacaatcgtaaaaaaaatagactacaagatttttctgaataccgaaacagataggggtctaccgaaatatccctttagggaggtactatagacttaccctataatttaatatagtaatttttataaaatatcgccaatcatttttaaggcaccactcaagtccagccctggacataatttatctgatctctagtattcaacaaggaaatctgaaccccaagaaacaacaatatctaaagtcatcatcttattattatgcactat

SEQ ID NO: 102345 - DNA, 725 bp, Cannabis sativa
  modified_base (33)..(48): a, c, t, g, unknown or other
tttattataattagtttattttattttattttnnnnnnnnnnnnnnnnaataaataagtaaatatagttttttaatcaaaacagtttttactaaaagttaggctggaacaactttactttttagttgtagtttttccaaaaaaaaattcaaaaaactgttttttgactgcttaccaaatacattcttattaccgttttttcaaaaagcagcttttagcttttccaaaaaaagtttttacaccacatactgaaatttttaaattttttacttttttattgtggggtggaatttttttcaaaaatattgtgtactgtgttaagttttacaattcttctacagttgttttttagttgttccactgttgatttaattattctgttttgttattttacggttattttatgaaaaagacagtatttttgtaaaaaattccaccctacagtaaaattgtaaacttttatccaaaatttaatatttttataaaaactcttttccaaaaattgtgccaagcggggtccaaatcggttctctgctgagatgtggcccaaattatagcccattggttgagaaaacaagttggccaaataattatctaattatctcttttttctttttctttttctttttttgttgttgcaaaatatcatattttaaaattttatcactatgctaaataagctcaactatttatttttttttcccccaaagctcccgactgacttat

SEQ ID NO: 102346 - DNA, 932 bp, Cannabis sativa
  modified_base (334)..(351): a, c, t, g, unknown or other
tgaactgtggaaggacataaggaagaacgacccggtagactcaatgagcaattttctcgaccgtgttgaaggcttcatcaaacttgaagaagttattcatcgagcagaaggtgagcaaaagcctatcaagtcaaaagctccttccactggaacgtctgccccattcccccattacccaaataactcaagctcaaatagtaaacgttccaacaacaacaacaagcaagggaatgggaagaagggaaagttcaccggtaaaaccgagcaagctccccgggagaatcaagcaaagtacactacatttaccatcttgactgaggatatagaaagtgtnnnnnnnnnnnnnnnnnngctagccccatataagaagctcgcgcacatgaagaaagatgttagcaagagagacatgaccaagtttttttgatttcacgaagattacggccacgacaacaatgaatgcaacaatctgaagcgggaaattgaattcttgataaggaaaaataacccgcactcacagaagtatgtcaaggctgattagaatcaacagaacgacaatagccaagacttgctacctccatcggtagacggacatctgcaagtcatcattggaagccgcacatagctggagattcatgcaaagctcgggagaggtatgcccgaacagcacagcacgagcaagaagaagtgatcctggccgtagaagaaaggaagcccaaaatcccacgggtaggagggcctaccataaccttcaacaacgaagatgctgtcaaaatcaggtttccgcacaacgaaccattggtcgtagaggtccagatatttaacaagatggtagctagaaccatgattgacaatggagcctcttccaatatcttgttcaaaactgcttatgaaaatatgggactttagctcaaggatctagccccatgtctcct

SEQ ID NO: 102347 - DNA, 540 bp, Cannabis sativa
tatagtatgaacctagaaacttaaatgttcaaaaattaaaaataaaaaataaaaaacaatatatgtatatatataaatatatttgatcatatacattggaaatttatgtagtagggtgtaaattttttatttgtttcggtatttatccaagttttttaaattattttattttttcataatcatatacattatatctatttaagactatttgtaaatttttaaaaaattctaaaaatttataatgtcaaaaatattgtttaaatagttacttactcgtatataaaaaatagtcgcccgtgcaataaaatatgtaattcttactttcggtattataacctatttataatttcctagatagctagaatgtatgcaacttttaaaaaaaattagattaaagaactttttttgattccaacacaaataaaaaatctaccaaaatatatctataaatagtgcactatatatatatatatatgaaccttttcttcttttgtagtaatcttgtataggtacagttgatataattgaagggtaataact

SEQ ID NO: 102348 - DNA, 1305 bp, Cannabis sativa
tttagaaaatacatgatccattttgttatttaacaaaacagatggtccaattgataacttttgcaaaatatagggtccaaaatggtgtttgaattcttttttaagtttaacgtttatgaagttttattttggaaattgtaatcatgttagaatgaattattttatttgaattagggatatgatacatatgacatttcagaatactgtggattcgaaacttctaatatgagacaatttggctccaatgtccaaagtgttttaccaattctcagtttttccatgaagtggagacgattgatatggtagttgggctttggttggtgatggtgacccttgtgaatcttgagtattcgaatattgccgcatatcatgtaatgtcttcctccgttaattattttgattttatttaatttataagtcaattatataatcatattaataggttttaatttatttattctttttatattttaattaggcaatatagccgctcttcgcgcgactattttaattttattttagtataataatttaacaaaaaattacttaagaaattaataaataataacttaaaaaattaatctaatatataataatattaaaattataccatcgaattatttattaaaaataaaattttaaaaattctattttatttattaaaaaatttaaaatttatatgaataatgtatacatagaattttaaatttctgtattaaaaaagtattaatataaaataaaataaatagggtagtataaagaaaaattagattattattattattattattatttaagtaaacagtctttcccgcaatcaatattataaattatatctcaattatttaaaatcgttgtcaattaattattgtatctcaccagttgccatcaccatattccacttatagtcgtcaccattattatccctaatagatttaatcaatacataataatacaagtaaataatataatgaagtgctaatatagatgaaaagattaaaagttaaaacaaaaaaattaaacactacaatgtcatatctataaaagtaagattaataagagatagtgtaaaacttttatagggaagaaaagattaaaaattgaaaaatttataaagaaagcacttaagattataagatctttattattattaataaaaaatttattaaaatattaaaaaaaaataaacaaaatagtttgactctcaaatatgtagttaaaaaatttatagttatgtgtaaattaaaaagaatatatatttagatttagtatgattaatttttatttttttgtgatctaattaaa

SEQ ID NO: 102349 - DNA, 637 bp, Cannabis sativa
aataaagatatcaatcacaataaaatattagttataaaatatttataaccaactattttgtagttgggtcattttgttatttatttttcttgtttgatggactaattattttacatattagttaaagtattcttccttgcattttaagccccgttcagtcaagtgccctcaaatccatctctagggggagccaacaagacatgtatttgttatactttgcacactccaatgatcctaaaagaaccatcattgttgttactaagtttgaatgaaaagagaaaaaatgaaacagtgtaagctttagggtttcaaggatcaaagctgtaaaggccaatggtggtcagtcagagtcacaagaagacatcagatgtatggagacgagtgaaggaatcctgttcaaaatcaaatcgctttctacgacaataaaaaatccattataatatagtttttgttaacaactccttcgtgagtactgttgctactgaaccatttatcgaatttcttttagacttttattccctctcaagagactactttatttattgtttatcatgccatattttaaaacattaatgatgttaatttcacaaaaaaaaaaacataaaatcttttcaatgaaaaagtttttttttttttt

SEQ ID NO: 102350 - DNA, 1001 bp, Cannabis sativa
  modified_base (928)..(930): a, c, t, g, unknown or other
aaataaaaatacattatttatattaagttaaaaaattctatagtctaaattaattttaaaaaatttaatataagataaatataattgaataaacatcaaataattaattaaaataattataaaaataatactattgtatagattttaaactttaacttcaatatccaagtacaataaaaattattaattaaaaagactagattttaaagtaaacactaaaatgtctaaactttaaatacaaaaagtttgactaataaatataatttatgtcatacattatattcacttttattaaaaaatatattaatcggtttaattcgatttattcggattaattaggcgatttagaataatttgtaaaccacctaatatattcattgggttgtttggattttcatcgtattatttcgggttgtattttttgtcgatttattcagtttagtttgggcggtttattcgagttgagcagtttgtaaaatttattgaacacccctacaatttaatattggacttctccttcattggaaatacgattaagagtagaattagaaaaatgagccaaccaattagacatctgattcccaaattgtttgacgaaagaaactaaaataaaatcaggcgaaaaagattcgacatcacagttaattttaagaacacctatatttagtttccaccaccgctcagaatacacaatagtagtaatagttgcagtaggttcattcaaacccttagcatgagcactcaactattgtgcaagatatataactgctgttgggattttatgctttaaataaaacccatttcaatctaatctgatttgttatcaatgaaagattagaagtcattgatgtttacatttagttttcatgtttatggtttaatatatacaaatatggtacgtccagaacatatagtcattcacaattannntgatgtcaacacagtggaatgtaaattgttattatatgcttcaaaagacaaagtccctgattcatcagtgc

SEQ ID NO: 102351 - DNA, 547 bp, Cannabis sativa
ttaactaaaaacatagaaaaaaaaaacaaattgacaaatacttttttagtcaccatatttatagttcacaaagttaattttcatcaaaggatttttaaatataaccaaaaaataacaagattctatttaatatttttaatgcttaagtagtttttttttaggaaataatgcttaaattcttcaaatattaaaaaaaaataacaacttacttcaaacctaatcaaggtaaaaacaaatatcatttttttttgaaaaaaaattgattaaaactaaaaacaaatatattttttaaaaataaaattaataaacacgcaaaataaaacataaaaacaaatccaatttataataagttctcctccttatttttttttcttttcatcttttactgactgtggtagaaattcgcttggatgtgttcgatgaacattaattatcttataatttttgtgcttgatcacagttttcactcttcttctttttttgtgtatattttaggtcacatctaaaaatttgatgatggccagttaatgttttcgattttattata

SEQ ID NO: 102352 - DNA, 1262 bp, Cannabis sativa
actcttaggtatttattcaattataattaacttttattcatatttaataaatttattcagttatttgactatataatattctaacatctttttattatttttataatagatattattgtatgtttatagggtgtcaatgacattaagattgttgaacatcattataaaaaaaaaaaaagagacatcaaacctataataaattttttcataactatatatatagtaataaaattatataagtataattatatttattttagagtttcataatcaaatctactgttttaatttattttctcatttttaataacataaatcatttgaattttaatttaaattccctagatatttataaatctatctatttaaatttgcttcaaatatttttatctatttatatatttattttttttatctttattatttttctatgtttttcattttattttatttaattaaaagatcactaattaataaaaaattaaaaaaaattgcatagtcatgataacaaataaataattatatatattaaaaaaatattaactaatttccaaaaatacataagaataatttattttatgtatagagcgaatttattgaaaaagatattaatgatcactataagtgagatacaataataacatcaactttaaatttagtattaaatacaactgagatacgaaaataatagttgtttagaaattaattatatgatgagttttctatagatttattatcttctttatgttatagatctctatttttgtctgagcattgtttagttttaaatttttctttactgtaaagtacatttgaagatatttcttttcattttctttttttatataagaaatcgtataataatttctttttttagaattgtttaaatttatctatataaatttattatttttttaaacaaatatttttataaaaaaaattatcactaatcgaacacaaccgcacgcgaaacgcggcctgtttactagttttttaaatagaggttctactgtattattattatgagctttcattaaggaaaagaaaattctagagaaacttctgaagctaccgttaaattaagcagtcaattttttttgaagaaaaaaaaaaagtgtatgcacccaatttatttcgagagcactttcaaggtataaatttacacatcatttaaaaatatattattttattttatttctctttcacattatttttggcactcttacttctaaaaatacttcaattatatagcactcctcaaa

SEQ ID NO: 102353 - DNA, 538 bp, Cannabis sativa
taaataaaattataaaaatattaaaattataaaaatattaaaaattctgaccatatttttataattttttttttgttatttttatatattttttttaaattattaagtggttaaaatttattactaaacatagttaagaggtaatctaattctaaacgacattttgattttgaactaagaaagaaatctaataacacgggctactaatacaaaaagaggcgtacgtagtagagcagatcgggattttgtgtgaacgagatgaagagaagaagaaagaaaaaaaaaaatagaaagacaaaaaaaaaaataaagttaattaattagttttaaaaattatttattcatttatttatttacatttacataaaattatagtttggaccaataacatattaacacgtagtatttttggaagcaacaagcgaaacgaagcagttaaattgagtacctacggactaatgagaatcttaagcttagagctattaaaacaattttttgagattagaaatttatctgtatcaattttttggagacttat

SEQ ID NO: 102354 - DNA, 901 bp, Cannabis sativa
acttttgtatttgtataaatagggtgactccattagaataaagaactgagaaattctcattcaatttctttttctctcttcttcttcttgttcttcttcttcttttctcgtatctattttatattattttataacattagcttttaaaaaaaataaaaattaatatcgttttttgttttagtatgtttgataataaaaagatgtatttgtattgtattgtataaacaatgcgttttgaaacatagtctctatttatctattatagctgttgtgtcttactagaagtagttatactaatttgtcctcaaattatataaattttggcaagttagtttttaaattttattttctgataaattaatccttaaactttaatcttttaacaacattaagtctccactattagatattgatattttaattaatttgtatttgttttacatactttaatgtattttttgtgttaaattcaaataatttcattttttaaaatttaatattttaataaaaatatttaaattaatatatttttaagtactcatataatatatattgtataattataatatttaatatttttaagaaaatgtttaaaatattctatattttttgttcatacatattattaataaaaaaagagtagagatattaacagactcatacgatggtaaaatctcatgggtttgccagcaagcataagttaaagataaattttaaaatataacttacttcagtatttataaaaaataataatattattgttgaactcaaaaattggccaactgacagcgaggttgtattaatctaatattttccacttgttacacaattagaactagaaagtaggggcgtacgtcggtcgatttagtcgggttatagcatatttttatcaacccaatat

SEQ ID NO: 102355 - DNA, 953 bp, Cannabis sativa
tatgagacaattttcatctttattttgaaacttaaatatctcatattttcttttccaaatataaagtatcactttttgaccaagttaacaactaacaactagggcctcccctgaggtgagacgaaggaggcgaccgccttaggcccccaccgcttagggcccccatttcgaaaaataaaataaaataaagttagtaataaaataaataataatactcttaatactaagtatgtgttgtagcctagtggtaatttgattagtttaacaattaaaagattgagagttcaaatcccaacaaccttacttttttattgggctccaatttttatttttgcctaaggctcaaattagtaagtaaatcgacatggtgcttaactttaagaagatattcaattaaagaaagtgaacctttcttgagatcttggagtttggttcgaaactccaaagatcttagctgagacttacagagtaagtattgctccagggtattctagatctgtcgagaagaatcacatccgaccatttttacaagaaaactttttgacactgatgaaatgagccaagatacaagaagctgatcctaaacctcccaatccataaatgcaggattctatatcgaagaggcacataaagattatgcttgaactacacgacattatcatcaccaactttggctttattccttacaattgcagcatcgttcaaggttgcttgagtagcattaggattggaagcagtcgctatgttcgccgttaacatcaggaagtgctttgataccatggtgaaacattttttttatttgaaagagaagaaaaaaaaaaggatattgcaaagaaagagatttttctcatgaaaatgaatataacaacaatatttatacaatgtataattagttagagctaaaacaatatatctgtagactagttatgacaaaaactaacaatgtttaacta

SEQ ID NO: 102356 - DNA, 626 bp, Cannabis sativa
tgagaattagtattaggcgagaaaagcatggaagacttagcaaaattcacagattgacgaatgactttattatatagattaagaatgtccttaatggctctacatttttgaggattaatcatggtatagagcaaactatcatcaacaaataaaagatgagaaatagaaggagcagaacgacaaatagaaataccattaaaacaattagcatgcactttagtacgaatagcaccagaaagaccctcagctaccatgaggaaaacataaggtgacaaaggatcaccttgtctaatacccctagtagggagaacaacagaagacaaatgactattcatacaaagcttgaaagagaaagtagaaatacaattgagaataagagagacaaaactatctaaaaaataaaatttaataaggatatacctaataaaattccatttgattttaccaaaggccttcgccatgtcaagcttaagagcgacctaacctagtttaccacttatcctattattaatagcatgtataacttcattagcaataaaaatattataaaatattgttggaatatattttaccatgacctagatttgctaacaagtatgtttattaacattctaaatatgaatttc

SEQ ID NO: 102357 - DNA, 628 bp, Cannabis sativa
  modified_base (312)..(324): a, c, t, g, unknown or other
cctcatcatcagagggattcccatttccagaagccgagatctatttcccagcctcaagaaatctctcaacactgaagagagactgacgtaaagatctcatggcacaggataggatcttaagttggatggttactctaatagaaaccacgccaacatcctccccaaatatacatgaaaccatgtagatcttcctttgaaattcttcatcagcttgaggaggatctttgagatcgctcacaagatcaataccctatgggagcacttgtgaggatcggccatggcaggtcatagggttcccctggtttggattgnnnnnnnnnnnnncagccttggaatccatcgttttcggctctagtcgaggcttgaagtctgtaggaacaaatggaaattggttggtgcatctgggtattatgatcctaaaaagataaacttctgaactcagaagggacattttgacaggaaggaagtattccattctgaaaatggatttccgtaaagagccagaaggttagtgaaaaatgagaagcacgagccgcccttttatacacgaagcacattaacaagaaagccaaagattaagaaatctaacggctggaaatcgtgcagaatatgaataggcaattcataa

SEQ ID NO: 102358 - DNA, 570 bp, Cannabis sativa
aatgaaaagagatgcaatggaatgttataattcttttatttttctcatgtctttttactctttttctctcttacaaaaataaaataaaattaagagcactcctatatttttctatcttttacatgattagtaaaaagtagtttatttatttatttttttttttgaatatattttttagtttatttagagttaatttatgaatgattttatattttgataaaattgatgtattgttatttttctgttgatttatagctatctttttgttattaaatagttaatttatagttatttttatgttcttgtttaggtattctatagttgtttttctgttatttttctatattttttttttgtgtagttgtttagtttatatgtacatttcttatcgtgtatattttaagtttattccagacaatatttttgttgtatgtatatgtatttggttttgctatttttatgttgtttttagttgtttttaagtggtatctataatttcttttgttgaacaattatttttcagttgtttttttattcatgtgtatattttttagtttatttctaataatt

SEQ ID NO: 102359 - DNA, 653 bp, Cannabis sativa
ttatgatgttaatgaaacatacttattactaaatttagatcctggtaaaatatttccaacagtattatcaaactatattataatgtagatacacatctgattatttttgagttattgtttagttgatatttagtttatatgtaattgtcctagtgtatttttctagtcttttttatacatatttaactagtgttgttatgtaattattttttatttattataaagttatttaatcaataaaaaaatgagtatatatttatttctttttatgagtaaaattattttttttagttgatgtactagtacttggtatttgcttttttatttttattttttagattacttttgttgtttatgagtttcttataagttgacataatgtgttgatgtctatttaattttttttttttgttatttgtttgtagttatttaattgtttaactaggacaaaaataagtatgtttagtttttcatgggtacatatatccaaattgcttttgtgttgttatacagttgtttgttggttgttaattagttgtgtgtgtgtgtattgtgtatatgtttttttaaggttgttgaaagtattttattgtagtctaattgatttgtatatttaattagtgttgttgtgtagttatatttttgttgccaaa

SEQ ID NO: 102360 - DNA, 595 bp, Cannabis sativa
aaccataaaccaatcaatataaacttaaaaagaaacgtacctgaaagatcaagcgacttactggccatgggcaaagtgcaagcttcaacactcatgtctcttccgtcgtcatcttcgacacccgacactcatctctctctcttttccaagacatcgtttggaatgtcacccacactcatcccagcacttcccagtacgaaagtcttggactaggtccttgaggtattaaaacctcaacccctaactgaggttttacataaaacccttttttgttttgccacttgagaagaagaagaagcaaaaaaaaaaaaatggaacccacgccaataaccaatgtcattcacgggcttgactctcaaacccatgacctctacgatgtccaggtcggcccgatcaccgtccgaaccctagtcaccatctccgcttccatggattggtattgttttgtttttgttttaacctaaagagaatgtgtccacgttggtcaggttacaggcaactggggcgatttcaacgttgagatgacccttgttaggtctttggttgtaagaatgtacactatatatactactttttagaatgccaaaagtttttt

SEQ ID NO: 102361 - DNA, 501 bp, Cannabis sativa
gaatgtgtattgattaccaggaattaaataaattgacagtaaagaacaagtatcctttgccaaggatagatgacctatttgatcagctactgggaaagaccatcttctccaagatcagtctttgatctggttatcaccagttgaggattcgggaagaggatattcccaagacagatttttggacccagtatggacattatgaatttctggtaatgtcgtttggattaacaaatgccccagctgcatttatggacttgatgaaccgagtattcaaagacttcctggatgattttgttatcgtctttattgatgatattctaatctattctaacactgaagagacacatgaaagacatcttcgaatggtgttacaacgccttagggagcataagatgaacgttcattagcaatttaacgctgtaggttctcgaaagataattattatttgtaagtgttttattcttagaacatccacctcaatagtggctgctaagagtaaga

SEQ ID NO: 102362 - DNA, 760 bp, Cannabis sativa
ttgggttcgtgggtttggttcgtggggttgggttcgtgggtttgttggtttcgtggtcgacggcggcgtgggtttgttggtttcgtggtcgacagcgtgggtttgttggtgtcgagcctggttcgtgtgggttcgtgaagagagcgagagagagggaaagtctttgagcgagagagagggaaagtcagagagtgagagagagagagagagagagggaaagttagagagagagtgaaaattttattttaggggtattttaggaacttttttaaattagtggaatcaatttgttcaaaaaattaaggagtctaaattttgatatggagtattttattagggccaaaatatgaaattttccttgtaatataccattaggctacactcaaaaaaaaaaaaaagagtgtcaagtcaaaataaaagggtgagtgttatttgtatattgtggtctatgtctaacataagtattgttaataataataaaaaaactattcaagtattttgtgttgtattattgaacaagataatgaaggacatggctagagttgaaatttagagaaaagccagaagaaataaattaaaattagggggaggggtgaattacaaattttcatgaaaagagaagaatatagttttccctgaggatgtataaaaatatttgagaaatattaatagaatttgcacttaaattacacacaatttatacatataatgctataagggcatgtattcagtttgctccaatataattttaagtaaggat

SEQ ID NO: 102363 - DNA, 1022 bp, Cannabis sativa
ctcctaatgagatctatactccaactagagtagagtatcgagctacagaagtactctaaatagaatcacctatgggaatgtgggagtggggccgcttcctatgaaattttaagcaaaatttctagagcgttcactatactgggatagacgtgcatggccattagcgcacgtgcttttgattacacccttgaaaaggttgttgcgtggtacaatgttagagatagagttcaagactacgggtcactctagtaaaatttaaatcgtattcactacatagaggttcaaatcgaaagatacctttgtttatactcaatcttactgttgaatgataatagtagatggaaatattttttaaataaattcaagttggaaatgttggaactttgatgaatattttaacaaaatatagaagtgttctagtgtgtgtgaagtggaaagagtcccacatgggatatgaacccttgtttacaagggtatgtagagtgcaactttagcatttgggtttggaccccaaggggtatctagttttgtgtgaatgggtgaggactcacacacttgacccaccacacacacgcgcacaccgtttgtccgattcgagctgggttggttggttagtgtggtgtggtgtgacactttattattttttacaaaacaattatttaatacaattattattttttattttttaatttaattgagaaacatgtttagttgaaattgattgcttaatcgtatcagttaatgggacacgttaaaccaattacaccccacgattaagaatacattcttcctgttatgttatttcaatccattcatctatataatgtgattgaactgatggaaagaatacatctttcttatagcgaaaaaaaaacacagttttcacaaaaaaaaaaaaattccatctgcgacatcataaattttagggtgtatttgacagttctctacagtgcaatggggttctgatatagttaagggtgttcatccgattcaatctacactattttgctcgtagtgcatcc

SEQ ID NO: 102364 - DNA, 1111 bp, Cannabis sativa
  modified_base (145)..(148): a, c, t, g, unknown or other
aactatttaaaaaatattgaaagtaatgttttttttaaaaaaaaaaaaaaattgattctcaattaaaaaattgaaaaagtgaaaattgttttacagaacatgcttttgaaaaatatttctcttttctaattttaaaaacagaaannnnattaaaaaagtgttaccaaatgccacaaaaactaacagaagtattttaccaaccgtcagcctttttttataataattattaaattaaatatgtgaaaatttgatgcaattcttattgtaattagtcttgtttctgtgataaaattttgagtgttttagtcttgtttgtatgacatattttcttttgttgttggttcttctttgtttttcaatagattatcatcaaatcgttgttagtgataaataataataagttctctgcgactgaaagggttattagtagtgcagttacgtaccttacaccatagctgaatgcttaagttacgaggttgaatgaatctgctacaatagtttctattgttgtgtcttttaagcggtggatgaaacagacatatgtgatcttaaagttaattgtgatgctgcaattttttttatctgattttattttaatttttttgtcaaacgatataagaattaggcggttaattatttaattcgtttttttaattctaatcctagttatacctttaacggaaaattattctaattggattacaaactattattattttagctgattgttattaataaaaattatattattttttaaaaaaagaagtgtgagcaacaacttaaaaaatgtgagattttcatattttattaaaatgtgcacaatatgtgtttgcaattgaattcaactccaatagcatctaccatcctccatgcatacacatctattaagatatagtacatataaatatataaataattgccatacaatgcaaaccaatccttcattagactttgctaaaacaaacattttccaaccattttttcctttgtaatacaaattcaaaaataataagtatataacaaaaaaaataaataaatatatattataagagatattataatttttaactttattacttttgagatcaaccggtgactctagcacaatgag

SEQ ID NO: 102365 - DNA, 518 bp, Cannabis sativa
gaatataatgtctcctttcgtttagatttctaacccttgatcctttctttcatagagtattatcaagatctaagcatgaatcttcttctgttgatagaattctacacaattttccacaaaagcctgagtattgacttgaattgtctgggcaatttctcagttcactaaatgggtttcgaaaataagaagaagaaaagaggaggatttcgaattctaagaggctctttctttattttctaagttgtccgacaaagtgaaaaactagtttttttattctcttaaaaaattagagcatcttattctatttatagaattttatcttgggttaggattagaattatatggaattaaaaaaaacaaaaaaaaaaaaaaaagataaagtaatggctcttaattgaacaccttggctgaccttaatgggccataaaagattttaattttgctattttatttaacaacttatcttttctttcacaaataccatattttaattctaactctataaatatcaaatctat

SEQ ID NO: 102366 - DNA, 597 bp, Cannabis sativa
aaaaacgctcttaaataaaaaaaaaatatatgttgaaaatatttaatttagatttaatttattagtttttttattataagaattaaaattattgggagttttgaaaagaaatgaagaattgaagagaaaggagtaattttgtaaaagaaaatcagattttgggcctgggagaagcccactcgcgcgcagcccaaagatccatcaccagccgtcggatcgaagatcaaaggggctcagcgcgagcgtgtagtccatggccagaggcgcgtgagcgcctgtccctctctgcccagccagcttctttccacacgcgtggtacccgccagcacttctctctctccagcagctcctcacacgtcgacacgtgtcccgcctgtgcagcctttctctctccaccagccattacatgctcgccacttgtccgctcctccttcaatctgagtttcaacagcgaatacatgtgcgccaagtgtcgtctcctccttcaatccgccatttttcaaattgttttgaaatgcaatttcaaaatacattataattttattttccttttcatttatttggctcatttttctatttctctcagccaataaattg

SEQ ID NO: 102367 - DNA, 754 bp, Cannabis sativa
gttgatgaatttgtttcaaaaagtgttcgaaggattactatttttaagtagaaggttgatattagcattaaaaataataataattgatagtattattttattttagttgatcaactcatagtattattaaaatattagatcttattagtaattatattttaaaattagagtaaatgatggtataagatttcaaaatttttagtttgtaagcaacagaaatttaataatttttttagaagtataagtatcaaatatttattaaattgtatttttctccaattttatcagtaaagttttcactttacatttattaaaaaaaaatatttagaaataactagtattatatgtttcgttagatccaattatttagaatttgtgcattatatgtgttatgcttaacaaaattcgtattgacgaaaataaaaaataattataattttgtaaacattaaatattaaaaaattaactatttacctataaaataatgggtgattctacaatgcacccttttaaaaaagatgtattgatgtactctctatttgtttcaccatttattaaaaaaatttgtctatttttttttcatattcatgtacattataactttttaagatatcttataaaattttaaaatattcggaataatcaatgtgaaacgcaattttcagcgtattaaaaatttcgaattttttaaaattttgtaggatgtcttaaataactataatttacatgactatgagaaaaaatttaactaaaa

SEQ ID NO: 102368 - DNA, 660 bp, Cannabis sativa
aggattgaatatgtatatctgctattgataaatgtaaatcccaccaatatgttaaccaagtttttagatctacaaaataagataaaaaaagaaattagtggagtatataaactgaaataagtagtgagctttggatgtaattcatatatttatataagtgagacattctattaaaatctgtaatacaattaattgtcaaaaatattatgatattaataagaaaataaaattggaaacaaaattaaatgatgaccataaataaaaaataaatatttattcaaccaataaactattgactttttttttttggaatattaatcaattaaatgcaattaattaattaattactaaatataaaatattctaacaaattcatcaaattatttagcgtcatgatgatgcaatatattatgtataatatgcatccatatattttttttttaatcttctgcacttattcaaagtttttggaactaatgaagaagataaataaaaagagatttggaataataattttaaagtgaaaatagaggctgttgtttcagcaattatacaatacaactagtttgaagttacgtgcattatatttgattatatattagctgaaagcttttattcaatgctagagaaggaagcaaagacgagaatttcttcaatatg

SEQ ID NO: 102369 - DNA, 831 bp, Cannabis sativa
  modified_base (320)..(321): a, c, t, g, unknown or other
  modified_base (482)..(484): a, c, t, g, unknown or other
aatacgtggcccaaccggatgacggcgcgtggataggaaagggttggcatttaaataaaatagctaagtcttcttcgagcaagggattatcctggacatgcctcccggagaaggcatgtaaggcctcatatgctctcggagagcatgatggcatcaaagcatctccgggtggcgtcacgcttcctctgaacagtcatctcgcatttaatggtgcatgggaggaagcgtattggaactgccacacgcaataaagtcttacgacacaaccccgatctatacctactaggctatgactagtaaagtctagtgacgactattcnntgaggaatcacatcagtcaaaagggattaaggaccactttcataaaatccctatagcacctagggattagaccatgcattacccatgatatattcattgggaatgtataactttactgagagttacagacatgcatgtaccttaattctagggatcacccnnnaaaaacactataaataccccccgaagctcattaaagaggggtcgagaattctgggttgcacaagtgctagaagagtaaaaattcacaaagaacattctctgtattaaatattatcataaatacacagactcatggactaaggctcattaacgccccaatcacgttaaaaatctccttcttaatttcttgcaactctctaaattattattattttattggttgccaaaaatctcggtcaacaacaacaactaataatttctaaatcattggcctcatggcaccattggttgacagccatgcttggttgtgagacatgtcatctgtagaagtaaagtccttaaataaaa

SEQ ID NO: 102370 - DNA, 915 bp, Cannabis sativa
agaagagtgtgggctttaggtaagagaaagtaaagagagagaaactttatatttgaagaaatttatgcctctaaaaaattttataagtccgtctttctttattttaccaaaaaattttataagtccgtctttctttattttaccaatttcaactttaccgctttatttatattacctacaatactacttttcaaagaaacttaggctcatatcttgtaaaaagtgtaatttggtgtagtgtaataacttaagatataggtcttccattactaggccttttacaacttcgcgagcagagcctatatctttggtattttcatcatgcgcttgccccatcttttattttatctgtatttttttacaaaaccgaagataaaattaagtttttgttgagtgaaaactaaaaattgatgaaacaagactatacaaatgtgtatattcagtttttttttatatataaaaatcaaatataaatgatatatttgtaatagtgtttatttttttttaaaaaaaattagatataaatacatataattttttttaatatatattaaatataatttgatttgattaggttttaatcaaatttcaagattgacatctaattataattgatccaatctaattagaatccaacatttaacatccaatctaatctaattgttattggatatttatctttttatttttgtaatataattgaatttgatcacaccggttaagtttaattgaattgaattagatcttgcatagttctcaaaattgtcggaatgggaaagagataaacaccacttgatctcatttttcgtcagaagaaaaaaagtgattgaaaaaaaagtgaaatcacattaaaaaataaaagaaataagtgaagtgaaaattgaccattacaaaatatataaattttacgagagt

SEQ ID NO: 102371 - DNA, 677 bp, Cannabis sativa
gggcataaaacccaacagtagactgcccaaccgcatacaacgccttccttggccgaccggccttggttgactttggcgcaatcacatccatccggcacttgtgcctgaaattccccactcaggaggccagagtagggaccgtaaggggcaatcagggagaggccaggcagtgctataatgttgcagcacatttgccagtgttgatggtccgtgagggtattgagctagatttggtagaagaagatgagttggatccccgtgtgggatctgaaaaaaccgtagaacctatggaggacattgaagaagtacaagtgtgcgaccttgacgctaccaagatcctctgcttgggaaaacccttgagctggaggagagagagataaaattattgaagcattaagggcagccacagatgttttcgcgtggtgccaaggagacatgaccggcataaacccgcatgtgattacccatgtcctgaatgttaacccagatatgccgtcagtatagcagaagtggcatccccttgattcggtaaaggcggacgccctggaaaaggaggtagacaagctgctgatcaacggcgtgatttgggatgtgtactacccggaatggctggctaatccggaaatgggacatggcgggtatgtatagacttcaccgaccttaacaaggcctgcccg

SEQ ID NO: 102372 - DNA, 599 bp, Cannabis sativa
gatgtagaataaattacttaatttaggttgtttaaacaggaaagtactgagaataacataattaaactgaaatacgggactgatgaaaccagtcactactagaacctccttccttcccaacaaatatctctcaattccccatatccctctccctctcatctgaagaaaaagaaatggagctccggcaataatgggggcatcaataaccctcaaatgaatgggaaaacaccaccaccttcacaaatgttcactcaactttcgcgtttcttgtgaagtcagtgcatgtctggcagctgcattcagagaatcggcaaatttcacagccaaagcacacacaggaagtgcagcccttgcaggttggagaacgagtgcaacccctatagactctgcggcttgctctctcttcctcatcatcacatgttattctgaaatacagcaaatactattcaagttagttttcatcttaaaagtaatgaacatcatgacaagcaaaatttatgaacaatacatcctacgagattttggatgtatgtaccgcctcagacatttttaggaatgtcagcaccgtaacagtaacatacatgaatctttctttagta

SEQ ID NO: 102373 - DNA, 505 bp, Cannabis sativa
aatcgttggcctccataactctcttaatgaggcaccactccattctatcatatatcttatgcatatcaagctttagagccatcaaacctccactacccttgttctttttgatagtctgaacaagctccttggtgagaattgaggactccgcaatccatctactgggtatgaaagcagcttgaaaaggtgacactagtttgttcatgaccgcccgaagtctggttgcaataatcttagaaatgattttatacgcaaaattgcacagactgatcggtgtgaatttttcaacagatgtagcatcttcccctttcaggatcaaacaaatgaaagtgtagtttaattggctctgaatcctcccttccgagaagaaagtttggaccatttgaataacacttttaccagtaattttccagtagtttttatagaaacatcctggattaccgtcgaggcccggagctttgagaggatgcataacagcaacagtgttgatgattttctcttcccc

SEQ ID NO: 102374 - DNA, 1112 bp, Cannabis sativa
ggggttagttccaactgggtattgaagaaaggaaacaaaatgcagaaaaatcaagaattgcagcaacaatgaatttcagtataacacatcttgcaagaaccctaaggatcaatatttctaatagaaatagcctgctctgataccaaatgtaaatcccaagtttttgtctaacgtatctttttcatatttggattgattttatcttgatttatgcttgaatataagaaacagaatcaaagattcaatactagaaatttacacgcttcacttgccctagaaactcattctaggcggctagtgcttgggttcctcgaaccattgtaataactttcactatattcaaagatgtatcttacagataccaaccgtaaacaatattgtaaataatacactcttttacaaaatacactgaatctatacccaaattaaccaagacccttgattggagacacaagattcccttgtgtgaatgatgagctctcttcaacattttttttcaatctgaactccctttaaatctggtgatgaagacaatactgaaatcccttcagtctgaacttaacatcatcaagctctgatctgcaactttggattaatactaccaagctcaagattcagacttgccatggaacataaagacgaaacaagaagaaagaaacgtaatccctaatctctgataaaaaaggttagtcaatataataccaagaagttgtatttatactcagttaaaccatgaatcccgaaatagacagttgttaccatctgaataattaaaacccaaaatatttttaccggcgtggattatcactaacagtataaactccaaacaaaataccacgaactccagacgcaattggtcataatttgtcactacagaaaatactggttcttacaatatatattatctaatattaagaaaaattcataaataattactttcttagaaaaaaaatcttgaaatgcaatttaagaaccttaatatcacttagccgctctattaattcgatctctctctcatacttatggtatatatatttgacttatttttttttctatttatttagagtctctctatgcatctccatctcaccaatatctattctatataaagt

SEQ ID NO: 102375 - DNA, 589 bp, Cannabis sativa
tcggaagaaatagcacaggtgggtttaaaagctctaatttggtttaaaactagttaagagatggaaatatagttttaactgacattgttgtatgataattttcctggaaggttggaacaatatcagctaatggggaaagggaaatcggtgagctaatagcaaaagccatggagaaagttggcaaggagggtgtcatcaccattgcagtaagttatttggactcctctattatttcatgtaatgctgaatggtttctatacataaaatatattactcggctgtattcactactgcgagtgcttttattaatcatcaaataattacacaaaatagctcttcgagaggctttctcttctatgatggctagatctctctcaattctaaattctttccccataactgaaacggagttctaattttctatttataaactgctgtaataaaacttttgcttggcctttatggtgttccctcctttgctagacacacattccagattttttttttcttgtgcagaggattatgatcttatttgttgtacatgttttttagtttagttttttatcttcttccctgtttatatatatat

SEQ ID NO: 102376 - DNA, 650 bp, Cannabis sativa
gagagagagagagagagactcacaaatacgatgttaaaggaggaacccaatgtccgtgtcaaatctctcaaggtacaaatttcatgtgtcattttccttcagtttaattcctctttgcttccatggcaagcaaagatatattatgctaacttatgcatcctaacacgtcaactgccaaaccaaaaacagagctacaaaaatgaaatctaacactcaccggtaccatattggttccagccttaactccatcacttacaactttccatgttgtttgaataactaatcacatgatttgacatagtagtgctagttagctagaaaagttctaaccataatgctgaactttaattagtgtcattagcaggaccaacataaaaaaaaagactaactgtaatgctgaaatactagataatttgcataagaacttgaccaataaagatttaacatgaatcaaaactttaactttgatacataaaacctatcacatataaattgatatacagtaagtcaagtctaattgctcattacccttttatcaaaacaagtagtgaaaaaataaataaatacagaaaacccagaatataactaacattaccaagtatgtctatttacagaattaaagaaattcaaaaatctaacctttgaagaaa

SEQ ID NO: 102377 - DNA, 611 bp, Cannabis sativa
ggaaaattttcttcgcaccatcctcgtaacaattgaaaggcctaaatcaaaaaacaatattgaattcaaataattggcaaaataaaacgaaatgcaaataaataaaaaaaaataaagaaaataatcacctaggatattttagcaatcctttgccaatccaagcatcaaactttgcctcaatttcaggagagacggtatcagaaaatgtatcgttaagagcgtaaaggcccttcacatacgtaaccatcttaaaattcctctcatctcctccagattgagaacctaaggacattacctccattggagtgctgctcacatcagccgacccaaaattaataaaaggtgatttcaatgccggggtacgctttctcttatccaaaagaggagtataagtaacagtatcatcagcttcttcatccaaagcaatggcatctgccttttcaacaacaacatttggattggaatctacaacctgaaatagaaaatttgaaaataaaaaaaaaaagtaaaagttacaaaactaacataaaactgccaagcaactaaaaaatactgacatgcttacacaacctaacaaagcatataaactacacttacattgattttagcaa

SEQ ID NO: 102378 - DNA, 831 bp, Cannabis sativa
atcaaccaaataatcccttgtttactaatattattattactccactataaatatagaattgcattcttagtaattatcgaattatatttactgagtttaattactctgtccattggtataatcaattctagtgattagccctttatgtgtttgttcgtaattaattttggtcaaaatcctgttttacttctctaattacttttgtacctttagttccattaatttactagtgaaagtataattcaagatctcatctgaatttgtgcacaatattctaattccagaattaatacttaaagggaaccaacattcgatccgttagaaaagtaagggtttgcataattgtacatcatgttcccagccatccatgttattagattcccaaaacataagttgtaagaatcatcttctttgagaaactttaatgagtgaatcaaagaaactaatagcaagaacatgagtttatgataactcagaatttaggtcaatctactatagatcatcgttatgatatgaattaggtctttatgataaatggcatactgataaagatagcattattcatattagtccttgtcatatataatctctattatatacaatacattcactttgatgtctcactacatccataatccgaaccaagattacttaaatcgaagaacgggcatctgtgaactgtactagcaactattaattcattaattaaagattctataactttaatatgttgctgactgttttactcatatatagttaagtggtcttagttctgtgtacagctgcaagctacaaactcatatatgtataagaaattttttgatatttaat

SEQ ID NO: 102379 - DNA, 1058 bp, Cannabis sativa
tatggcccaagtcatcacaagattaaaatttctaggtctaaccatcttgacatgtacaatcacccctaagctctaaactcactgatgtccagccttagcctttcctttacctacacatgtaaacaatatatgtgagtcgacagactcagtaagtaaagcatacaaaacatgcacctgtctacaagacttaacagatgatcaataatgttcttaatagaagtatgacatttataccacatgcactaaatacttgtcatatactagtgttggtagggttgaatcgtaccccaagtactactgagtgttgtatcacatgcattatgtacttaaccataccagtgctggtaacactggattgtaccctttgaacatcatatactgtaccaatacattcagtaccgctactgtactagtgttggtagtatatgaatcaaatacacaacatgcaatttacatacatacacatatacatgtatgcatggtttataattatcttacctcgtttctaaattcaagtgtgccaatcgacctgaattgaaaatcacgcgttgaacagagatcctatgtcacagtcacataaattgggtaaacaactagccaaaaccttttcggggacctaaacttaaaactagaagtattcttatcgataaatagcatgacaaagccctatatatcaagcaaatacaaaaaaaatagacattataggaaaatttcctaaaaaatagcaagccgtttccgtaaaaatggaaagctatttttctgggtccctgtcagtaaaaacagtagacttttttttgctacagaaaaacaacaaagctcctaatcaactcaaaacaacctcaaatcttccaaaactctccaaaataattttaaataccataataaaccattttcaagtgataatactagatataacacaaaatttcataatccaccattactgagctaagtttgagttgctcaactcagcaaataactatcaaaaccacctaattaagctttgaacaatctcatgaatctttagaaattaaccgaactaaacctacgttcggatagat

SEQ ID NO: 102380 - DNA, 736 bp, Cannabis sativa
  modified_base (690)..(691): a, c, t, g, unknown or other
aagaagtgaagaagaataacttacggttcaagggacgctgctttgaggagacagacacagaggttccggtgtgctacgtagacaaatcgaagtcctctcgctctttcggttcaaaacataccgcctttaagcctttcttttccccgtgtcgtttttatttggaccaatactttttttttttctctaaataaataaataaagcttttttatatataaataaatcaaatacacaataataataacttttacatttagagcttcttccaaccgtctcccaactcggttttatctttccacaaaatatattccaattgttgcaacatgtccattttgtcttgctgctcctgagacgactctacatgtggtggtgcggtgctcttttgctcaaagttgttggagcaaagttccaattagtgttgtggcgcctgatgccatgttgttctcgagttggttcgaagcgggtttggcatcgtggaacacgactgaagctcttgaggctggtatggtgtgttggtcagtttggacacatcgtaacgatttggtttgaaactccaaacaccctgatgcgagtgaggtagtggcaatagcaaagttaaattacgttgaatggtttaatgctcaaaaccttaatgtcacagatgcaaggttaaactggccaactgcactacccgtggagcaatggacaacacnngattttccttttgtcaaagttaatgtcgatggtgcacttttctct

SEQ ID NO: 102381 - DNA, 1143 bp, Cannabis sativa
ctctctctctctctctctctgatccatcttcccattttgtttaggggtatttatagagtttggtaagcatagctaaaaaagggatcacttatctttgagtgtcagtaatgtatgtgcacaagttcccaagagatacaaaatagggcatacatgacctatgtcgtaggtatcatagggattaggcgagattaatctttatccttctttgattgatgtgattcttcataatggagccgtcactaacccctttgattatcgtgtaatcaccgtaaatgaggcttacgttgtctgacatgttctcttatgggtgttccaagatgtttttcccatattgcattaaatgtgaggtgactgatcgaataggttctccttctcccggagatgctttgttatatttctatctctcggagaggaaggacatgctttatgtgcctctctgggggctcactctctgaagtacacttgcccgtctatatatgacacagctaattcttgggtagggtgtccttttaatccacgtgtcatacacagccgcggccacgtattttggaaaaaattcaaggcaacaatttattttcttacaaataggtcataattaaatgatgtacataataatccactttattataattctaattagttacataattatcttaaaaaaatttagttagcgtaatttctatattttaattatgcagtttattacaattaaatgcttgatatattatttattttttatcctgcgttgttaaatgagactatattattatatttatctagtgcaacaggtgacactatcagatttatatgcagaaaaagtttctaagtcttatcccttttcaaataaacttatgtaatctaagtgtgtgatcgtgtacaagactaaatcacctcatatatcagtcaattttcattttcaaataagatgtcaaattagtagagatttctaagctaattaatctattttcctctgttgaatcttgtgctctctttcaaatctgtttcataatatatgatattcctatgtatttactagcaatacatagaactactaaaccaactgcagatttttatcaaattttctgacaagactatagttgcaatttaatgttagaaaaactaggacatttttagtaaatccat

SEQ ID NO: 102382 - DNA, 509 bp, Cannabis sativa
cggatgcacagttcagtaattatgctggaaagttgaaagcaatggtaatagatttataatacacaaataaaaagtaattactatgaattcagtaaaaaaaattactagtggatataaaaagaataaattactattgaaaaaaggacactgactgcagcaaaaattgaagtctgagcatctttgggatcagcaagactttaaaagccacatattatttttgtttttctttcttctccacgtaagaatttttcgtataaaaattactttaataattaacaattctaaaagtaacccattaattgaggcagactcacgtagagacgaagtggggagtcactcttaaaaatcttaggttaaagtcgcccctcaatttaaattttaggttaaagtcttacatgtcctcatttaaataattaaattttattaaatactataaaataatttttaaaaaacaaaaataactgttgccaaatataaataacaatgttgataaaattacataaaaaaaa

SEQ ID NO: 102383 - DNA, 538 bp, Cannabis sativa
ataaaataataataaaacaaatctcattaatatttgaattgatatttgaactgatattaaatattcgagaatcacaacccatttaaaaaagaaaacaacaggagatttccgcaacttatagaaaaaaaaccaactactagacattatggtgccgtcttaaggtttgtatattcatcgatccatctcaatacttgcaattaaataatatgctgcttattaattaatcgatgtctctctttttggaaagttctaggatggaaatttaagaattgctatatagaattaagcaccataattaatattagacatttaatacatcatgcaacttttggaacaattcgttatagtttcactgtactaaaatggagagattcaaacctatatcatgatgtggccatataaccgacttcttgtttataaaaaattattgtgtgagttttaattctcaaattttaattgctcctaaaatgacatgtgtaaattattaattaaaaaaacgatacctttaaaatcacatttcattttcctctccaattta

SEQ ID NO: 102384 - DNA, 691 bp, Cannabis sativa
gttacagttttgggtttgggtccatgtcctggtcatggtcctgttcctgggtcctgatccgcatctagtttcgattccagtttcaagtcacaaggtacaggttcagggcaagtttcaggtccgggttttggtctcacgtaggattcgaggctggctctagttccgggtttgggcctgggtctagatctcggtcccgtttaaagatctcgatacggttcaagttcaagtttcagtttttgttcccaagtgttggtctgggtcttggtatgtatccgggtcctgatttgagtttgagtttgggttcgcgttctagtttaagtcctagatctagacatcgacaacgaatcgggtccaaccatcgagtcccagatcccaggtcccgaggttggtcctatgtccaggtttgggtttagcgccaagtctccgatcgcgatcaaagttctaaggcccaagttctagtcctagttttggggccaaattcataagtcagggtcccccgtctgtattcgtgtcctaggtcccggtccgggttcgggttcgggtccaggtcccagcttggcttcgggtacgagtttgggtcgcaatcccagtctagctctgggtttcgggtccttggtctgagtctggttcttgggtcctgggttcggccctggttttggggtctgggtctgttgaccaaggttttcggcaa

SEQ ID NO: 102385 - DNA, 558 bp, Cannabis sativa
tttcgatttattaaaaaaaaattattcatatatatgttggttatgattaattggtatagattgaaatccgccaatgatcaaggtaatctaccaagaaagtaaggttttagcgatattataagtgttagtgtaacacacatcgctcatgtaatgaatagtgatgtataaattgaaggtgatttaatttagtaatcatgtcaagaaatacagtcttaattgtgtgagtgtaacatttattgtctatactgtatgcattatagtagcatcctatattaaaatagtggcatactattataatattcatgtgtatataataattatgttcattatatttttcttgcttagattttggctcacgggtgctgctctattgttctgcaagtgttaagtgtaaaccagtaaactagtagaaaaacagagtaacatgaaggctaattgagattagccgtaaaagttaatcaaaccaattagactaaatcttttatttataataacagagagtttgttacaagaataaaagaagaccaagaaaagtaactaactgttgggttttatgcc

SEQ ID NO: 102386 - DNA, 595 bp, Cannabis sativa
tacccataacataattggtcacttaattttgtatcacactttataatagcatatacattatacatatgtgcccacataggatttttaatccaacaccatatccttttgagtacgtaccttgccaagagagtttaaaccattaataattgtagtaaaatgagtatacatgctagcaacgttttcattcgctttcatcttaaagtcttcatattgggtggaataaatttgaattttagtttctttcatagcactagtttcttgatgagtaacttcaagcatttttcacatatcaaaggcggtagaggcttgttcaatatttttaaatatatctctatctaaatcacatataagtgcatattaactctaacatttttttttaatgtctaatactatatggttgataagcaagtcttgtctattgacatgttagaaagttgagtattgttttttctgagaagtctgtttgtttgtgaaattctgtttcgtactatggcgtcagggagtcgatcggatgtggctttggaagatcaatatgatcagttgaatttagaagaagatgaggaggggattctgataacaggggatgatgaggaag

SEQ ID NO: 102387 - DNA, 685 bp, Cannabis sativa
aaagagaaaaaatacttagcgtatattatacgatattcaaactaagtgtaagtagtttggcgagccaagatagcagacaatgaggtgtttttcttgcaagaagatggtatgcatacgaggaagatcctctcgacgccagagaagtatagttagtagaattaagataatattattctcgagaagctaaaatgacaagtaactgctcgctatcaaagtgatcttggttcccttcttggcgagacatccctatgagataaggcttaccatatatctttaattacgcgttcatctcggtccaataaaaccgggatattcacagctgtgtaaaaacctcatttatttggcttgatttgtaatcagattccacaattttagggataatgtttgtaaacacattttggcgagctttgtaattaactgacactatgcaagaagggggatgaaaagaaaaaactcttacgcaagaggccttgaaaaaaatacttagaaatctgaataagattgactcgtggactatgtagaattttaactgcaaaactacttaaaaaaccctggtgttcattttcttatttatctatatagctttattttttccgtgttgaattatcattgtgagcctcaaatttggttaacaaaaatctgcgttaacaatataatttacacattaaacataatcatgaaataa

SEQ ID NO: 102388 - DNA, 675 bp, Cannabis sativa
ctgcaataaagtgaaaatggagaccgtttaatttgaagagagttcaaatttatagttggaggaattttagctatagtattttaaggagatcttgagtgaagaattaagtgatttgattatttgattttaatagatgaaacagatttttttagtagatactcaagtattggggtaaattataatctctatgaatgtaatatgttgatttgatttcagaattaaaaaaatatacataacattaatttaatagtggagttattttactttgatttttaggggactcaaggagtagttgactggaatatgttttcactgcacgtgaaccttgtaaattcatgtgttcatgttgatttacattctataattgaaattttaatgatcttgtaaatcacttatgaaataggttgaatttacttttttttttttggtattagaatgattagtggtaaaaatacacttatttattttaaatattaaaataaattaaattttaattatttttttatgagattattgtgatatattttataaataaaattagaggaaattatactctacacgctttctatagtgtcctcttttatttttatccctttttttaaagtctattatttttacctctctttttaaatattgtaccaattttgcccttatcactttaagatattttccatg

SEQ ID NO: 102389 - DNA, 622 bp, Cannabis sativa
tgcacctttaagtcttctagatccaccatgagctttccttttagtcttgaaccctttaattttatcacccatttcattacttgttttattttcaatgccattatgtatagtagtagaagtcgatatctctttcccctgagctacatcacttgcatccaaatctataaaaatcttggtaaacacggaaacaacaatattgtatgctttttcatcttcggcggcttttgttgcgagttgagtttgcattctacaaatttctttgtaacgttttgccatgtttgcttttgcatcctcagtagacacactcttgcaattcatagtggtagaaaatccagtttttgaatgcattgcccacctctttaaaatatattcacaagaaatttttttgacattcctagacgaatatactttcaaaatatgtgcgcataaaattcctgtaaaatcaaatttcttacagctacatgtcactgtattgtcaaaagaattatatgtaacagtgtgcttaaaaatatttccatgaggaattactgtatactttgccactgttccaacctcaccttgaatattgatagcacaatcgtaaacattcagaatacagttggagtgtaaacaattgaagcat

SEQ ID NO: 102390 - DNA, 501 bp, Cannabis sativa
taagtctataactataactttataaataccagtatatatattgtgaggatcgaaccaaattataactaagtgtaattaataatactacaaatcaatattaagagatcgatgatgatcatgaaacagtcccatcttactcatgtgtttctcatcttttcactctttgtttttcttcttctttgcttccaatctgatgctcgtttactggccgaggaagtacaaggtacctatacatatatatatatatatatatattaattgttgttatttttcttttaacattaatattattgaatatgatttcattttattatgtttttttttttaatattattaaatgtatatatatgccagttgggacagggtcaacagctaataatgaaaaagtgaattatgatgaagagattgtcaatgaagaatggcttgttacaggatctaaagatgatattttagaagtaagacttttctagctatatgatctgggtatatatatatatatat

SEQ ID NO: 102391 - DNA, 638 bp, Cannabis sativa
gactagaagatgccaaaggaaactggccggagaaacttcctaaagtactatggtcatatcgaacaactgagaaaacggcaaccgaagagactccatttgctatggcttatggatacgaagctatgctgcctgtagaactcaagccaccattccacaggagatcgacgtacaatcaagataccaatcacgtactcctggccgaatcacttgataaaaaatcgaagagaagcgaaccacagcaaacttaaagttgatagcccatcaacaaaaagtagcttggtatttcgataaacaagtgaaggctcgaaaattttttgtgggagacatggtcctaaccaaggtatttctaaacaccaaagacagtacgacaggtgtactaggacctaactgggaagaaccatatccggtagtcgaagtcctcgaattcggagcataaaaattaggtaagtatgatgaaaaaatgcaacttgttctagtaccacgatattggaatgtggaacatttaagaaaatactaccaatatagtactaggtcggacgaacatttactttaaagtgaatggcctgttgggcggactacgctcaaaggtttcgaaaaaaatgaaaaagtactcaggtcggatgaccaccatttaaagt

SEQ ID NO: 102392 - DNA, 1356 bp, Cannabis sativa
agtatgtaatcaagttaggagtagtgtaccggattcactattctcgtaatgagatcactgaatccagtacaaccacggatctactcagtgatgccgatgcacaatggcagaagtcacactatcactgtaggtcgtttgggctgagtatgtagtcagttcattagtagtgtaccggagtcactagacctaactttattacacactttgtgtctcataatactattgtattcagaacattaaactgttttttatttgtatattattcaaaaaattattataatctttattccaacaaaataatacttttaatgttaatcttaaaaaaattattgtaatctttattccaacgaataatattttaatgaaaaatcttttaaaaaatcgtatatttaataaaaataattagttttcattattagtaaatatcataatttaatttcttattcatttgagcagacatgtttatttggacataatattaggatatttgttgctacacgtgagaagttttatgtggccattgttgttgtttagggatgggaagaaaatttcacttatttaaattttaaatttttctaatcaaagtcaaccaaaccctaacgaaaccgatcatttggttggttcaaattacgtcttccaagggaaaatttaatagttggttgggtttgttcaacttacgttttttaagggattgaaaaaatcaaatttatatttgggtaatatcaccccttctttagtcgtaccgggtatattaattattattttttaattctgacaagactacacaacacaatcacatccacaagtactatatatatccctctacctctccttatttattcacacctcaatttagtattgttttgttgcctagagaagtcactccctatctgtagacgtatgtatagggataatatataaaaaattaaattatgtattgttgttgcactgaagtgaagatgtgtaaacagaaggattggtatgcactacaaccgtgtgtagtaggtgcatcaagggaattttagcaatctaataaatcatctcataaaaaattcgggtaataactcaactctttatatctatttatttcaatgctatattattagagattgtttctaaaaaattttatgtatgtactatatgtatattcaggaaatgttgacaaaggcttcgaatgggtggatgaggctgggtggaactacttccaccacaaccaaatctgccatccaactgaggctctacctctcgcagtccacaaggccaccgtgggatgagtgttttgatatttgacgtaccgaccacgggtgcgccagacactcgaacaaaatcgaaacgcgggaggaaatcgtcagcgtt

SEQ ID NO: 102393 - DNA, 1048 bp, Cannabis sativa
gccccaaaagaagtgaacaaaacaggagagctgaacgcaaacacatgcatatcacaaaaatgggactcacaatgcttgcttaatctggtttaccattcaaatactggtggaatgcttttcatagtgctgcttttactatcaaccggttaccaactcctgttttacaccagcaatctccactcgaatgcttatttggtaatacacctgactacaatatattaaagccctttggctgtgcttgctaccctcatttgaggccttataatagacacaaaatggagttcatatcacaaaggtgtctttttctgagatattctgcatctcacaaaggatatctctgtgaaaaccaagaagccagactttctatagcaggaaatgttgtctttgatgaagaatcatttccagaaaaagactcaacaactccttctcaggtacatcttcttttactatgcctactgctttcttctctactgattcgaatactactatgcctgacactaatcatataaattctgcaaatgatgtctctgagtactctataccgtctgtcagccctacaccaaatctttccccaactattcaatcacctaatcactcaaacacaactcctcaacccagttcagccttgaatatcttacgtgttgaaccctcaaactcaccaccagataaaatttcacccaccacacaacctgctgcagcagaaccccaccatgagtcaccatcgtcattaccaccaactgattcaacaacctcccaacctatcacacacaatgcccccatatccattcaagagacatcattacctacaggtacaagaattcacaaaatggtgactacatcacagaatggcatccacaaacccaagtcgtatcatgccacaaaacatcctttatatgagtccacattgccaactgaaccgaaaacactcaaagcaaccttaaataatccacaatggaatgtagctatgaatcaagaagtaagagctcttgtcaagtgataactctatggtatagagttatttttttatgcttttaaactaaaagtattg

SEQ ID NO: 102394 - DNA, 661 bp, Cannabis sativa
ataacaataacaatagacatatataagcaatttatgaattgaacaactcatggaattatgaaattgtaactaacttaattattataataaagtgattttagaacatttgaaaattgttaccatctttgaaataaaactaataagataatcgtagaaaactaaaatcaagagactcaatcgtaaattggacacaacatacaattaaaaaaaattattatactcttattagtaaaacacaatatatatgtacttctccaaaatataaggtataataggaagaagtattttctaagaaattatgttccatacacattgaattgactccaaaaagatgagaaacttaaaaaaaaaatgatattataaattatgtatttcaataaccaaaacaaacaattaattctttttcaatatcaataatcaaaaattgtagagcttttatatatatataaatatatatatatatacctacggagtattagagtaaattcagtgccatatttatttttaaaaagcagagaaaccacaactttgcaatgataacaaaataataaatatgaaatatgtatgttatatttattcatagcataaagattacttacaagagattagatgttaaacttacctcttcttaaaaaaatcgatgatgtagaattgagaaatg

SEQ ID NO: 102395 - DNA, 624 bp, Cannabis sativa
ttgttagtaaatctaagatcctggtaaaataattccaatagtcgactaatagtattttggccaaaaatattttaatattgctcaaaattgtacgattcaagatatttcgaaaagttaaaagggagatctagaacttttatgttttgactttctctaaaatctgattagaaaatagtcgaatttaggcttgaagtttcatctttattttcttgcacaattcgctattttatagatcatctttttgtgagatttgaccaatttatacattccaagtgtcaaaatctgaaattaaagaaaataagtataattctatttcaaaaagtgacaataaagatgaaaattaactctaaaaataacgtaaataataggctaaaaatagcctaacaaattctctcagcctaaattcttgactaaaaactaaaaacagcacaacctaaatgaagcaagtcaatcaaccgaaaacatgagaaattttcaagtaagataaataacatggttatgaacaaaatttcacctataataattcaattttttagttcaattacactcttgattcacctcaatcttttattaagttcatggaaccataattagcacttaactaacagttgaaacaatttatgc

SEQ ID NO: 102396 - DNA, 618 bp, Cannabis sativa
atgtaaaatttgcatcacaataaatgctagaaggtgctaggcactggtacccaatatcaatgttttaattttatgtgggtaaatatcattttagatcttgtcttttgtaaaaattatcaattagaccatctattttgttaaatgacaaaatggaccatgtgttttttaaaattgtacaaatatgaccctgaactgattttttgtcaaactaaaacttaacaataatctgatttagagatgttatgaaaaaattggttacattttctgtgtctgtacgtgttagaaattatcttaaagttggttatattaaaaaaataaattattaaaaattgagttcaaggttctatttttaccattttggaaaatatagagtctattttgtcatttaacaacacagaaggtctaattgtcaacttttgtaaaacacaagatccaaagtagtatttatctattttatacttacttttgtattattattattttatattttttaaataaattattgagtgaccattaaatgatattaaatttaaattatacattaaaatttaaaattatataataaaatacaatagtaaaaaattaatttaaaattgtcacaaaattattgttttgtac

SEQ ID NO: 102397 - DNA, 608 bp, Cannabis sativa
agcattacaattccaacttttggagttcaacccaagtattatatttcttgcagaaagtaaactgacgaggtactaagttgaacaattatgttctcagctttagttcggtaagaatttatggatagtggatcatattggtttgagtagcgaattattattgttatggaaagatgaattgacagtgagggtggattttaattccttagggcatatcgtggccaaaatagcagggaaggagtttttgccttggaccttgacttgtttttatggccatccgcatatggcgtaacgtaattttttatgggaactattgaggaagataaaagaagaggtgcggggaccctgactttgtgtgggtgattttaatgagagagttaattgcagcaaaatttttaaaactttcacttcgctagcaattacccttcaaaacccattttagcagcaaaactcccaaaatctgtgttctattaacagtttgtcatttctatctattttataggtgttaagtgccatgttgcacattctatgtgtacacagtgtgttgtttatgtggacacagtgtacacatgatacacttttattgatccacataaataattattttaaaa

SEQ ID NO: 102398 - DNA, 500 bp, Cannabis sativa
tgcacagatggactaacaagaacacaacatgaatcaagaataatgaaaaaaactaattcaagagtaataaaaataatacacaaacataacgaggttgagtcacaaattttggataaaattttgatctaatccccacatagaagtagccactactacaaaatacaaaatagacaattcccgtcgatcaaaatattaattttttttttagaattgacgggtaaaaatttaagtgtgtgttttaaaccgacagaaaaaaaatttcttgcaaattaataacaatagaaaattattcccatcaattttagagggtagcaatttttaaattctttattttaaaaaaaaaaaaaatttctcgtcgattttaaaagatcacttaagacccattaatttttttattattattttaaaaaagctcagcccattaatattgaaaccctacatactcatccctctctcctttttttcttatcaactgcacacaccaactccccccccccccc

SEQ ID NO: 102399 - DNA, 713 bp, Cannabis sativa
ataattattgtgtaatcatataattaaacaaaaaaaataataataactactatgaattacacttaattccaattacacattcactttctagagctctaagagagtcaattatatatgtctcaacattctattagctcaaatagctataggtggatgtatgtgttggagatcctgggttcgaattctacaacatgattgtaatatataaacgtttaaataaataaaaaaaaaaaacattgtattttatgaatttcctttttccctagtgtacagatacaaattataatgagttgccatgttgccacatgatcatttaacaattttattccttaacatggctttcttcaaagcaacagatacattaatctttaaaaggaaagaagttttttttatgataattgtacattaactacaattcatttattcatagagttatttagattcaaattttgtgatatgaaatttaagttttccgttggtagttattacattatttattactaataattctttattcctcaacccaatcgagagactataatgaagtgatattgaaaactagcgtgacttttaagtccatctactatacaaaattattccttaattattgtcgagggatgcaataaaacttggttccaatttcagtaagattaaaggttattgttaatttttgaaatttacttttaatatatttattataaaaatttctttta

SEQ ID NO: 102400 - DNA, 647 bp, Cannabis sativa
ttcttgcttttagagcttccagaaagcgtgaccgtactctccttgagtgtttaccttgtccttatgattgtatccttgtctcttcactctcatcttgcttggagaaacttcactaagttttacaatgtcatggtcgaatgacttcccgagggtgcatgccgagtgacttctcaagagtgcatgtcgagtgacattcatggatgcatgccgagtgacatttcacaatgtcattatcgagtgacattgtgaatgcccttgctgagtgacatcatgaatgtccttgtagagtgatattcatggatgcgtgccaagttacatttcacaatgtcattctcgagtgacattgtgaattcccttgctgagtaaaattgtgaatgcttttgtcgagtgacattcatggatatgtgtgtcgagtgacatttcataatgtcattgccaagtgacattgtgaatgcccttgccgagtgatatcatgaatgtccttaccaagtgacattcatggatgcatgttgagtgacattttacaatgtcattatcgagtgacattttgaatgcccttgacgaatgacatcatgaatgtctttcttgggtgacattcatggatgcgtgctgagtgacatttcacaatgtcattgctgagtgacatt

SEQ ID NO: 102401 - DNA, 599 bp, Cannabis sativa
actaatatcaaaggacccttggtttaataaaaattcctgcatggttacctttttttaaaaaaataacacatgtcatcacttttatcaaaatgtataaacaaagtagagatgccacaaataaccacaaaaaaacaagcatcaaatttatattacaccatccactagaccccaagctcttaataccaataatagaaaatgacatcctaaaccgtagtcgcacctgataaccactctaatataagggctcaaatttaactcactctctgtacagattctaggtctttcacctataggtgagtgcacacctgatctacctatgatgacatagagactaggtcgtgaagcaacaatatgcaccgaacatgatcaaaatagctctcatcagtataaccaaaataggaaaacaataagaataataaaagaacatattctttttattttctaaaaaattcggcaacataacgtctttattttgaataaacctaaaaatcataatatgcttaaatatttgtatataaatatatttggcattccgtgcccgagaacagtccagaaaaatatgcagattaagttttcaatttttcaaacaatttgtaaat

SEQ ID NO: 102402 - DNA, 783 bp, Cannabis sativa
tttctggtgtattctccctcaaacgcgaccttctcgccctttcttactctcttgacctttttttcaacttgatttggtgagaaataagcttgaattgaagcttgattgttgagaaaattgtgttggaagcttgaagcttgattgtgcaaggaattgaggtagtttttacagttattaattttgaattccttgttgaaattatttatgaaaatagcatgttaatgtgttggtgttcttgagcttgcatgttttgtgaggtggggttggttttggtgattttgaatatgagagtgttggttgttgttatgttttatgctgttgagcttggattatgattatagggtattttctagcttggagtaatgtgttcttaagaggtttttgctgctggaaatttttttgatttgttggagatgaagctcttgttcaacaacttgaagttgcttagttaagcatgaaatttgtgctgtttgagcaatttgaaattttgagattattgctggaaattagtgtttgaaacatgaattttaattccctagtgaaattgctagcaactttatttgttaatttgagagtttgatcaagatttgggatgaatttgaagtgtttaggttgctgaaattcgtgtttttcattgctgatttctaggttttcaacccaagtgtcgcggcatggtctgagcatgttgcggcccatctcttgttggtgaaacctgggatttgtcccaggtgccacggtatgattggggcatgccgcggcccgccattgtgtttttggccaatt

SEQ ID NO: 102403 - DNA, 508 bp, Cannabis sativa
tgaaactgaaaaggtttaacgaaaatcacaatttgacaataccgaaaacacaaaccattcaatataaacgtaaaacgaaacgtacctgaaaaatcaagcgacttactgggcaaagtgcaagctccaacactcatgtctcttccgtcgtcatcttcgacagccgacactcatctttctctcttctccacgacgttgtttggaatgttacctacactcatcccaacacttcccaatacgaaaagtcttagacttggtcctcccacaccgacgtttcggcctgtgactttcggaaactcacctgatctgacgcttcgaatctcctaaacgccaacgggtcatggattgtagtcaccggggactcacagtcacgattctttgctctatcacttctgggtttggcaatgaaaccccaagctgttgagtcagtgaaaaacgatctcttcaggaggcacaatgattatcggactgtggttgatgagattgggatgagattggatttcgtatgggc

SEQ ID NO: 102404 - DNA, 553 bp, Cannabis sativa
aatagtgattttacagtggcaattggtggaattaataagcttcacatgaattttagtcttctgcctattttattagatgtctattctttattagctgctgttggtggtggttcttgcatcgtcgttccgcgttcggcgaatggtgttgcccacacactgtcaacctctattgatagtttaggaaattatgtttggacggatgcttgtccacgatttttgagtttttctgtaacaacggatttagttcaatgaattatgtctttttttcaaaaaataaaataaaatgctctcatattaattcaaagagttaccctacaataaacattaaaaaaggtaatagttagttcctctaagcgatactcatttggtatttggtatttaccgaaatagtatattttaagtattcacatctataatataatatctaataatctcttatatttaccatttagtttcccattttttttgaaaaaaaaaaattaaaaaatctcttttttttttctctttcttttttgtacttcctcattcaaacaccattttctttgtctaactc

SEQ ID NO: 102405 - DNA, 795 bp, Cannabis sativa
taattttttttacaaaaaaaaatagtttcttatataattatccctatttaaagttcaaagtccaaaaaaatttatttaaaatctctttgttttactatctcatttattttctcccttttactattttcttaaagaaaatcaagctttaaagttacataaaaaaaacttgttttcggtccgactttcatttgtttgcacttattaacccactgaatatgattcgttcagatttatgatcataagactatttgttttttttttttctcctttgaactcttatcacttcttaatgcatttgagcgaataaataagacatgcagtgatgtctgaaattttttaatacatatgtatattactagatgaaagttacgagccacgtaaatattagttttattaaaatactagtagttttggttaaggattcggtaactaattgtaaatcgttttttaaacgatttattttataaaagtaaacttgttaagaatgtcgtatataaacctataatatacacattgttattaataataaaacagtaagtttatctcaatatatttatactcatatagtaattatcttccctctgatcatctggtactttcggttgtgcaagcaaatcttcttccttcctctattattaacaaaaacaaaacgttagattatggctggctaaatgaaattgaacttcaaatatatggtttttttttttttttttttgctaattaagtttagttcatgtatacaattcataaaaagtagatttttattggcaaattattaagtgattaaaaaggaaa

SEQ ID NO: 102406 - DNA, 790 bp, Cannabis sativa
actctacgtgcaaactactgtcttacctgttatctcacaataatagagattccaaacccctgggtgctactgatcaggtgcctgtaatcctaggcacataatttgggattttcaaaaatagggttaatccctaattccactttcacaaaatataaagttggcattgaaaatacatataatcataaagagctcggaatgagctttccaacaatataaagaacgtcaaaaacggagtcccgagtcaaaagttatggccaaaacaaaatcaggaagaagattgctctctgctaggttttatggcggcggcgaccataaatctggccgcggccactgggttcgaaaaacccaaaaaaccagattttaaggtttaaaaatgctcacttttccatatattagaaccttaatcaaaccatacccaaaattaacttcttacagataaaaatcatcacagtagagagcaaacaacatcaacaacaactctcaaaattcagattacacaaataaccaaaaatcatgctttaacttagtaaagttcaagctcttgaactagaacttcaaaaccatgcaccccattaaatttccagtggcagcataccaattataacatgaaatcaaacctagaaaataccctaaaaatccatccaaagctccacaacatataacacaacaagatcatggaatttacactttaatctatcaaaaacattataattattccaaacatgcataaacaagaacattacaattaattcatgctttttccactatcattttcagcaaggatttcaat

SEQ ID NO: 102407 - DNA, 660 bp, Cannabis sativa
taaattagtgacaatttctatttaaatattatatttgagtcacatttaattaactttttattgtcatcactaaaagtcacatttagtcataaaaaaatttatgtacgtagtgattaaaaaattatcactaaaaatagctatttttatagtgtataacactttatatataaacgtgttttcttttgattagttagcgatacgttctaaaaattattatatttaattaaaaactcaatacttaattaaataatagtgatatcacattaaaaaaaaaaaaaaatactatatacaccctcctcatttatatgtaataaaagtcttcaattgatttgttggacctaactttctaagttttcactaagaaatatatgtatgacatatcaatattgtgagttagacttttgtactaatataacatagtaaaccgacaacattattaattaagccttaagaaacaacaatgatcaattaaaaattagcgctcacttgaatgaataaaggcaaaaatactaaagtaagctttaaaattaaccatactcaacatatgagttcatagcctctcaagccttaagaaaattagctcatgttcaacacaaaaattacaatccaaattcgaaattgttcatccatggttgctgccctttttacaacttatcaagt

SEQ ID NO: 102408 - DNA, 512 bp, Cannabis sativa
agtaattaaatggcggccagtgatatgtaactaaatgctagtcaaaataaatttatatttataagccaaaccgttaaacatataaatataatatgatcaactttcgaaaaaaggaagaaagtaatctataattaatatctcattattaatttaaataataataaattaaattataatacaatttaattatatattttaaatatatgaaatttaatctaattttaaatttatttttatatctttcttatattaaatgtgactaacgatttttttaattttttcgttagttataacggtaaaaatttatgtaaaaaaataattatataattttgttgacatttttaaattaaatttaaatatttaatattatttcatcattacaaaaatcttacttttagtcagcataaaatttgtaactaaaagtaaaaaggatataactaattataaattatcatttttattttgtaactaaaaggttcgtgactaaaaataagggctttttcatttttaca

SEQ ID NO: 102409 - DNA, 789 bp, Cannabis sativa
aaattagtggagggtctaaattttgatattggagattttattaggggcaaaaagtgaaatttccctttacattttgagaacaaaataatgtatacaagtttaatataatatgatgtttattttgaaaagaatgtcacatggtttatgaaccattttaagtgctatatttgtatgtgtaagtacaatattttttttctttatttttatttctcacaaaattagtatgtggttgaataaaatttttgtaattaattcaatcttggctaattagttatattttttttttattttattgttttaaatattacaaattaaataaaaaaatattatgacaaatcatagaaatatatttttcaatttttttcaaaattttaaaattaaaattaaaataaaaaaaaaaaaaaaaaagaatttattatgtatttttaacaaataaaaatattctattagctattttttttataaatattgtaattatggagaaaaaaattcaatatctatatagaaaatttttatagtaggtaccattgttttgttcttgtagcatagtgatattttcttgaccattgataaggatgctttttaaaagtataagataattattgtataacttaatgcattaaatcaaatatcttgatactaaaaaaactttacaaatataaaaaataaagtcataataatttataatttttataattttaatttttgataagatgttagggtatataaaaattattatgtaatataatattataatttagagaaagaaaatagagaagagatgagaat

SEQ ID NO: 102410 - DNA, 600 bp, Cannabis sativa
ggggcgggccacggccccaaaagggctgggctggggcccgtgttggagtttcattagatgtcttcgtttcgacggtgatttttttgctgcatcgactaataatattttagtcataactctctcgatattgctcagaattggacgattcaagatgttacggaaagataaaagagagatctagaacttttatgttttgatctttttcaaaatctaatcaaaagatagttcaattcaggcttgaactttcagttttattttttacataattttctctattttaaatatcatcattttgtgggatatttttatcttttttcccatctttttcctctgatatttttcaaatcttattttattttaaatctgtaaaaataaaaaataacaagcgtaaaaatgcttcaaatatgattaaaactcaattaaaaatatattaaacttaatcaaaaattaatattaaaaataacctaacagctcgttgagtattatcatcatgttatggaatttttcttatgctgtttatggatgtcatagcatggttggtgataggaggctctttaagatgtcgttgcgtggtgaaaggggagacatagtcgagaccat

SEQ ID NO: 102411 - DNA, 749 bp, Cannabis sativa
tcttccgatctataaaaagggtatagagtgtaatttcctctaacacaaaaacaccctaagtttgagttaccacttagattattctcaatgaaggtcaattatgaaaattataacgtcctacttgtttaatcgcgctacaatattttcaaaattactgtaccaacatttactaatcaaaaggttttaaggaaaaaatgtgatttatttaaacttttaaaaataaaaaattttactttaataaacatatttattacaatttttgggaacctttgtttaaactttttaaaaaacataatttgcaaaaggtgtcgctcaacgattacaaaatataagtctatgtcgtctcgaagaactagacccttcaggtctaaacatctcgatatgtacaatcaccagcgagcaccagactcactgttgctcaacttttgttttgtctttacctacacaagaaattatatctatgagtctacagactcggtaagaaaagtataaaacatgtaaacatacaatttatctcatgacccaggggcccatacacctagttacaagtttgactcgcgtccaacacgtataatgagtcttgaacgtttttgacgatagtacgccctctgtaccacatgcactaagtatctttctaacactagtgttagtgttagtagggttatttaaactatgattactactgatcgttataccatataaactatgtacgcatcaagtaccaatgttggtaacgctatgtcatacct

SEQ ID NO: 102412 - DNA, 754 bp, Cannabis sativa
aaaaaaaaaaaaaaaggttttaaagttaatctgtgtagtgtaaggtaatgtaataatatatatttgtttattttgtattggtaaatgaaaaaggtgtttaagtaaaaaaggaaaatgagtgtaaaaagtaatggattgtattcaaagaaaaaaaaaagctaaagatattgaatattgtgccaaatcatgtattattatttgaaaaataattaatttttttaaaaaaataatgaaattttattaatagtaattagtttttttgacacggtaatagtaattagttaaatcaagatatgttttctgaggaaaattaaaattaaaataacaagccaattgttttccacaaaataaattaaataaaaaaaattacaacattacagtaaaaatatttttattcagttacttcaaccacttaaaaaatacaacactaaaaattgttgttcatttaactctttaacttgagcatttaattattgtacaatgtgcttaactgtactactaacaatcttttcactggtagaaaatttattattcctaaccaccaacaataatttgatgatgagccatcgaatagcaaataagacaaaccaacaaaaaaactaaaaaaaaaattatatcacaaaaataagatcaattgcaataatctaaataaaagacactcaaaattatattacatagacaaaactattcgtgatttaatcgcagtagcaaaaccacagatctcataccaagtcatgcctaaatccaaaaaaaa

SEQ ID NO: 102413 - DNA, 653 bp, Cannabis sativa
ttaaatcaaaacaaacaaatcaagaacaaaaaaccagcaaacacataaaccaaaaaaatataacacagatgaatttaaatggatgtcagacacaataacacagatttatactggttccgatcctaattaagttcaatgtgaacttagtcatactcttgtttgaaagcattgccaccaatctttattgataataagaataagagatatcaatctcaaaagctacaagaaaataatcacagcaagttatccatggtgtaatccctcaacactcatcaactcactaacccgagccacataatcaacactgttgctcaatacaatttcccaatcccagccctctctttctcagatatctctttccatttctcactctaacttctctctttttctatattgtgtctctctctcttttcttgtgtttgacttcacttctcttcttatatccttcttgatagttaagttaattaaacactaactaactaatcgaatcttggttgttggaggttaaggaataaaaccacataaatacaagagaatgatatagctgcatcttattaaatcataagaagcaaagatgaaaactccaatattctttaatcaaaactcatacaactaaaactctagttttctaattcaaccaaaatttgctcata

SEQ ID NO: 102414 - DNA, 872 bp, Cannabis sativa
ttgtcgttcacaaaattcttattgcttagtttccatttttcaaacatatattagctcatattttgcaatttatgtcacttgagtttatgtcaaacagatctagtgggaccatttcatccacaaataatagactttgggatgcttagttactcaaaataagtctaaacttatgccacttaattaggggcggatgtaaatattgggcgaggtgggggtgtaaatttaaccctgataggaattttccgcctaaatggggaatggagtaaagatggggacaattttttatctccatataataaacggagcgggaacccctttaactttatacttattttatattattattattttttactattacatgtatatttttatatatttttgtaatttattagtaaattttcaaaatattttcgttttagttaatattgtatattttaaattattaacatctataaaaaatttcaagtgttatataatttatcttttttatttataattttattttatctaaataaatgggtctcccgtactatcccaacaggaattcattgcccctttcccgatagggaatatataaggatgagtattaaaatagttaatgcgaatagaaatagagggagcactcctcacctattagagcaactccaatgcaagcattctaaaaaataactaacaatttttacatcattttaaaatattatattttattttttctatcattcacattatttttgactattttactctcatgctaagcaattttaaaagtcataagaatagactcacactctattatttaatatattattaaattacttttagtattttaaatattatattaatacatttttatagaaaaattataaaaa

SEQ ID NO: 102415 - DNA, 843 bp, Cannabis sativa
aaaggtccctgttagtgagcctaatggtcgtgaaagcatctttacgtaacagattcatggagcttccattatccaccagtatcctagccacagatttattggcaatgggagtttctatgactagagggtcatggtgagggaaacgcagtgacttcgcgtcttcttccgttaaagtaatgggttgatccatgagcctgggcctctacgtcgtgagttgagtgacctcccatacttcgtcatgctttagggctcccacatagcgctttaacttgttcctagtggttcctccaatgtgaggcccaccagagatcatggcgactctcccatttggccggggtggcagtccgagtgtctgttgtggaggtaccccttcgggaggtacttgacccttgagcgtaccctcgacccctccctaaggtatagggcctcccgcttgggccgggttcaaatgtggtggtctatttttgatccactcgtacaagtgacaaaatcggattagattttcattctcatccttcaagtttttacactcgtttatggtgtggccaatgtcattgtgatagtcgcacctcttgttggggtctctccgggagctatccctatattagggtggaggcttccaataatgagtattttgatgggtggcaaagtacatacgttcctgagaatctattagttcagtgtactgtgtgtattgtggggtgtacccccttcgctgctttttgtcctcaatccgcgtgctgcctttcaaagatctcttgctccgagagctttgttgggctttggccatactagcagctagtgcgaattgagacagacgttggacgcttagccaaaaggggt

SEQ ID NO: 102416 - DNA, 687 bp, Cannabis sativa
ttggtaccttgtattttttttttccaaattcttctaaattatttttgggtatgcttcgattctcctttttttgtgttgttatcaaattatctacacaatataattcaaattattacttttgggttgtttttatgtattttcgaattaaaagaggtagaaatatatgttttcttcctttttttctggtttacctttttatttttggctttgtctgggttaatcattttgttgttgagatttactttgtgaccttgttattacacagctttgatgttttttttagttgaaatcgtgcttcagttgagaagaaaaatggaggagagaatgctttggtgtggctcggaatgaaggaggaagaagatgcagactgttcagtctatatttttgaaaaaaaaaatactttgaaatttcttttttttgtttaattttccttttcaagctaaaaatgtaaaatttaagccttaaatatccattatagaaaaaagtcctaaaaaaattattaaattttttcttatcatgcattaaaatagtctttcctttcaccaaaataaagtagtcattccaccaaaatggtagaacgccattatattagaatgacattccaatactttaatggcgcgtttactaaattgtaattggaattagaataatcaatgagagaaatgtatcggtttaaaatagaaaata

SEQ ID NO: 102417 - DNA, 847 bp, Cannabis sativa
aagccccttatgcgaccaataccactttccaactccaacgggtggcagtggcctcccgttagggtttcagacgtcgaaatgaggtttcaaggtcccaagacccccaaaatatgactatcaaaaaccaagtcaaaatataccctcagcagtccgagaacatgcatagccgaacactaccatttggcatgccagtggtcgcaattggtacaagatagcataaactgtcttcaataaattcggcataactctcaatttttatccaaatgacctatataacttgcattggaaagataatttcaagacagatctaaatgtacctcgtagacatagccaaattctgaagttatcggatccacaatttgctcacgaggtagtatattttactcgagaattgagtaacgtggttaagtaaagggtattggaagacactgccacaacccatgtggcattgtatgcgagcattgacattctaaaaagcatgttttcagtactcatcactaatatcatgaattccaagcctagatgtgacatctcatgttattccattttaaattggtgcatcatcaaccgaaaataacaactttcccaatatttgtggaattttggcttagaaacaaagaaatttttataaatatttattttcttataattttttattatttattgattaaaaaagagaatatacaagatttgttagtgagacaccccaatatgtggaaaatcactaacaaatcctaaagcctatataaggagaagtacgaggctaaaataagaaacttttcttagaccttcttttagactctctatctctcttctgaacctactctttgaaactcacttgacactt

SEQ ID NO: 102418 - DNA, 706 bp, Cannabis sativa
ttgaagctttgaacttcaagcttgagcatatgtgtgtaaccttggtagttgatgtttgttttatttttgtttgttgttttgatttttgagcttggtgtgatgctcaaatgaataacaatgttagattggtttggttttagttgaaaaattggaatttgtatggttttgtttgagttttgggtatgttttggttgaaattcgaatatatgaaaaagttggcatttttagaccttaaaactgggatttttgggttttcagaacccagtggccgcggccgaatttatggttgccgcggccaaaacctagcagagagccatcccattttctcgattttattttggccataacttttgactcgggactccgttgtagacgttctttatatcattagaaagcacgtttcgagctctatatgttaatttgtaaatagaattctaattatgtgataactaaaagttaattttgggattaaccctatttgtgaaatctcgggaatgtttgactaggactaccaacgcttgcttaggaacacccagggatttgaaatctccacatacttcggataccaggtaagacaatagttagcacgtagagttaagcgcggtggtgctcatgtttaatattataattgtgattaattgagaaccgagattagggttattaccttaaagtgagcagttgtttggcctagggttattaccctagt

SEQ ID NO: 102419 - DNA, 802 bp, Cannabis sativa
gacacaatatgagagtgattacaacgatagtaacaaacagtactaggccacaaacaagagcaataaccaaaataaagacattgcttattttgtttctttgccttgtgcaaggcttaagtccagtagcttttccacacaacccgagatttccattataatcactttttgaagcattttgaaaaatggctccaattgggatcggacccgtcaagtggttgtaagaaaaatcaatgtagtgtatgcttattaggttggaaaaagattgtggaatactacctgtgaggtggttatgagagatgttgagaacttccagcattgtaagctttgacaggcttgatggtatctctccaacaagtaaattgctgctaagatccaatacataacgcatagactccaaatttccaagctctggtggtatttcactagatagtatattatgactgaggtttaagcttgacaatccttcacaattacctagccaatttggtatcttacctgataaattgtttgtcgacaaatcaagatccactagcccactcaagtctgataggcttgtaggaatttcccctatcagatgattattgctgagattaagttggtataaaagtttaagatttcccaattgagttggaatttccccgctcaacatgttggactctaggctcaaaactttcagctttgtcaaactcccgagttctggagggatcttaccagagattttattttgacccatctgcaatctggtgagattctgacattgtccccacgtacttgatatatggccgatgaattggttgttgtt

SEQ ID NO: 102420 - DNA, 779 bp, Cannabis sativa
ttaatatataattttatttattaaactagttttacttatatcctttttatttaaactcacaattattcattgctttattttattataatttgatgcatttaaatattatatacacacattcataaaatacgagctttttaatataaatagcacaaacaaattgaacaaatttaaaatagttttattttacattatttatttaaccaagaaagttttattcctaaattatatgatatttgatacaatactctaattttttttttaatattcaattaattatagaaaatttaaaaacttattttttttttaaaaaaaaaaaatgaagttcggcttgatcggtttaaaccgaccaaaccgtgaattaaaacggtcaatttttttttacatttgtataatggtcagtcgatttttagattataaccatgaaaactgaaaactcgattttagatttttttttgtataaaaaaccgaccaaaccgaccgttgttcacccctagtaagagagaataatggggaagtgagattaaagtgaaaggaatgagtattaaatatttagagtatcatatttttatcatcgattttaattaaaaaaaaaaagaaatatgtcactaaagtgacaacacaagtcacatcatacttttatatcatttaaaatctatatacatatataaaggaagcttttgaagaggtgaggtggcatcttctcctttcattcttataatttctctaatttggaatttttctaaactttttagttgaaaatactaataaaaagaaaa

SEQ ID NO: 102421 - DNA, 556 bp, Cannabis sativa
actctagtttgagtattgaaggtctaattctcattatttggcaaaggagtttagtccaagtctcggtgccctttgagcatcctcaacttgtacgttgtaagtagaaaatttctagtttaaattttgaattgtacgttaataagttgatattttatcttataaatatgaccgatttatgtattaatattcgtaaattgattatttaaattactgattcgtgtgattataatttgttaagctattttaaagactaattatgcatttggagtgttatttgaaaggattttagtatattttggtaaaaaataatggaagctagcgagctcagacaaaacggaacgtaattgtgatttttgacgaccttagaagcaaaattagacttggagctcaacattaaagttgtagatttcgttctcagatttttcagactatcttgaatcatccaagttcgagttgtattaaagaagttatggccaaaatactaatataagcacgcaacagaaatttttcagcatgaggttcttgtcgcaatgagcgtgttgtggccgcagggagc

SEQ ID NO: 102422 - DNA, 700 bp, Cannabis sativa
gccctaaataaataattaatattcaatttaaaggatttttattaaataaagataaatataattagtaacaaacacagtaattttctcctttttattcattttttttactagaatcatttatggtaagtatgatggatttccttttaatttttatatagtactatatttggtttttttttttagaaaaaattaatgtgggacttgattttgtgtctttcattttttgtaatgcatttttaagtcatatacatacgactaatttggcactatatattgtggtttttttagtatatcataatagtattttacaatcaattaaataattaatagcgtaaaggtctaagttagaacccatggttttttcttttttctcatctcttccctcaccattagtggctttatatattgtggtatttaaataatatcaacagcaattcaataaatattgtgtttatttatattgtttataaaattttgggttttttatcctatattaaccatattaaaatttaggatagaaagtattttaggccaaaatatgagagatacctatcaagtatacatttatacttagtttctatttttttttgtttatcaattccttaaatctcaaatgaagattgatatgatatccttgtttggtagcgtcattcaagattgtaaaatgatgcttgcatctcttaataatgttgttgtgtct

SEQ ID NO: 102423 - DNA, 683 bp, Cannabis sativa
aaaacaacatcaaaataatatacacaaataataaaaaaaaaattataacaaaatatcaagagtataacataaaaatagataaaaataccgtattttatgtaaataaaatctaaaaacgtaaaaattttaaaaatttcgtacaggccatattgttataacttttttattatttttgtattttcttaaaattattccttaaataaaaaatactaagcatattatatatataagtaattcattattataaggcccatagatggtgtaagcgattaaaataatctaaggtgtaagaaaataatttcactagaagcgtgaactgaaatttacatgcttgtcggaaattctgaggagactaggggtggactattttatagtaacaaggataataaagtgtttgtttctacaaatgccacattccttgaagaagactatattaagaacttcaagccgcaaagtaaagtagtgttagaggaaatgctttcagaaataactccaaccaatgtttcatcatcttctacttaagtataggataatctcactcccttgcttacaccaatgcaagtcgatacaaccgagaaatctaccactgatgttcctatatattcagaaggtcatggctcctcatcgtagtgggagggtttctacaaaaccagctcgttatggcttggatggtaaaatcaata

SEQ ID NO: 102424 - DNA, 556 bp, Cannabis sativa
atcgtattttcagtgagagtactgctcctgctgatcttttatctattgtaatggttgaaagttcattctaataaagtttaccattttccttcaaaaaaaaaaaatcttaaacataaaaataagttattttttcataaagcaaaactaattggttaaaaaaagaaagatttgtgaaaaaaaaaaaagccataccacataagaaattttaacaaatgtattataaaattaaatatcaaaaatcagttatatcaaacaactaattaagtatctgacagtgagagtagcatctttcatgatttacataatgccacattcaagagccatgtcattaagctgaatttattctcttgcacacataacagatcaaatactccttcacaactaccaattgacgcacatagtctccatcatgtgttccacttcaccagaaattgaagctattttttctacttatttgcccactaattttaccatatttggctcgtaatttctctatagagagccaaattaagtttaacggcgtccaattttttagtagaaaaaaatacactttgtt

SEQ ID NO: 102425 - DNA, 862 bp, Cannabis sativa
gggcacaaaacccaacatcttcaaaccaaaaggcatgactttataacaataaagtcccgtgttcattacgaaacttgtaagctcttgactagggacatgcattttgatctggttctatccagaatatgcatccatgaatgtcattagctcgtgtccagcagctgcatccaccaactggtcgatacttggtagtgaaaagagatccttttgacatgctttatttaaattgaaaagtcaatacaagttctccaagttccatttggttttgggacaaggacaggattagatatctacgaggggtagaatgcctcgtgtatgaagtcgttagtcagtaacttctccgcttcttctttgagtgccccttgtctttcagaatctagggcttgtcttttttgtctctttgctgggtaatttgggtcgatattcaagtggtggcaaataactttacggtcaattcctatcatatctgaatggctccaggcgaactgatcctggtttgccttcagaaaacttattagctgctattttagtttttcatccagttttttcccaatgaatacacactttgtgggattttctagatctaaaataactttcttcaattcctttattggtttcaactgattcttttcatcttgaattcgaggatctagatcctcatcccgcttctcgccttcctccgttatgattgccattaactggtggccagcctttttattttgtagctctatgcgatagcattcacaagccaatagttggtcacctcgcactacacctacacctattggtgtctgaaaacttcaaagataggtgtttaattgaactaactgttggaatatgttttacaaggatctatatttac

SEQ ID NO: 102426 - DNA, 588 bp, Cannabis sativa
aactccctcgccgcaacatgcttccgacacatttttaaaacctatgtacgtactcaaaaatatcaaacaattagttatatataattaattgacttaccttacatatatagactcttatattatatatagactactatatatatagatgatgcattgtatgtgatattatcttatattatatatagactactatatatatagatgatgcattgtatgtgatattataattattatctgacttaattgattaacattattattattttctagagtattatatatactcaaaggaattttctcaatagtcctctaaggcagctcaaaaactttgtatagtataataagttttttgcaaacttaattgtaaatcaaccaatgtatatgaattaagtagggtgtagctatatattgctctaatcttcactatatcgtctaatactttagatttatacacatgcattatttaattaactaaccatgttaattttgaagaaatgtatgattcagttggctaacggttggtcagtgtgtagtttacaaaaattactttaccaatcaaatagagccaagtggcttgtgatattaatt

SEQ ID NO: 102427 - DNA, 618 bp, Cannabis sativa
tttttgggatatccccaaggaattaaaggatataagctattcgacatcaataacaaacaagtgtttgtttctcgaaatgtggtttttcatgaaaggatttttcctttccaaaaacttaacaccgaggacgccaacatagacccttttatccaaactgttattccaaattctatgatttctaacacacatatttctgagtatcctgcagacaatagtgctattataagcacacctactccagaaaaacatactgctgtcaacgaagaacacatacagcaggaaaacacaaacacagatgcaccagaagcacctgaaactcaccctcaacagccatctcaagaaggcccaagaagatcaaatcggcaacccaaaccaccaagctacctaagagattttgagtgttactcactcatacaagacaactcttctacacctcataatattgacaagtttatctcttactcaaacttatctgaatctcacaaatcttttatttttgcagtctcttctgtcaaagaaccaaggacatattatgaggccatacaaactttagcttggttgcaagccatgcaatgtgaactaaaagctctttcggataataaaacttggaccattgtc

SEQ ID NO: 102428 - DNA, 522 bp, Cannabis sativa
attttttttttattattatgaatacaccttaactataaatggaaaaataataagcaaatagaataaaaaatatgtcatcaaaaataaaagataaaaacccatcttaccaatagaatatattcctctcacaagttacaaatttggacggtgcaggatttttttttgttttataattgttattttctattttagatttattggtttgtatttttttttttctaatatatatgataagtgcattttatgatttgttttataatgtttttgatgcataatttgagttaacatatatgtccccaaaggttataacattttgttgttggttttttgaacaaacattttgttgttaggtaatctagtttttgaaaatttttatatatatacactttccatacaaatatatttcagactctaaaattttgatattaaaaaaatttgattatatttatgtatttttctcttgaatgtctacacatttaatataatgcttaattgatgtcattgattttaaaattatacata

SEQ ID NO: 102429 - DNA, 946 bp, Cannabis sativa
tttttaaatgtcacattttttttttacagttttaaaaaattactaccgtataatacataaattattataaattcttttaaaaaaatttaataaatacacatatcaaacatggtcaatatatactatatatatatatatacaattgtaatatttttatacatataaatatacataagtactataatataggaatttttataccacatactgaaattttcaatttttttttactttttcactgtgaagcgatttttttttttcaaatatattgtattttttttcaaaaatatcgtataagttttatactgtgtactgtgttaaatttttattattgtcccactgttgttttaattgttctgttttgttgttttaaggttgttttataaaaatacagtatttttataaaaaaattcgtagtaaaactgtaaatttttgcccaaaatccagtatttttgtaaaaacctctataatatacatactcacaccagataataagactaaacaaaaatcatactactaattaataattctctttgatgaatttgcctaccaaaccaaatgttaaaaataaatctaatgctttaaaaaaataaaacaaaactaattgtcgttcaaaacattacatttagatatatgattatttaaattataattaaatattattatactaataaagtaatataattaaatattaatatttaataataatgatcaaaatatttatttagtgtgatttttttaagacaattagaaatttgttcttctaataattgtatgttgcaattgaattaaaaatttgtactattttaaaaatgaaaaaaaaattataatttttattaatgtaatataatttaaaaaattaattaaaaaatatagggtgattctacaatgcacccccttaaaagggatgtattgatgcacccttaacttatttcggcattcagaa

SEQ ID NO: 102430 - DNA, 621 bp, Cannabis sativa
tccgagttcggtctcgagttcgggtcctaggttagagccctaaaccgggtcttgggtccgagttcgagtccaggtctaggtgtcctattcgagttcgtgtctggtctcgggttcggtcagggtttgggtcccaagcccacgtcctgggtcctagggggtatgggaccggggtccgagtcttgatttaagtttctttttaatatattgaaactgaatcgtattagatccgatctgaaaaaaattaggcggggcggagcggacctgatccaagatccaaatttgaatgtttcaaatcgaaagtgatccattgggtcgaaactccgacctgctccaactaaatagatctttttgacatgcctattacaccttgtgcatgagagcacaaatacaaaaattatgacaaatataggttcatggtatattttgagccaaaattaatgaccctgttgactttggaggttattatacagctttgcattagagcataattttaaaatttaggccaaatataatattgagctatttttcaagctaaatttactataaattttacaccttacattggagatgatcttgaaaatagtacttagctaagtttaattaagagaattctaagtttta

SEQ ID NO: 102431 - DNA, 608 bp, Cannabis sativa
gttttactggtgttttataaaaacacagtatttttgaaaaaatttccgtgtgacagtatttttgtaaaagttaaccaaaattccagtatttttgtaagtttctctaaagaaaagggttgagatgaaaaataatttttaatttagaaattaacttagtaaatatttatttttaaaaaattagtaaaataatcaaatataataaattaatttcttattttttgcccaagtgaacttatccctaatacaagaaagttccgttaaatggcatctgtccaatgttgttcggaatgcaagtatttgattatcatgtcgaagaagtcctcctttcttatgtgcatgtaaaaaaatttcattcaagtcaccaattagcatctaaggatcaagggaagaaacatcacccagtcaattaatcaaaacccgtgtatgtttcttgttattgaattttggaaagccataaataaccaagaagtgccaacgagggccctcttcaaaagacacataacaatcaaaataacttgtattaattgaaagtaaacatacaaggacattgtcttttaataacaacataaccctccttttaaaccaatacgagaaacttttaaactgtt

SEQ ID NO: 102432 - DNA, 710 bp, Cannabis sativa
agaactccataagcttcacataaatcagtaatgacattagctaactaagtcctccactggacgctccttccgccattgtgtcaaagctcctccgaataatatcacccacattcaaattaaaacccttcataatggcatacacatatttcagcctaccaatctaagcatcagaaaaagtgtttactaggccccaactgaccattcaaaaagttcaaccatgcacgagttacttgttttaactcacagcaatacaattgataagtttctccatcatactcatgaaatttcaggaccgggtacccaattatctcagccacatcaacatagtcaatctcttcatcctcctcaataattcagagatgttgctcctcatgtaagaaggttgggagcgaataaaatgcatgaatagcttgtgtcatgactagaacatctttacctatcactttcaccatttcattttacctcccgggccaattagcaatgaactcaaggactaaagtttgattcgccctttctttgacatctacaaattgtgcccaatctcgtctctgaatttggagcctcatggtttcaaacaatgggtgattgggcatggcaaaattactatagtaaatattgcgatctttaatgaatgccctatttttcaaatcaaggtaacgctcttgggcttcaaggcctacaaaccaagctctatctaaagttggccttgt

SEQ ID NO: 102433 - DNA, 1154 bp, Cannabis sativa
  modified_base (544)..(563): a, c, t, g, unknown or other
attacaattaatagtaataaataaaagattaggacatctacataattattaatatttataacaataatcattatcttacatttttttaaccaataaaagcatctttaatagtaaaattttaaaagatacttggtgagatggacttattatgtgataaaatattgagatgctatactattagagaataaataatgtattctagaaatttgcatggatactattgagatactatgttgtagcattgatgctatttatttttttataaaaaaattaagctaaaaagttattatagttaaaaattagaatatatattaaataataatctgtgagatcataattataacatttttaaaaagtgttatacattagagtattttaagaagtaaaaataccaaaaataatgtggaagagagataaaataaaaatattatatttttaaatgatgtgtaaatttgtagcatccttaaagaatactaccattagagatgctctaatagcaagttattaataggcgaaaattctttttttagaattatttaattannnnnnnnnnnnnnnnnnnnataattaattgaatatttaacaatgcctcttttagcaattaatatttataaataatttattttttatataaattcctactataattattttaacagttaagtcatttaattataatatttataataaattttttgttttttttttttacaaaaattagacttctttttacatagattagaattctcttcttgtataataaatttttaaataattaattatttttttacaactataagaactaagtatgagaccttaaagatgaaacctaagaagtatatgttcaaataccattggactatagtaataattctgcctataatgctacaccgttttgttattcagtctttaaatacttttaaatctctaggcaaaattctacatttaatcaaactaatataactttttcttgttcaattttaattaaaaaatagtacgttgtttaaatcattagcacaaactatggttaataatatacataaatctcacaaatttatagaaaagatgattgttatcccaaatttggcactttgacgtggcatcacgagaatggtaacacgtggactccacttagagcatctgctcggaacgat

SEQ ID NO: 102434 - DNA, 775 bp, Cannabis sativa
  modified_base (737)..(750): a, c, t, g, unknown or other
cttaaatatttatataatttttttggtggcgaaaatctttatatatttcattttgttgcacttaaagcaacttcagtgggaatgctttagagaatgtttgatgacatgaataccatgtttgcatgtatacttaccattagagtgaaaaagaatgtcaaatattgatgactaaatcataatacaatattattttaataattttagaggtgcttattattagaatattttaagataaaaaataccaaaagtaaaagagtgataacataaaatattatatttttaggtaatgtggtagcttttgacaactttagagatgctcttaaatccctatgtaaattttttagggataaaagttcctatgtaatcattattagtccttttgttgttacaaattaactattgttacatctaatgtataaggattaaattttttactatcaaatgtgaactatataaagatttttgctgttaaataatctatatattaattgcaacaagataaattataaagtaaactatgtaggaaatttggccgcaaatatccttatattaaattatgttttatattatatttgtgtataatgtaaaattttaatgtattaaaatattatatatatatttaaaaatatatatattatatgtatatgaccaaatataattctttataaaaatacaatagacaatttaatttaatataataaaatacaatacaatataatttagggtaaataccattnnnnnnnnnnnnnnttgcaaaagttacagattggaccct

SEQ ID NO: 102435 - DNA, 512 bp, Cannabis sativa
caaagcatatgacagagtagaatgaaaattcattaagatgatgatgttgaagatgggttttaaggcagaatgggttcatattattatgaagtgcgtttcatctgtatgctactccttccaaattaatggtatcatttatggaaaagtcattccgaatagagggttaagacaaggtgatccattatctccttatcttttcctcatttgtgcaaaaggtctctcggcattaattaagcaggcaaaaaataagaaagaaataattggtctgaaagtggcaagagaagctccctctattagtcatctattcttcgctgacgatagtttactcttcttggcggctaatgagggttcattgcattcaatccaacaaatttttgcagtttattcaaggtgctcaagataggtaaaaaagttggtagtatgggtaattggaattttagttcattattatttcaattaccaaattttaattgctctaaaagtaggataagtaactttatgatctaattttt

SEQ ID NO: 102436 - DNA, 773 bp, Cannabis sativa
gccaggtagcctattagctagacttaactcatgcattgtccaaagtatataatgtgtttcatatctccatgctaagaaaatatgtatcagacttgactcatattctgagctgtgatgatgttaagctcagataaatttattatatgggaaaaaacatcttgtccacattttggactagaaaaaaaaggaagtactatggaatgagacaattccactagttaagaaagtgttgtagagaaaaagcaagatagaaacaacaatttgagagttagaaccataaatacgggggtaatatcccgaactgtttaaataaatttcgaggacaaaaggatggttgtaatatcctgataagcctaatggtaaataattaagtttatatttatattatggattaattaggttataagtgggattatgatcctactaatctattttagcataaaatttaaatttactataagtgagtaaataagtgtaatttataaattacagagatttatatagcatgtgtgaatgtaatatgagctctatatgcaataaaaatatttttatgttcagtgaccccgaagatacgataagtagataaataagcgtaatttgttaattatagagttttatctaaaatatgtggatatagtgtaagttatttataaaataaaaatattttttggtttggcgaccctggagacccgattggagaccaaaaatttcacaacgatattagttagaaatattgatgggattattgaggtaagtcgattttagatatatta

SEQ ID NO: 102437 - DNA, 835 bp, Cannabis sativa
tatatgtgtttaattttcatcgttttaaaaattcatatttaagatgttaaaaacatacttattagtaaatttcggtcttggttaaatataatcctacagtataactaaatgataacttttgataatttagaatgtttaattgtaagtgaagtattttattaggtagaagataaatcattagcatatatgtatgtaggatatatttatttatttatttattttgttgaaatgagaacttcattaaatttagcattctgaatacataatattcagcagagctgctggagcattagacacacagatgctacgttcagataaagaccgggacatcctagcaacatcatgtgctagtcagtttgctgaacgttttacaaaatgaatttggatagaagggatagaagataaaagggtttggcaatcatggacaagaataccaaaaaccgaattaagaggaatactgcttcgaatagcttggacagaaagcagactatcagtctctagctcaatagtgtgccagttatgacttttaatcaagcttacggcttccttgatgccaatgatttctgcaactttgggtgtaaaggttccagaattacagtcagcttcgccatcaataagagtgcccgagttgttccttgcaaccatgtcataaccatatttgttttcactagcaaacgtagcagcatcaacatttatcttgattgtgtttgtatccagtttagtccatagctcagccttgtctccattagtatggaaattaatggaagatagagaaatgttatcctgagctttaatccaatgatcaagagatatccgtgctgaagctaaaacattt

SEQ ID NO: 102438 - DNA, 514 bp, Cannabis sativa
aactgacatagtaataacttttcattaatttttcttttttcttttttaataaatgtcatcatcatttattattaacagttggataaatttagcattaacattagatccttcaaaaaaaaaatgtgttaattttgtagttaccatcaccaaagatttacactattttggtataaagtgatcaaagttagagataattttttttttttttacctaatttgagtgttgatgaatcctaattcacaagtcattgtatttagttgaaaaactttgaagtattacaatgaagtttttataagttgaagaatcctaactttttgtactatagtattctcataataaatcttccttttgcatgaaggtgcaaagtagtatttataattataaactaagaattggatttgggtacacccacaacccgttaggatttttatatcatcttgagctactaacagaataaatacattaaataagtgactataggtccattaactgaggtccagttcatggggcagag

SEQ ID NO: 102439 - DNA, 1061 bp, Cannabis sativa
tttgatgttattgtatttttttttattttaagtttctttttattattttatttctaggttcgaaactggttttcacacttatattttgtttttagaatgatattgctgtgcattgtatgatgttttaattatatttgtagagttttttttttttttttgtatttttgtattttattgtgtgtgtgcgcgcgcgttttccatttagttaactgaaaaaactagtttcaatatttttcatttatgttttgttttcaaaatttcattgttattgtgtgacgaaattgatttttttttgttttcataatattcattgttgttgtaagatgaaactggtttcggtttattttttattttttgtttagatagaatttgattcctccagtaagaatgcaacaaaaaatgttgctaaagattcaagtgctgactttgagaagaaactttctctaattaaaattaaaattctaaggaaggttattcacaaaaaaaaaaaaaaagtaaatctgatccaaattttaaagattcatctttggtatgtatttttttgaagtatattaattttgttttaaaaaaaattatctttttatgtatgttcaattttttagttgtttatactaaataattggttttcatgtttaattgttgttttacgtaattgaggtttaaatttcattcttattttaggaaactggttttaatgtgtcagatttacgtaatttgcttgccttttgtaactggtatttctgtttcattttttaattgattgtttaacataactagtttcagtaatctaaatttatttatatgttaagaattcttttgtgatatgctttaattttttttttttaatttctagtctagtttgtgtttcaatatatctttttattgtatatttaggcttcttatgtttttttttctatattaatgaattattagttttatttaattagctatctaatataactggtttctctattttttaaagaaactagtttttatgtttcaatttatctaatgtaactagtttttacaatttaattattagtttttttttaaaaaaaata

SEQ ID NO: 102440 - DNA, 539 bp, Cannabis sativa
ttagaacttggtggtcttgtgagaattttcttggaaattttgcggatgatgagatgaagaagaagctatagacaccacttaaaatctcttgttttttctttggtcaatttaaaatcaataatagaggctataggaccccactagaggttagtgactatatgaatagagcaccaaccgccacaatgtttgtccttattgagtaattgcattattgactaatattttgtctatggaatatgtacataaatatatgagaaaaagttccttgaaatttatagtgggacaaattacaattcattttttattcttgatggttgaaatcaaatttaaaaaagcctaacattacatatcactagaccaagcaatttgcactattgatattgttatattccctttattatataataatcttcatctattatatatatagggccggctcaagttctttcagcactttgggcaaaaaatgaaaaatggcaagaaaaaaatacaaaataaataacaagcataaaaaaaaataaataaataaactaggaaac

SEQ ID NO: 102441 - DNA, 541 bp, Cannabis sativa
ataaacatattttaaatccagaaatcaactacaaacaacaccaacaaccacagcaacaaataactcaattcatgcaaaattccctttcttaaaattcaagaaaactaacgagaagattgataggagcttacctaaaccttgagacctcctaaacttgctgcattttgaagatttgggaagaaaaaatagagcaaaccctagttggttctcgggattttgagagagagagagagagagagagagagtttgaaagacagtggctttttcaaatttttcttattctcttgtaaaaggaatgaaataaaatagttttattaaatcactttcagccaaaaacactaaataaaatctgattgtacttatttaattaaatgcacatacggacaaaaagcttatgggggaaaatgaccatttttatcctcccacactaaaagggcataaaagaaacctaggggtattttgggaaattctaaaatctcggctattcctgacattcccaatgtctaactatgttgttccgctatactaaaaaatactatga

SEQ ID NO: 102442 - DNA, 519 bp, Cannabis sativa
aaccccctcaaatgtgtctttggagtgggctcaggaaaattccttgggtttatggtgaaccaacgaggaatcaaggctaatcccgcaaaaaatcagagctttggtggaaatgtgatctccaaccaaaccaaaagaagtccaaagccttacaggtaaagtcactactttaaatcgcttcatatcacattcctctgataaatgtaaggagtgtttttagattttgaagggaaataaaaagtttcaatggaccaaaaagtgtgaagaagcttttcaggccctcaaagcgcacttggggcagccccaatactttccaagccaatgcttggagaagttttatctatctacctcacagtgtcggaatacgcgattagttcagtactaatttccgaagaccagggtagacaacatctggtgtactatgtgagcaagcgtctcctggatgtcgagacccattatccacaaatggagaaattagcattcgtattagtaattgcatcaagaaagttaagaccttacttc

SEQ ID NO: 102443 - DNA, 646 bp, Cannabis sativa
  modified_base (218)..(222): a, c, t, g, unknown or other
aggcttgataaattcttaagagcatttttagagtttctctaagtgttcatatgaaggaggaaataacttttaggacaaattaagattcttgggctttttcttttaaataaaagcgtttatagataaataaagtaagagttagacctctcagtcattacataaaatgctatctgacatagaagaaagcataaccatagggataattacaccacatactnnnnnttttaacttttttacttttatactatggggcggaatttttttcaaaaatattgtgtaggttttatactgtgtactgtgttaagttttcactgttattctacggttattttttagttgttccactggtatttttagttgttctgttttgtgttccactgttgttttataaaaatacagtatttttgaaaagattttcgtgtgacagtatttttgtaaaaattaatccaaattctagtatttttgtaaattttcctaaccataccagttacattgttagcaaaagcccacctcgccaaattatgagccgcaaaattacaaagtctaaaaataaacgaaaaattacaactaaacaaaatattagagagatgtttacattgatgaatataattatcaatacttcaattggaacagtttccttttagac

SEQ ID NO: 102444 - DNA, 895 bp, Cannabis sativa
tctagccagatattctccgtttacttgacatacgacgatttgggagtcgctaaaagcctgtaagtatcctatcttcatctcaagggcgagctttaatcctgcgatcaaagcctcattctcaccttcattgttagatgcacaaaattccaatcgtaaagcagcgtgtaccttaaaattgttcggactgataagtatgattccaccactagagccttcgctattagaagcttcgtcgacgtacaaagtccatccatctccatttggtatgacagtatcagttttttcttctatgggagccacctctgtacttggaaactcgagaatgaagtctgccaaggcctgccccttgatcgcggatctcggtttgtacttgatgtcaaactggcttagctctactgaccacttcaacaaccttcctgatgcctctggcttcgctaagacttggctcaaagggtactttgttaaaacttcaatgctatggacctggaaataaggtcgtaattttcttgacgatattaccagggaaaatgctagcttctccatttgaggagaacgagtctcagcatctaacaaacgcttactgacatagtttactgggtattgtcgaccttggtcttcgcggattagtactgagctaatcgcatattttgacactgcaaggtaaatggataacacttccccaaacatgggtttggacaatattgggggttgccccaaatgcttttttagtgcttgaaaagcttcttcgcatttttcagtacattggaacttcttgttgccctttaaaatctaaaaaaactctttgcacttatcagaagatcgtgatataaatcgatttaaagcggcaattttacctgtgagactttggacatcttttggcatagttggggattgc

SEQ ID NO: 102445 - DNA, 594 bp, Cannabis sativa
cggcctccgacaaggcgaccccctatcaccatatttgtttcttctttgctctgaagggttatcttgtctcatccacgaagcagaaagagcggatagaatccatggaattaagtttggtaaagaggggatcaaattatctcacctatttttcgccgatgacagttttgttttcttagatgcaacggttgaggaaggccaaagtatgaaggcagttctagaggaatattcatggctatcaggacaacaaatcaactttgcaaaatcttctctatgtgtaggcagcaagatcaaacaagagcaaggcgccattgtcgcggctgaaatcggagtaaaacttgttgaatgtcacacaaagtaccttgggcttccagctttgatagggaaaaggaaaaaggaggtcttcgaaagtatccgctctaagatctgagacaaactacaaggttggaaagcaagccttttttctcaagccggtagggagatattgttgaaagctgtaattcaagccatccccacctatgtgatgagttgcttccgcctccctaaggaactaataaaggacattcatggaatgatggcgaggttttggtggggatc

SEQ ID NO: 102446 - DNA, 600 bp, Cannabis sativa
atgaacaggacattgcttgaaagggtaagatgcatgttaaagggtgctggcttagacaagaaattttggggagaagcactgcaaactgcatgttatctcattaacaaatgcccttcaactgctctaaaatttaaaactcctcaagagttttggacaggtgaagtaccaagatatgatcaccttaaggtttttggctgcactgcctttgctcatatcaaacaagataaattggagtctagagccataaaatgtttgttcttgggttaccctgatggtgtcaagggttataaactttggtgcctagaagatggacacaggaagtgtttcattagcagagatgtgatatttaaagagcatgaaatggcaatgaaacttaccaaaacagaggccaatcatgaaaagcaaagtgttgaacttcaaacagatcaggagaatgatgaagttgcagatcaggtggatacatctgcaacacacagagatcacaatactgaagaagaaataaggcatgaacaagagtcttctgagcttcaaggttatcaactggtcaaagatagagtcagaagagaagtaaggccaccagaaagatttggatatgctgac

SEQ ID NO: 102447 - DNA, 875 bp, Cannabis sativa
aaataaatgttacattttaacaaattatattttatggaacattaatattcataacattattttatgatgtaatgatattattctgcctttgcttcgacttccctttcctgcaacatcttaagcccaacatacctgctcaaattaatcaaacacaaacacaaaacacttatgagatttcttatgaggcccaaataatagatataattgaattattattaccattttatatgttgtttttatatattaatgttttccatttaaatataaatatcataatatataaattgtaaatatttatacaaaatatttaaaattgtatcttttatataatttatacgaattatatgttacttttgttttatatattttttaaattatttttacgtacaaaaataacgtataaacaacataatacaatattaatataaagtaacttgaaagtaatgtaaaataatattattgtaaaaaccacattccgtatctttataaaaaaatatttaaattcgttaaaaggttgaaaaaaactataaattcatattttaggtttatataaaaacaaaaatcaaacctttaaatgataaaatcggttattggaaaatcataataattattagaactcataacttttttataatcaagggtattaatctcaacaattgtgctacatgcatacattataaatctttacttattagtgaaatattttaaatttataaaaacagaaatataatcttgaagacacagccaataaaaataatttattttgtaaaataaatttcattagctctctctttttctcctcattaattagctctataaattttttcaaggacaatataatttaacttaccggcctaacatcatggtagtggctt

SEQ ID NO: 102448 - DNA, 529 bp, Cannabis sativa
ctaagcgggctttacaatatttatctccaatatctttcataatgacattaactgtttcagaagcaacaactctagcaatatctttttgaatgtcagaagatgtcaatttcaaacttctaggggcattcttcaatgcaacaactttgatatcatcattgtgatcaactagaaaatgcaaaagttccaaaaagttacctcgattatttgaatcctcagattcatcatgtccacggaatgcaagcccttgtcgtagtaaatatttaacacaatcaattgatgacttcaaacaagttcgatattccatttgaacttctctggagtgtttagatagtattgtttcaatatgcttattttggttcattaaagcttcacaactcctctgagcttcattatggctactattagggcctccgacatgttttcccactcttgacctttctttccaatatgaaaaccccatttttacaaaacactcaccacctgtttggtctccattatttaattcaaaaagatagcaatacaagcaaaa

SEQ ID NO: 102449 - DNA, 1340 bp, Cannabis sativa
acttaaattaagtaatttttattgttaaaatatatagattaaaagaaatggttaaataataatatatatttttttaaaataatgagctttaaatataagaacattggattttcattgatggtcctacatggttaaatgtttcaatgtgaccccgagatgctagacttcgttccccttatgggaggttatccattgaagcattaacaccgtaagatcttgaatgataagtattttgtatgttttcttttctattagactctcccctacagtgactacttagaaataaatttacatatatgaaacaatggtagaaactcataaaataagaataaccttcactctcgcctaccggaccaacgttgaatttttattttgatcatataaaagatttctaaaatggtatctattttagatgagctgataacactatcaactaatgttatctttgactctcgcctaccgggacactgcatttcattttgttgtaaaccttagaaaataatttaatatattttattttggtatttttggaaacatattttctttacttgttattttttgaatatgtgtatgaatttatttgaaccaagtaatttatttttgtttattgatgtttgtagtgtcaaaatattgtttaacaatcctcaccccaatcctcaactagtttatgcctttgcaaataaactctagagtacgaagatgactcttgaacagagtatcactgcatacttgctcatgatgaacatgaaattccagaaagcaactatgttgggaattgtcttctcaagagagcaaagagttcattttattctcaacagcttatcaattgagtttaaccaatttgttgtatcttttatgattaacaattagagctcatctgacatagacaagctggatgctgaattgcgttcttatgaaaagacattgtcctcaaaaagtaatttagcgtatcgcttatcggttttacatatcttgtgacataggggcctgtaaaccgtcgagcagcagtttctacttaggttgaccaaaatacctgaattcagaatcaaggtaagattagtataataattgcatatatttttgcatgtttagcgtgcatatttataaatgtctaatagataacatatcagtaatggcggtattagtgtatataaagttgcagtgaataccaacagatttatgtttggcatagtacagattgacactatcacatcggtacgactagagtactgagtataggttaatattatggtcatcgtatttttgtacaaacattctagactcagtacgcatgggactctggataggattgtaaatgggtgtatgggtgcctagttata

SEQ ID NO: 102450 - DNA, 506 bp, Cannabis sativa
  modified_base (364)..(366): a, c, t, g, unknown or other
  modified_base (457)..(481): a, c, t, g, unknown or other
ccttgggtgcccttccatcttctgcttcgtgaagcagagccattgttgaaaccgaggtccctgcttcggcttcatcatcggaagaagaggaagaagcatagttggctaatagagagtccatgaaatgggaatatctctaactttattttggggaaaaaaacgaagaagtagaggaagaagaaaaagaaagagaaaaaaaaggaagaagaagaagaaaaaaaaaaatattaattattttttaaatattttaaaaatggctctgcttcctgaatagaagatggaagggcacccaaggtaacgaagttcttatataaattattaaaaaaattctgatttttgaattttttttttaatatttataatnnntttttaaaactaatattacgtggaccactaaaaatttgctacgtatacaaggtgtacacgtggacagtcctgttggattttgtgccctaannnnnnnnnnnnnnnnnnnnnnnnnatttactagttaataaagatcaaaa

SEQ ID NO: 102451 - DNA, 988 bp, Cannabis sativa
tttcagcggccaagattaaactacgagatttcttatcttctaattttgaattcagaagataaggaggtgatttactaactgttatattatttataataatataatatgtagattaaatatgtgtaataaactattaatgtgtaacatatgacaatgtatattagttgtcatctttttataacatttgggggagttacttgttaccatgagcaacctccaccattgtcaccaacatttagagtgtaaaaggtgttacacatcttaatttaaaattcttaatgctatatgagttatggtgtgtgcatgagttacatctttataggagttatggtgtgcatgagttacatctcttcattgagtccataacatctacagaggttatgacttataaactagaatttcaaatggtgatatccaaaacattatataaaggagtctaatgtgctcatttggatgaataaagttttctatcaaaaaagcacattgctagaaagccctaaggcttaataattcccaaagctatttctatgagagttcccttagtgcttagagataggggaaataagcttttgaacaaaggtgtaataccttgttcaagtcatgcatccaaataggggttaggctgtgctcttatgcaatctggaaaggtgattgcttatgcatcaaagcaactaaaagagtatgagcagcggtatcctactcatgatattaaactagcagcgattgtttttgcactgaaagtttggcgtcattatctttatggcaaaaggtgtgagatctacatcgatcataaaagcctcaaatactttttcacacagaaggacttaaatatgaggcaacagcactggttagaattggtcaaggattatgactatgagattctctaccaccctagagaagcaaatgtggtagcagatgctctaagtcgaaaaggcctagggcaagtttgtgaactaaagaagatttcagcagagttggctgaggatat

SEQ ID NO: 102452 - DNA, 1016 bp, Cannabis sativa
gcttggcaatgcaagaaacaacattctgtttcttgattaagcactgaagtcgaatacagaagtctagctcaagtggtatttgaaataacttggttgcattcctaatctggttactattgggtatgaacatcttaaactttggtttgttaattgtgtaatccgaaagttaagagaccaaaaaatttcaattttttttgtgtatatttcatgcaattcgaaaaattaattgtgtaaaaatattgcaaataagccggtaatgaaatttgcacaatcaatttttgtcaataatcaatataatggaaaaacctaaatttgattgatttcataattaaaacatacatataaaacctaaaggtttaatcataaaattctttcaatttactcaataattttaatcatataagatatcaatagaaagagaatttcatgatgaataaaatccctaagcttttaagattgaaaaatgaaaaatatgcaacataaaataataatgaagttaatatgtaattggtgaaaattaacatatacatatcagttattatacaaattgaaggttctaaattatatacaaatggcaatctgataccacatgttagaaaattaaataatcccaagatacaaaattatatacaatatagaacactataatatatatatatataataattagatatatatatatatatacttgattgatccataacaattattacaatttgatagtgcaatactatcaactaagtattcttccctagatatctaaatcaaaagcagctttattttatctgactatcaaaagtatataattgtgataacacaatatgtatttatagagttagagagaggacttaattatataatcctaattggactgtgcctgctcatcaagttaactagaaaaatccgcacttctatttcaactagactttatacacagagatgctaagcccattaattattgaccactaacaatataggctaacacaaaaaataactatccattaaacttatatttt

SEQ ID NO: 102453 - DNA, 523 bp, Cannabis sativa
ttttttttttttttgataaacaaacatcttgccaagttgtgttaagttagttgtattttcttttctttctttgcctatatttgctcataataagtttaagagaatgttcaaagagattagtggtagtggtgcttaagactttccaatatgttatatagttattggtacaattaaatattggtctcatttaatttaatgtattaattttaattttgatgaaatatagctaattaatcataagaaatcatttatttaagctaagtttaagagcattgtcattggacactaacactatgtttggtaagaggaagaaataggtagatggagaggagaggagaggagggagagagatgggaggagacaacaaatccatttggcaagattgattgggagagggaagggatagttggatagagaacaaatcttttcaaatttccaatttagacattttctttctttaattatttgaaattacaaatatactctcataatataatattaaaaaaattacatctaaggacaa

SEQ ID NO: 102454 - DNA, 869 bp, Cannabis sativa
aaactaaatcaatgtaataaaaggaaaacacaatcaaatattaatggtgataattaatttagtaatttcatatataattttttataacagtaaaataataaaataaaacttcttgtacatttgatagagattttagtcctattaaaaaattaataaaagaactgttataaaataatatagaataatataaaatagataagaagaaaagaagaagaagatgaagagagaaagagaaagtgaatgagaatttctgagttctttattccaacggggtgaacccctatttatacagaatatgactaaaagaatgggaaactaaatcaatgtaataaagggaaatacaaccaagcattaatagtgatgattaattttgtgatttggacatccataaatactatttcataacactccccattagatgtccataaaaactgtcttattaaaaaccttgctgaaaaactcggtcaaaagaaaaggagtgcagtgtaaactaactccccctcatttaggtattcgtgaagatcttttaatcgacgaattctaatcttatgagctatcttctcaaatgttgatgtttgtaatgactttgtgaataattctgcaagattgacacttggttgaatttgttgagcaccaatgtgcatttttttgaaatatataaagatgaaatgtgttttaattctgtctccttcaatgtatctttcttttagctgagcgatgcaagtagtattatcttcatagagaattgcttgtgttgatacttctttattgatatatttcccgattatgttatgtcaatgatctcactcccaaacattctttacttgcttcataaaatgcaagtatgttaacatgatttaaagttgcat

SEQ ID NO: 102455 - DNA, 579 bp, Cannabis sativa
tggtggctgaggaaaaatgagagacagagagaaagagagagagagagagaggtgggggatgggctcaaaccaaaaaatgatattactttctttaattttcacataatgaaacatataatcatttattacagtttggtcaaatgaccatttttccctaaggcctatataaatatttacgtaatcatatagttcaaattatttctctaatcacacagtttataaattttggactccaaattcagtttgaactaaaatacgcgattatgactatttagtgccaacttatcaaaactcacatgcaataagacaatatgaacatactatgtaataatataatccattagcacaatatatgacaaaattataatttttcccttcttagaccaataataacaaaaatgccccttactcataaatggggtcttaaatgcgataaatttcaaatactttcacataattaattatataataatataattactcattatgcttaattaatttaattaagattgctaatccatttactaatcttatgatattaccttaacatttaaaggaaacaaacattttattcgttag

SEQ ID NO: 102456 - DNA, 643 bp, Cannabis sativa
attaaaaattttatatcaactattaagattgttagattatgaatttagtcacaacaaattataaattttgtaaataacacatctaatcacaaatttatcgcaactaaaatttaaattttttatagtataaacatagtaagttatttaaaaaaaaaataaaaacagataaaatatttactatcaactataaaataaactgttatattagaaaatatataatttattgaaatatctaaaacataaaaatggttacttgtatagagaaaagtaatctcctttgcctactttatatataaatataatatatatatttatttatttatttggtgggacctaaaatgaataatgaaatagatatttatagatgtaggtatctgatattttataatttcagtcccatgataattgtgaatagtttactttacaagctagaaagatcaatattgattgataaactccttcaaaatattaaaaaaaaaatattgacaaaacaaatgcaccttcatacatgtatagttcatcttcttattcttattattattttttttaatgaatctactaattcattaaatttaatattcaaaatacaaaatatctagcataattattagaacattacattcataaatgctacaattacaat

SEQ ID NO: 102457 - DNA, 1283 bp, Cannabis sativa
aaaaaaacatataagaaaaaaaacaagaaactaaataaaaaacgaattgtaacaacacaaccaaaaagtaaaagaagtcataaagaaggcataccttcccattgaaacctcgaggtttctttggaagataaaccggttcaaatttgaggttttgcgaagaaactttcttaagctcacggccaacaggataaaaattcttaacagtggcctgaaaaatcgaaaagaaatcaaacatattaaaaaccagttaatacactatttaaaaaaaaaaaacagttataataattgaaaattacctcagaattattaaaaacttcagaaacaagttctgaatagccccaagtttttttcttatatgaactctcccaattcaacattcgaggatacgtattggcaatcctcttgcaataattaggagacaggcttggtagtatctcgaacaaccaaattaggaaagcaaatagaaacccttggaatttaaaagaataaaacttatccttctcttccttggccttctcaatcttgtaatatatattgtcaccgtccttgaatgccaaattcatgtagtggaaagtcctatcccacagcagtttaccaaatgcgatattccttagctcagacaaatcgccatcgacaaaaccaaataactcattgtcgactcttttaccgttctcatacccatataaatagtgactcaacaaataaacaatctccatcttcatagcgtcaacgtcatcatcaaattctcccaccaaaaaccttcctctaacttgttattgaatgactttaatagtcaaatcaggaaacatcttcttcttgaacgacatcttctgtttaaaatcgttcaagtcaaatgaccctttcggacttaatcccgttatcaagacaaactcctccaaactgaaacggacaactctgtcccggattaagaaccacttgtctacatcctccctctcttgatgaacctccctcactaaagcaaggagaggcaggggaatgtgacacttaacatttcccatcttcaaaaattatgaaaaaggcatcgttaaaaataacaccttttgagaaggagtaagatttcatttgatctcctcaataacccacgggttattccaaatctggagcttacttgtgaaccgttgctccggtttcatcttcaagtaaaaatactgtaaaaaaaaaccagttataaaataagatttagcgagtaacaacaacaacaagcacatgataaataaaataactggttccataaacagcaattaaatcacattaaaaataaa

SEQ ID NO: 102458 - DNA, 502 bp, Cannabis sativa
aaatttatacatcatttagtaatcattataataaattttgaaaagttatactagtattgtagaaattattaaacaataattacttgtggattaaagttttaatttaatatgattaaatttagatgtagattataataacttttattaaacagcttataaaaaaccttaacgtttaatatttttatttcaatgaaaaacatttcattattttataaaagtttaaaaattttatactttatcataaaaacattaaattaaatccacataattgtctgtagggtaaattaagataatttaatttaacatattattattattattattatttgaaaatttgctcttaaaaaacgacggttcgtttgcccatcaaaaaatacaccattccctaaaacaaaaagtcgtatggatggaacaatattggaaacaacgcgtcacgtcatcttctctagcaaatttggtcattttgacccatttaatttgcgtgggtctgaccgatttggag

SEQ ID NO: 102459 - DNA, 709 bp, Cannabis sativa
tcactagtatgtatgttgataacacgtgtcctaccaagaaccgatttctggaaggaactgcaagctcgaagacctgaatcgttggtcgagttctttgccatgggagacccgcataagaggattgagaattctctggctgaattagagaagggcaaagataagcgtaagtcaccagtaccgcgatcacgatctcacagtcctagaggaaagaattccagaggaagaagtccgagaagatgcagtccacaaagacagcgaagtccgaagttagccaagtcctctccaaagaaggaatcctcttcgaaaaggaaaggtggtctgcgctttgtaaactatacataattggcagtccctcgggaccacatctatgccattgaagaaaagaccgggtctttaaaaaacctcccccaatcaggggaaaccgcgataagagagaccctaaaaaattctgtaagtaccacaaagatattggtcacactactctggaatgttggtttttgtaggacgagatcgaagaactgatcaggagaggaaaattcagcaaatacaagaagaatgaggaaagtcatccccgagcagatgacaaagaagaaaatcagaatgcgagtggttcaagaactcctcgtaacatcttgactatcataggcggaccccatatcgcaggtgattccaggaagtcgcaggagcgatatgcgagagaagccaaaga

SEQ ID NO: 102460 - DNA, 656 bp, Cannabis sativa
gtttattaacttgttggccagaccgataacagaacctctcaagacactgccagtaacctctggcttcgctcaaattagctttgcccacaagaattaagtcatcagcaaaaaagatatgagacaaaaccaggcctcctctactcagcctaatacctttaataatgttcttgcagagggcatcatgaaggagccttgataaaatttcggcagtccagatgaaaaggtaagggaacagaggatccccttgccgaagaccacatgagaatttaatcatgcccaccgacccccattgagacagatgttgagggttgttgtcgtaatacactgggagacccaattgcgaaacttcataggtataccataaaataactataacatacacgattatgaaaaaaaatttagactaaatatttttttagatgctgaaatagataggaagtctactgaaagattcttttaaaagccgtattgtagacttacttaagttttttaccaaatgtaatattttgtctaattttttttttattttttgtatattatttttatgttgtttggatgctattttttttattattattttcatgtaattttttttaattatttttgtgttatttttataaaagaccgtaaaatttttaaaaaatacatatatttgc

SEQ ID NO: 102461 - DNA, 501 bp, Cannabis sativa
ccgtctggcattcctccattacaactctaaattgttttagccatttctttccaatcatatggctggtacattttggtttaactctcatccagtccccataaggtttaaccaacgacccggttgttgtatcaaaacatcgtgggcagaaattttcagagtgcttcataatcccgcatatgaaacaaaaagtaggaagatgttcatatttgaaattcgtccaaaactcaaccccagcaatattctgaagcctcatacgtcttttgagaggcttattgacatttatagtgactctaactcgaaggaagtccctccaaaggcccaaaaaattcttctcatcagattccacaagtttaccaatgtagttcgctacatctttagccaccgtgactgttcgaaaccctgaccgtaagtcatgcagttgaacccaaaaatccacctcattcagtgcaactaatctgggattctcaccaggcttcaatcttgtaaacaccagaagaaact

SEQ ID NO: 102462 - DNA, 513 bp, Cannabis sativa
tctaaaacccactagagccacactagccccctcgatacccagcagaccgtcgcgccagaagctctcgtttcaaaagatcactggccgaccaccgttcacttcccttctctttctctgttgcgtcgtccaccactacaacccttgctctctttttctgtcagtacgtagctctctctctctctcgtctaaaactctctctctctctcgtctaaaattctctctcatctgaacagagcatcaattgattatcagctggtggctctgtgctgaatccatttatttattttttttctttctaaaggttttgatagcagctggtgtttttgcggtaattggccaactctctaagccttttacatctgtgattcagtatgggaaagaatttgatatgaagtctgctattcaggctaagggctttccttcaactcattcctctgtaagccttttttttttccttctttctttgtttcactcgtgtagtttgatttttcaagtggggttgtaaattgtaat

SEQ ID NO: 102463 - DNA, 1541 bp, Cannabis sativa
  modified_base (462)..(466): a, c, t, g, unknown or other
cttctcgttacaatggatataagccaaaagattgcgtaataaatatagaatacactgataataggatttggacagcttgctatatgtctgcagtctgatcccaagttatagggatttccttgatgactgacggtccgaaagctgaattcgctaagtgttggtcgctctgtgtggattgttgattgctctgcctcaagcatgcatatgaggtatcctgttcggactatatcttgtgggcagatactcagagtttattccatgtgtcaccatcatgtgatgccacgtcatagtgcaaaaattagaataacatttgccccccaagtttgtacgggacttctgaagttgcgtgtagacttcatccaagttgtttttgcatttagatgggtgacacgtgtcaagcgcgtctgttcgtgactcgatgtgaggctgactgggcatcccttcagtttttggctaataaannnnntgacaattaatatttcgaaatccaattttctctcaccacggttgatggttacacttgattacttttgatttcccatattcgcttttacgggggaaccgaggcgtctgaggttcttttgaaatgattaccccttttcattgtttgcctataaataccagtgagcatttgtccacaagctcattttcaccaaccttccttgctaagtaagttccgagcaaaaagataggtttttggcttcaagcttactgaagtgctttcatcaaaactgctcatttggtttgatgcaacttaaacccaaacgcttgattccttgagtaagttctcgatttcctttatgtttactttgcacatttactttctgaatgcactttcgattttgctatagaggagatgtagaaaccctaagttagaaactctgcgattttcttttattacggttcatgagatttcattgtctgtaatgcttatcttttaaactgcataatacttgtctttcatcttgcttattctaagcttcatgaaattttttgcccaaactcgtgaaaatctcaagcttcctgagttttgacttttcgttgaatattctcattcttcaatctgttgagtactcctggtcggcatatttgcttgttttgatgtttgatattctgaccaaacactcatcttgtgtgttgtcttttgttgatgaacccaggtgagttttggggaaacgaacaacaaattgactaggatctacttcaactcttgcacgaggatcatcctcgtctacgttctagtccaacttcttcgagtgacatacattcttccttaaatcttttgtctagccatagaatgatggctcgtacaaaaaagacaatgcgtagggtcgacgcatccgaccctcaagtggctcgacacgctaccttacccagcgccgaacaagatccaatcatctaggaggaggaggatcatgaaggggacgctaggtccaggagattgacgagcaagacgatgtccgtcctagcagtcccttcgaggcggaggaagaggaggaggttgcaccaccaaactatgggggatacaatgaggctgggga

SEQ ID NO: 102464 - DNA, 649 bp, Cannabis sativa
aaatattagatatccaattgggattgaatagaatttaatgttatttttaaatatgtaattagatcggatcgaatgttggatgcgtgtccagaaatctaatgcatatccaatatctaatcaaactaattagtagttttatttagtgaaagagtaattgattttatattattatacgtaaaatacatatgtatatatgaaaattaacattagaattttactcatttttcttagattggattgatataatccattccaatacatatttgacctaaaatatcagataaatctaattcgatctaaaaaatactatctaaaatattaaataagtccaaattaaattaataaatatgtataaaatacatccaattgatagaaccaatctaatccaatatccagttgatgttagatcgattgaatgactaaaattaattggatcacatcagatagtaaaatataacatccaatatataattggatcggatctgtataggcctaaaaaaattagatttggtctaataaacaccccaccaaatccaaaccccagacctcgaccttggggcccgaatcccggtcttggtctcgatctgagtcctgatcccaatccaaattcggagtctgggtccccgatcccatactctttgtaaatatt

SEQ ID NO: 102465 - DNA, 628 bp, Cannabis sativa
tataaaaatttgaatacaatcagcaaaaattatccatgacaacctaaaatataatatagctaaaactatatatgcataaaattaaaaaaaaaaaacaatttaattagaaaaaaaaaaacttatattcaattaaattaaccaaaaaatgaaaccaaacttaaattaagaactgtcacttttagtattatatatataaatataaatatatacatatattactatactatatgggatgatatatgtagtgagatttagagaaattaatataacttaaagagatgaaactttgtagtttatgaattatataatgatagaaataaaattttaatttttgtttttggaagtatgagacctgtggtcacatttttttttacattatttttgacactatttattaacggttagatcaaataaaattaatggattacaaataaacttaattaaaaagatataaaatcttaaaaggcacactcctctcaaccaacacctcatttgcatttgcatttgcatttaactcaaacaaacaatttacatgatttttttttttttaaagaaagtaatcaaactttatttaactttcaaactcagccaccaaacatggtatcaaatcagttgggacatcccccat

SEQ ID NO: 102466 - DNA, 715 bp, Cannabis sativa
ttttaattgttagcggtttttttggttttcgatttcgccagtttcggttccaacggtgttcggtaggtcggtttgaacgatttttttcaattttctggattttatactcacccctatgctagatgaggcacccccactatttctcaattttaatggaaatctatctttaaaaaaatcaacatcgtttgactccacaataacgtgcgcattcatatcatagtacctataatctttattattaacaacataccttaaaaatacacattcataggcactttttgcttgcttaattctcttaggacaagttgaaaaactcaagttttaaaatataatatgtttggttatctatttctcaatgtctcaaaaggataaatttttctttttaatttaggcaccttattaatcacataaatattagttaaattatggaaattaatagataattaaggagttaattattattttatgattatgtgattcttagtagaaattagaacttagtgttagaagtaggccttaggaaaatattatggatatatatttgaattctagatgtaatgtatatgctatagatgaaattttacaattttcatgttttctgcccggtaatattgaaattaggggtaatcatccgatccaatccgtacttttttggtcaaacaacatccaatccgcactaagtacggatttcatattttggatccaatccgatccg

SEQ ID NO: 102467 - DNA, 783 bp, Cannabis sativa
  modified_base (579)..(583): a, c, t, g, unknown or other
gtgttgcttattggtcgggcacaccaaaaagacatgattaatttgaggacattgctcgtcaagttggagtaccatacaccaaaaatatcacttgattgtgtaacaaggtggaattcaattttttttttagcttagcacagctttatctaagttctaaaaatattagggaaagattcacgagcttatgtgtgtggtggttgttttagactcgaggtacaagtttatgttgctcaaatattattttcctataatctatggtgataagcaatatgtaactgaaattccgaatgttcgtgagctttgttacaagctactggaggaatacgggtttaaatttcctcatttgagagaaagaagggttcgggtggaaaatgtatcaacatcttcttcaacacgccgattggatgccctttctaactttgacagatttatttgttagagcttcctatcaagtagagaatgtgaagtgtgaactggatttatatttagaggagaacttggtacctaggactgaagagttatttgaaatatgtaattattggaaggtgacgggcctcaaatatcctttgttgagtatgnnnnncaatgatgtatttgttgtgcctgtcagcattgttgcttcaaaatctatattcaacactggtggtagacacatgagttcacatcgatcgagacttcatccttctacattagaagcattagtatgtacacaaaatttgttgatgactgaaaaaaaaggtagatatcatttaataactgtatatatatatttatctatatata

SEQ ID NO: 102468 - DNA, 685 bp, Cannabis sativa
aactcaagaccctattcaaaagagatcttcaaaagcccaaagtcaaaagtcaacctaaaagtcaaagtcaactctcgagaaaagtcagcttgggatcaaaaacacgcaaataaaactaggaggctcatctacatcaagactacccaaaatcaaatggtataaatttacttttgtcttgttaaagtgatttgcatagcacactaggatttataaattcaaattttggcccactcactaacttgtgcaacaagttttctcacttgatagttcaaaatttttttaattggatttataaatcacattgcatttaactaagagaacaaaattagaatttctaaaatcggataatcgaacaaaattggaatttctaaaatcggataatcgagtaagaagttatacaagttttagttcggaaaaatgctaattttcccactgttagccatccgaaattccggttcccatccagaatcccagttcacggttgaatttgtcttagaatgcgtgctaatggccataaacgactacttttcaccctaacactatataaacttgattttcacacaaagttggctgagcatttatgtcatgcacctaacctatccaagtgagattaatgagcttccaagtttaaaatccaacaagaactttccacacacttttggccaaaatttgtgtttattcatct

SEQ ID NO: 102469 - DNA, 1125 bp, Cannabis sativa
  modified_base (196)..(198): a, c, t, g, unknown or other
tacgggcgtcagtgatatgaaaaatttccaggttatggcatagagtgaaaccgttgtagggtttcctaccaggttatggcatagagtgaaaccgtagtaggatttcctgccaagttatggcatagagtgaaaccgttgtagggtttcctaccaggttatggcatagaatgaaattattgtagggtttcttcctaannncgtatcgggtgtaggtacgggcgttagtgacatatgataagtactaggcataggtaagggctcgtttgattagacgatgcgatatattggtgtcaggttgtggcacgggctcacctgattaggtgatgcaattatgtatcgggcgtagatatgggtgcgtctgattacacgatgcgatatattagtgccaggttgtggcacaggctcacctggttaggtgatacaattatatgctatatgggtgtaggtttttggcacgggctcacctgattaggtgatgcaattatgtgatatgtgggtgccaggccatggcacgggcttgcctaattaggcaatgcaatagaagattatcaaattaaaacattgacttgcctgattaggcaatgtgatgtaatgaagatggttaccttatgaggtaacatatatataatttatattattaaatgaatatgattcctattattggtataatgattttgtactaccagatacttgtatattgatgcttattcaaagcagatgccagtagtaatttggatttcatcttatgaataatgcgtaatgctttgattacgattgcgtataaatgataatattcgaataataaattatatgattattattttttttttcttattgagtccttgtgactcacgggtgctatgtggtgcaggtaagggcaaggagaagttagagctgccatgaggtgactaccttctccagcaatgtatatattgacatcaccgacctgcgtgtcaagttgtcaagagttgttttaggctgtatctattgtgtgttttagttttatatttttgaggtgtcgttatatatggttctttcgcaaaactttttataacaggatccccggaacatactttttatgctgttataatgttcgtttttagtgttttattttagtcaagtttt

SEQ ID NO: 102470 - DNA, 608 bp, Cannabis sativa
ccaaaaataacaattttcatgctatatcaacccacaatcataccaaactttcacgtagcataaaccaagtaattagagaggaattacacctaattcactctccaataacacgaaaaatcagcaactaaaaatcaacattcaacaatgaatttcaacccctaaactcatccatttctgcttaattcacaacaaaaacttaattccatcaaatagattttccaataattaaatcaagagcttaaaacacaattcatgcattaaaaatccaatggtaaaaaccccgaaaattcagattaaacaatataaaatttaaagctccaacttgagcaaaataaccaagaacttgaacttcaacaattaatttcaaagttcaataacagaataaaaacacaataaaattccttttaaattatgtctaaccctaaccaaacataaattcaaaatgtccaagtacaaacatgctcatatcaacaagaaaacaccaacatacatctcaagaccatccaaacctatttcatgcttttcaaccataaaatcacagcagcaaattcattaaatttcagcaatgaaaaactacctcaagcttcaatgcaatgatcaagccacaa

SEQ ID NO: 102471 - DNA, 685 bp, Cannabis sativa
tgcactaattagcccgtcttaacctaagctcagttctctcaatactatattaacgtgacactttatatttgatgagcaatttctcctatcatttcaaaatgtgtaagatttgataaaatacaccaataataatataatacgatgagctatcttggttcgagaaggttctaacgccaatagcagacgtctgcgtcgtaaattcataagtgattttcattgtcaaaaaaaaaatacaccaataataatataatactttttattttatttttttatttttggagagagatataatacttttttttagtagtgtttgataccttaaaacaccctttatgtaattaaaaaaggaaaatttctcattaggttgaatatcccatttttaatagttagaaagtccaaagaaggtttaactaaaacttattccaatccatatatgcaaaatttatgttggttttcattatttatctccttttgtcgtttctacgtttttgttgttgttctaaaggtattggcttttctaattttcttttattataacactttttataacattaaagtttaattaagcttatggatacttcaacttgtacggaatgaatctatggctctgttattgacagtttgtttgtggtgccattgatttttgttgtagctggaaaagtgggtaaagaaacccatttggaga

SEQ ID NO: 102472 - DNA, 647 bp, Cannabis sativa
  modified_base (513)..(516): a, c, t, g, unknown or other
aaaaaaacaattactctaggaaaacaaatttggtttaatcttccattaatttgtttcaatttagtttcaaaaacaatacatgaatatatggttcctctcaatctcaaaatataaattatggggttcaaatataattttaaaactccatttatcttatgaaaatatctaattaaattccagttacttttgtaattaagattgagacctaattaagtgcctaacattgttggaaaaaagaaattgacaaaacttatatgtattaaaatatttatgtatattattattaaaatcatattatatagatttcttaatattttgaaatccttaaattatttaatttttatgtattaattattgaaacttaacctacaagattgacatcttcaaaaataggttcacataaatatgagtatcacaagcaacgcaatgggcgcatcatgaactccttcatcaatgatcactacaaaaagttttacttttagtcacaataaaatttatgattaaaagtaaaannnnttgtgactaattataaattataatttctatgttgtgactaaaattccgtggctaaagatattcgtcacaaaaattataatttgttatgactaaatatagttttaatcacaatacttgttatgactaaaagt

SEQ ID NO: 102473 - DNA, 561 bp, Cannabis sativa
gttagtgattttatgtttctaggtattatatttggttttatactctggatctggttttaaaattttaggatatttgacattaatccttataatatgttttttctgtatgtttgtatcagcaaaagttttatgtcttttctaatttttaaagtttttatatccagccgcacaactatatagaaactattatacaactatatacaaacaatgtccacttttcagcgtacttttaattttaattccctatcaatgtatttattcactgtttttcccttgtttcattatcctttattaattatgttttaaaaattcctatctgactttttttaaaactttaataaagaagttattttcgtagtaaatatttaacaagtgtcaaaactgtcataaaacaattttgcaactattaccagcctatttaaaatttttcaaaaataaaatcccatatgtatcgaatataacgtatcaacctgtgtgaattctcacacagaattaaacaattcaaataattcatccgcatctattttattgcttgattattgcatgtctttcggttgtgcc

SEQ ID NO: 102474 - DNA, 508 bp, Cannabis sativa
ccctctccctctcaaaccctcttgatttttcaagcttgatttgtgaagaatttggtgagattggaagcttaatttttgggagaaaatctttgttcttgcttgttgtgatcttggggtaaatttctatgatcttaatcatattttttagttgctgaattttatgattaaaagtgtgaattggatgatagtaatgataggttgcatgttcttagattttgtggaaattttgatgaattaagtgaagaatttcatggattgacttggattcatgtttgtgagattggattgtaattatagggtatttttctgggttgaaattcatgttatattgttgtgtgattgctggaaattaattgaggaatttggctttgaagctcttgagtatgagcttgatgttttcttagttgagcgtgatttttgagtcatttatgtaatctgaatttttggatttgatgcatgagatatgtgtttttgatcctctgagatatgttagcagctctatttcatg

SEQ ID NO: 102475 - DNA, 675 bp, Cannabis sativa
tgatcgaccatcatcgtacggtcgggtagcaatcgattcgcattctacagatccaacggttggaataagcactcatcaaggtggtaaaaaatgtttgagtattcgactgacacccatttaatgcgccgtatcaataaatagacagaaaatgaatcattgtgtacaaaaagtaaataactgcagtaatgatggtcattaatatatccccacttgcccaaggcacgtgccaggaagctgataaggcaaccgaaagcatctaagaagccttgtttactttttcaccaaacaaggcttggggggtaactgttgccccttactttgtctaaaatacgtggaccaaccggattgagacacgtagactgaagaggtttaacgttgggataattcagctaagtctctttagtcaaagggatcaacatttaacatgcctcccggagaaggcatgtaagtttcacatactcccggagagcaaagctacaacaaagcacctctgggaggtatcaaatcctatctgaaccgtcacttcgcatttaatgacgcatgggaggaggcgtattgaaactgccatatgtattaaagtctgacggtgtaaagccccatctgcagctactacgctatgattaataagcctagtgacggctactctatgagaaatcacatcaatcaaggaaggat

SEQ ID NO: 102476 - DNA, 772 bp, Cannabis sativa
gagaataaatattcaaagatgctacaaaggtgaggcaaaagtgcaggttttataaataacaaataatttcatataataattattaaattaaattatataagacgtgatatttaattacacttatagtaatatgacatatttaaaaaatactagtattttttagcatttctcgacgtgacatatttaagtttattggaatctattttggctacttctttgagtttatttttagcagattttagacacaatttttctaagttttactgtgctagtatctctttctgatctaggtatattaacgttgttgttctttttttttggctaaatatatattctcggaagttattagtaagaccatctctaatagatgatttaaattttcagttaaatttgatccaaaatataccataaaattatatttagcataaattttgtatttgtgctctaatacacaaagtgcaaattagctatataaaagttaatattatcattaatgctcattaaaaatatacaaaataattacttttataagatattattttaatatcttataaatatattaataagtgacaaagatgtaattaaaaaatatagtatttattgtgagctaaaatttagtctatgttattttttgtgccaaatttggtacaatttttactttgcccaaaatttagcacacattttacattactattgagattaagttttagcaatataccacatttatagttctccattggagatgctctaaaatttttagtggtctgattac

SEQ ID NO: 102477 - DNA, 568 bp, Cannabis sativa
aacacataacctaccaccccagtaggaatattcgaaggatcatcagacgaactggtcgtcttattagatgaagtggcacaactaccatggttgctcatagacatagtaaaaacccacgtagaacaaagatactggactaagaccgagtttaccaaaaatataatcatatagaaagcaaaacaccggctagacataacaaaaataaatatatatcaaagctcaaggtggccaaaaataactagacataaaaacggacgccataataatgctcaccaactggacatacgtgttctaaatagaccaccagttatggtcctctaattaactaaaggaagacaatattctagctagccggatagccataattcaaatcacacttactactatgcaaagacaaacagtaaaaatgtagatttttactacccgcaaagatcaaatacaaacacaaacatacaacaagtaaaatatatttactcatctacaccatagtaataaatatgaacatgtacaagaacatgaaaaacataacaagaacattcaagggagaaggtttagaaaacttacctct

SEQ ID NO: 102478 - DNA, 2309 bp, Cannabis sativa
tagaatagaataaaactcatcaagaaaagaaatatatatttggtataaatttatgtctttgactttaaattttagatttctaatagaaatttaatttcagtttccaaaatacatttaaaattacagtataacttccacaagtttaatatccattttctgtcaatggatctgaactatatgttaatgtatggattatgagttttgtattctgtgactgcaacccacttggactattctaagaactctttattgtaactagacctaagttatcaaaagaccacaactacaatttaatatatctacgggatttatatcttgttcatagtggttttgacaagatcattctatgtgatgaaaaattatgccaatatctaattgaaagtaggatcatttgtattagaacatatggatgtacattcaggggtggatatgagttatcgttgaattctttagacaatcacaatagattttaccttatgcaagaaatttgaaatgtttgagaaatttcatgaatttctagcaatgtttaaaaaattatggtaagtggttaaagatcttgcaaagtgatagggctgaaaaaatatttagtggatatgtagttcaaagatcattaagttggaatttgaattgtatccaaacttaccttcctagaaattcagattgcatacagatgaaagtaatagatctatgattagttactagcatctgcctaagtcatgtccttctaaggaaataccctagtgataggaaaattttagaatgattgaatggttgtgtacttagtgtaaaccatttctaaattcattaatgtcctgatcatgaacttaagaaaagctagaactgttaattaagatttacatgtttgatagctattctaaagtgattaggggtggacaatcctatggtcattaagataagaaagtgtttgtttcaacaaatagtacttttctaagaaaatgactagatctgaaagtagaaaagtcgaggagatatactttcttgattccaaaagtgttctaacatctaatttttttatatatataatatggttccactgactctgttgtattgacacaactgatgaggtcaataccgttagtgctctttgacagaaagtcacggtaccttgtcgaagtgggaaggttttaagaaagttatcctgttatgacttggaagacactcgagatttaatccatttttagtttaaacaagtaagtaatggatagatggatagttaggttagaataagagaataaggaactaagaagcaaaaccaatagaacctatggttaaaacaattcatatggagtaaccaaaagtttttaattacaagcacaagaaaggaatttttgaaaataagtctattcaatcgactatacaaacttcctgaacctagtattataggtttgagattatgtaaacctatgtcttatggtatacctggtaatttacttactctagtgtaattggctttagtaagatgctggagtatttttctaatggctaattctaaaggaagtcttttgactccgagacatagaattttatttatctaaggaacagtttcaactattctagaaagataaaggccaagaaaagaattccttaggataaacagtgaagggtctcatgtatgcattagactagacacctgctgttgagtgggaataatgagtaggtatcagattaatccaggaaaggaacatttaaagacaatcaaataaatcttaaaatcatgaagaggaactatatgttagtcaataagagtggtatattaatacccttagacttaatacccttagactataccaaatcaggtttctagacttgcgttagtgatagaaagtctactgatgagatagtgattattctggggtggatcagtgattttggagaagtgtaaaaacctattgaaagtctctaactctaccagtgagactaaatgttaaagttgcaggaaagatacttattcagcctatgaaaagttctatacggttttggagttgtaccaataatgaattaaatactagtgttacttcctgaataacactaatgtagttgccaaaaagtaaagaatccagtatcccctgaggagtagacatatagagaggaatttcacaatatcaaggattttgtgaataaggatatgtaatggtggagcacagtggaatataatcatgattatagtgttctaagcacagtggaatataatcatgattataagttcaaaaggttaagtcccatgatttgtcaatgtatagtacactagatttagactgacatattaatcaacaataaggtatacttac

SEQ ID NO: 102479 - DNA, 714 bp, Cannabis sativa
ggtctgagtcctgagtttgagtctgagttttggtacgagtccgggtctggttccaggtctaggtctgggttttggtctaggccaagttttcaatccgtgtctgtgtccgggtctttatctgggtctgggtctgggtctacgttcgagttctggtacgagaattggttctggtccaggtcttaggtcacgggtcctaggtccaaggtcatggcgaaagtctgggtccgcgttcgggcctgggtcctgttattgatcccattctaggtctgagtctgtgttcggttccttgtcttgatccgattttggatcgaggtacaattcctattccagggttcttattctggttcttgttcctatttcgggtctcgggctccgagtttgggtttgggtcctggtctagaaattgttctaggttcgggtctttgtacgattccaagatctagacaccaactacgggtcaggtccaagcctcaggtcgtgggtcaagatgcgcatcccaatcttgggtccctgtctcatttccattcggatcttgggtcccagtatatgtctgtgtctgggtctggggcaaagaccatggttgggtctttggtttcagtcctagtcttgagtctttattttggatctaattttgagtttgggtccccaatctaggtctgggtccttggtgcaggtctgagtctcccatccgggtctgggtcctgggttcgggtc

SEQ ID NO: 102480 - DNA, 602 bp, Cannabis sativa
accatagggatggttccttatgagattttgtatggctggaaatgcagatctacaattcacttggatgaaacttgagaaaagaagtatttaggtcacgaattagtacaatccaacgctatagaaaagatcaaggccagagtgcttgcctcttagagtaggtaaaagagctatgcaaatctgaaaccagaaatgtagaattttaggtaggagatgagatcatgatcatgtattcctacgagtgtcgagtgtctttgatgaagaagattaaacgttttgagaaaaaggggcaagttatgccctaggttttcggagcctttcgagattctcaaaaaggttagactgtagcatatcgtctaatcttgcttgtagctctttcagcagtccataacatgtttcctgtctctttgttacggaaatacatttcaaattctactcatgtgctgagttatgaaaacctagaacctcagccaaatttatcatacgaagagcaactaattcagattttaggcaaaaaaagataaagtccttctgaacaagaccatagctttggtcaaagtgctctggagaaacagtaaggtggaggaagccacctaggagttaga

SEQ ID NO: 102481 - DNA, 524 bp, Cannabis sativa
ctcttcttgtgctaagagttcatcaagtatatattcacaatgttttagctcttcaaagtgatcaaaagtagtaagattggaattttgaagagtagaaactttatgatgagtactgtgaatcttctttggcaacccaccaaacttagttcgatgccacgatagaagatgggatgagcaggaagacagattattcttaatctggagaataggatctgatgatgcattagtccaatgtttgttgataatgtccaaggcctcttcctcattcagccaaattttttcaaagtgaaaccgtgatttatattgtctatgagttcctccagctacactgccaacggaaaccagcaaggctctatgatcagattttaaaaaatccaagtgactgacctcattcgcaccaaagtcagggagccaagtattattgataaaagcatagtcaagcctctctttgacattagtgccattaacactattattgtgccaggtataacgagccagggcatcaacggagcagtgtctttcaa

SEQ ID NO: 102482 - DNA, 576 bp, Cannabis sativa
gttttgaatgtatttcttgtacccgaaatcatatttctggaattgtgtactcggatcccccctccaatccgtggcttctctcgtgtgtgtatggccccccttacctctttgcaaagaaaaagttttggtcggacatcatggccattggggacagaggtttgggggggggtccttggttgattttaggagacaccaattttgtttttagcgactctgaaagagaaggttcctccggaagggacccgtttatccccttcatttccaacctggtagatatgagaggattgattaacctgcacgtccagggtgataagatgacgtgggacaaccatagatctgggggtcatcatgtgaaatcggctcttgataaagggattgtgaatgaagcgtggctccatctgtttccgaaagcaattatctgttcctcccatactagtaatttggatcatcgtcctctttttctgaatactattggtaatcctccaagctctaagagaagtttcaaatttgaagagggttggacgagggacgataggagtaaattgatagttgccaatgcttgggattcagtgaacc

SEQ ID NO: 102483 - DNA, 768 bp, Cannabis sativa
  modified_base (737)..(737): a, c, t, g, unknown or other
gttttactggtgttttataaaaacacagtatttttaaaaagatttccgtgtgacagtatttttgtaaaagttaactcaaattccaatatttttgtaagttttcctactaatattatttgtagtggttaacttttttttttcaatgtaaataaaggaaagcaactcaagtgggacacgtggtccttcaacattaaatttcttattttaaaacaaataggtaaaaaggatgatattgaaaagtatatatatagagagagatatatatgagaaatgataagggatatcaatatcatttaataaataatatagaagactagctttgatacctatgacttataattactaaaatgatcactttttttgtgtcaagcttcttcaaatagcaatacaccatattttaatccatcattataaacatgcatttaactctttcaagaagagttctattaatccttttagctaagtcattctattgtgtatctagctaatacatccttggtacagatcgaactgattaaaacttttcaaaatataatttaagactattatctgttctgagtttcttcactttacaacctcactacaaaattgggtctctaacgaggacatttgtcctcgttagaacttcacatgtcctcggtaaaaccatataacaaggacatgtttgtttagttttcagtgaccctcatccaatttacaaaagttttaaaggcttctgttgcccctgattttgcccnatatacgtggaccaaccaaacaagaacacgt

SEQ ID NO: 102484 - DNA, 552 bp, Cannabis sativa
tgacaattagactacaagcatccaccatattgtcatacaattagttttctttcctctttctcatttccaaagcataatgcaataataatgcatccccccactttctaaataattttagtcagcttaagaaccacagcatgctgatttttgtacagctaaactactagccccagcaccccaaatgtgtattaagatatgtgctccacaaacaggagcagaaacaaaactttcgaaatgtacctcagctttgttgtcagtatcagcgagcctttgttttatatctcttgctattgaaaagaaaacttgttcaacatttaaattcgtttcggcactttgcaatatatgtacaatttagactctcagtacacaatacataaactcaaaatttgcatatcagattttcacaagctgtacagcacttacagtttcgaagaacttgatcccatactcatcagcaagtgcttggcccttaggcggtgggcacatcctataaaattaaggaggtaatatgatcaaataatgatagaaaaaaaagtcaaaataaactttaag

SEQ ID NO: 102485 - DNA, 836 bp, Cannabis sativa
cgttcgtctaattttcacaataatcgaaagccatgaattcaaaaaaattcaaattcataacttcgcatttcttatttctaacatggtaaaaaactcggaaatggggagtttcgagtcttccattttcgtagaacaacaacatctttaagaactggtgactagctttgccagaacataaaatggactaagtgatactaaaatatcacttaggcatcaaaaaatacatccttaggatgttttcctactcacccagcatccaggttgacgtcatatgtcaacctgggcgttggccctagaacaacctttagtaaaatggtcataactcactcaattttgatctgattgacacgattcaacttgtattttgaaactattttaatgctctatcaagtcatgtctcacatttcaattgcaattctaaatatcggctccaaattttaccttaagagagctacaaatttaagctacaacttacctagagcgggtccgccgtcgtaacccggactctgaaagttgacaatcaatctcagaagttaattttcactgttagttcatcatctacagtcaaaaatagccaacttgaatttttttcatttttttattcttactttcaaggacctccttcacttataaaaggagagctccactagctcatttttcacattcagaaaagtacccataaagtcagagcatctccctctagaaattagaaatttcacactaagctaattttcttataattctcttgataaataaaaactcgaagtagacgtaactccattaccatcactacatggggagtgaactactataaattttgtgtctctctaaattat

SEQ ID NO: 102486 - DNA, 732 bp, Cannabis sativa
ggtttatgtgttatttgatgaataaatgtgatttacgaaacttttccatgaaaaaattttatttttattctgaaaataatttatttggattctttgtgaaaagttaagcaattataatttttgcagaactcaattccgataaaaattgagagagatatgaaggtttgaaaaatcaggtgcatatggtgtcgagatggtgccaatcgcactagcatctcaaacaaggaggctcattgtgcgcacagaattcagacagtttgtgtctatagctcggcatgcactcagctcagacacactcccgcgcgcatcccaccctgcatctcacatccttcgcgcgcatctgaggttgcgtgcagcctcttgctgggcagtctaggtgctttgcaccaaaaatgcaattttttttggtgatttttcactaaatttcaaattttttaattttcaaatcctaaatatcaaaataaaatattatttttaacatttaaacttaaatatcaaattttcaaattaataatatttaatttttaatagattattatttattctgaggtttaaatttaaaaaattgattattttattttttaattatggtcagattttaaaattttattaatttcttaaatatttttatatatattataagatattttaatattaggtatattttaaattaaatgatagccttatcttttaattttaaatattatattaaaattatcttatatgataaat

SEQ ID NO: 102487 - DNA, 597 bp, Cannabis sativa
  modified_base (334)..(336): a, c, t, g, unknown or other
gtgcagaacaccactgaacaaatagggtgaaaaccaacaactcataataaactacattaaaaaacaaatcaaaaattaagaaagatataaagaaataaatatctaagaaatatgtatatatatgtaagaaacaaattcttatataaaaagaagtcaataataaagaaaaaaaaaacatttatagaaaaaaaagtagaattttaaaacataaatccttaccttatataaaaagaagactttaataaagaaaaaaaaaagagttttatttgcaccgtataaacttataaatacaccacattattaaaaaatatatataaacttaaataatttttannnattactcttaatatttttttaaatttttttcttcacatcattttatgttaatttcaatacttattttgatttcattttcataattttttctaactcatgtatattttttttttatttttttctaaaaaattcatataattttttagtttaacttttttgtcagaatatttaaaatatactttatttttgcttgatatgtatattttttaagaatatgaattagaagaaaaaagttaaaaaaaaatcttagtacaattaaaa

SEQ ID NO: 102488 - DNA, 1036 bp, Cannabis sativa
ttttatccttaaaacacatagcttgttataaatgatatcttagtaaactaatctaattactgaaataagagctcttccatttttgactgttatccaagctcgaaggaaatcatcgtttctcttttaaatagttatagaagctataaattctatatctatgattagcgatcccactcaattgcacttaccatttcccaagatgtaagtattgggtcgatccaagtggtcagctgtaacgaacaagtcaaagaacacatgtcgtacagttaagccaaagcctaatcatctcagaattaagatcttttgatctaagatcaattatgtgacattgacttagaaaagacagtaagtttatgatatctttttcactgtcaatatcggtccagtccaatgtatagttaatacatcaaatactagtatactttgccaaaaccctggaaaggacattccacaaatcattgtggaagtaaattttatcattgattatcacgtcagtgtaaatccagtgcagtgataaatcatggcactaaatagtttgaagtatattgtaacgccttgatacttagacgcgctacagtaattttctaattacatacagcctttgctaaccaaagggttttacctcgaaaattgtgctagattaaaactttgataaactttaaattttattaacttatatatatatatttatttacatagaccgggatttcgtacttttaatttttacaaaaattatcaaaatacatttataaactagtcgctcatcgactacaaaataagatccaagatgtcccgacaccgaacactccaggtcgcatcgtctcgacatatacaaacaccatcctagctcggaactcactcttgtttagcctttgcctttcccttacctacagatagaagaagcaactgtgagtcgacagactcagtaagagaaacatgtaacaaataatataattttgacttgtttgtatgcgcccatacacctatctacaaagttcagcaaatgagtaagaacgttcttaactaagatacgacc

SEQ ID NO: 102489 - DNA, 660 bp, Cannabis sativa
ttaatttttcttaattgaacaactgaagaataataaataaataattatataataactcgagtgtataataatatttaaataggcatcataaaataactccacagattgtataactccaaggataaataaaaatatgattaataaataaactaaacttaaaaggaactacaaagcgttttaaaaatatatgtacccataaaaattaaatataaatttatttttctgttggtcgaataactaattaataacgaacaaacaactaaatagcaatccaactttaatatactgattttttttgctggaatatgaaaattaattaggaattaatacattgcattaatttaaaaaacaaaacttaagtaatctcaaaagaataaataaacttaaaagcaactacaaattaattttacatctactcaaaaatatatgtaacaacaaaaaattaaacatatacttcttttaaaaaaaatctttgatattttatcttggtaatatattttattttttaatttacacaaattactatttttggttaaaaaaaattacacttttacgttcatatatattttcatatttttaagctgttctataatataacatgaaaataataaataaaaaaaacaacaagaaaataacataataataataataatatataaa

SEQ ID NO: 102490 - DNA, 1055 bp, Cannabis sativa
  modified_base (405)..(405): a, c, t, g, unknown or other
ttcaatctttctcttcaagctttccgctttggttactttggttctttgtcttttctgagtggcaatatgtgttgaggatgactcgaccaagaacacaatggcaatcacaaaaacagagtagaacaatgagtacaaaatagaacacaacacacaacaaacaataagaaccaaaacaatcaagcataaagcagtaaatgaagagagagattacgtggttcgaacaagaataacaatatgttatcctgcctactccacggccaaaaacagccctttggtctttgatctttatttcatgagaatgttcacaagagattacagtaaagaactgtcaagaacagttcatacatactcgaatgaagctttgcttcaattacaaagatatactcatctctctctctctctctntctctctctctctctcaactctagtttttctcccattctctctcagttctctctctgtagtttggtctaagtctcagtcaatgaaggtgagggtccctttattaggtcttggactgtcataacaaaatgtttgttaattctgttatgacaaaatgtttgttaattctgttatgacatgttcgagctagcaagttgatttgatccaagagtgagggtaattcaaatgtgtagccaaacataacaaatcatccacctttggctttacatttgagttgcaaacaccctgttgagtaagagttgttctggtcttggaaaatcttagcagtcaagtatgtttagcaagttcagacatagtctgaactttgctaagggaacatacttggttagcatgtcttctgggttttctttggttctaatcttcatcacttggacttcaccttttgcaatcaaatttctgatgaagtgtagcttaatgtctatgtacttagatctttcatgaaacataggattcttaattaattgtagtgcactttggttgttccagtgtactacagtgtcttttgcatttaagcctaattctgatgtgaaaccccttaactaaattgcctctttgattgtttctgtgacagccatgtactcaacttctgttg

SEQ ID NO: 102491 - DNA, 936 bp, Cannabis sativa
  modified_base (885)..(887): a, c, t, g, unknown or other
ttgtagtcttccttatcaattttaagtatgcttttaaaattgaatttcaattttattgattttaaaatccctaatttcttaattttttcttttatcaatatacatataaatgcaacatatacaccatttacattgttaatgtatgttcttattatattaaatagtaagctttatgaggtgataatgttattgacaaatataccctttacattattattgtatgtttttattatattaaatagtaagcttttcaaagtaaaaaagtccaatagtcaaaattaacagcatagtagtgcacttgtttgtatttctcatttcaacttttttattaagtgtattattatattaaagtgtatttattaccttttaaaactctatttatttttcttataaaaattaacagatacttttttagttttccttttccctggctcagtgtctcttgctctctctccagatttgtttcatcttgctctttctcttattaggtttttttgttgactgacactttttagctttggttttccctgtgtagagtctcttattctctctcttgatattttcatcttctctgcaactttcctttgaaaagtctaattttcctttttaaaactctttcaaaatataaataaaaaaatatcaacttcctattcgctcaaatttcgatcagggacgattacaagatagaggctttagctttggatttgaacaaacaaacaaaaaaaaatagtcttctccattgctttctctctcgccattgccatctgaatctcttcatcttcaacttcctgcaaccaccaaccaataatggatgacctgaatgaaatcgtggcttttacaacagtaaggatggtgtagccacactgtccaacaattatagtcttnnntatcaattgtaagtatgcttttatgtatgaattctattttattgatttc

SEQ ID NO: 102492 - DNA, 737 bp, Cannabis sativa
ttcactgcaaattctaactccattagacaagaggttgctttcccacacaaagcattagccgaaggcagccgcttggtgctagcccacaacaccgtccctacatgatcatgagccataacaacgtccctacatgatcacgagctaccattgtcagtatcatttccccctccctaattgtcacattgcacttaattttggtccagtctatgggcggaggagtccatttagtggcaacatgataaggcttaaaatgagacaaaagagagtgatcatactttgtaaaacaatgagcaatagaatcaatattaaaatgtatgtcatgcatatggtaattatgtaccttgttatttctcgctctctagatagtgtcaaccacgataaatgcatataaaaatacttcattaacattcacgtctttcgtattcaaactctaaatgaatttgatccaatcccataatctggtcctcgattccataacgggaatgaggccccacgaagatactctccacagatgcaaagccatggtacaatggagaaacaaatgttccataattactctctcccacaaattttacaagaagagtcttcaatgttcatacgttcacagagaatgaattgaatcgaaaacgcattggaaaaaatgctccaccaaaacactttatgtcgttcatgtgttttactattccaaagtttgttacacaaggaaggagcaccatggtagtgctgatctctctcaa

SEQ ID NO: 102493 - DNA, 505 bp, Cannabis sativa
tcttttgtatttttgtattttattatgtgtgtgttcgttttcatttagttaactgaagaaatcagttttagttatcttcaatgtttttcatttatattttattttcataatcttcattgttattgtgtgacaaaattgatcttatttagttttcacaatgttcattgttattgtaagataaaattggtttccgtttattttttgttttttgttcagatggaaatttgattcccccaataaggatgcaacgaacgatgtttctaaagatttaagtactgaatttgagaagaaacttcctctaattaaaattaaaattcttaggaaggttattcacaagaaaaaaaaaagtaaatttgatccaaattttaagggttcatctttggcatgtattttttttaagcatattaagttttttaatttattttcttatgtatgttcaattttttagttgttcatactagataactggttgtcgtgttttattgttgttttatgtaattgaggt

SEQ ID NO: 102494 - DNA, 689 bp, Cannabis sativa
tatatccacaacattgatgcaagattttctagttgttgacttaccatcggcctacaacatattgttgggtcatccagcattaattggacttggggcggttagttcaattaaacacctatctttaaagtttcaaacactagcaggtgtaggtgtagtgcgaggtgaccaactattggcttgggaattctatcgcatagagctacaaaataaaaaagtcggccatcaattaatggtagttacaactaaggaacgcgagaaataggaggaggatctagatcctcaagttcaagatgaaaagaacctgttaaaaccaattgaggaattggagaaagttatttttgatccagaaaatcccacaaagtgtggattcattgggaaaaatctggatgaaaaactaaaatagcaactaataagttttgtgtaggcaaactaggaccagttcgcctggagccattcagatattatagggattgaccctaaagttatttatcaccacttgaatatcgacccaaattacccagctaaaagataaaaaagatgaaccttggattctaaaagacaaggggcagtcaaagaggaagtggataagttgctgactaatgactttatacgtgaggcattctatccctcgtttatatctaatcctgcccttgtcccaaaacaagacggaacttggagaacttgtatcg

SEQ ID NO: 102495 - DNA, 722 bp, Cannabis sativa
  modified_base (675)..(677): a, c, t, g, unknown or other
tttagaatatatattacttcacaataaaaaaaaattacatgcaaatgataatattttggattttattttttttctattacacatatactcttttaaattagtatagcttgtaaatatattcttatcttaacatttgttctctatcattttcaaaagtaaatctatagtaaatttacaaagcattatttagtataaccaatgattgaaatcaaataaagattaaaaacaaaataaactttaaataattaagaatggatttgtaattttaatattaaaaaatattatgataactaacattattttttttttatttttaaggaaaagtaatacagattttttaaagaaaaataacataaaaaatttaaacacacaaaattataaaaaaatttaatttatgtaagagaaaaacattaactaagttgaaagggaaattatttgcccataaaaaataaatacgtatacattatattttcaaaagaaaaaaatattaacttaattaattagatcttaaattttgtaaaaaatattctcataaaatcattaaaatattaaaaagtaaatttgattaatataatatataatttatatactaaacacgtgtggtagcatgtacaacttactagcatacatatatatatactaacaaaaagctacgtgcaaggcacatatattaannnttatgctagtttttttctatgttgatacaattaaaaattaaagaa

SEQ ID NO: 102496 - DNA, 753 bp, Cannabis sativa
tggacaaccttttgcaccttccatatgaagctttaagagaagatcagttatgtatttagtctgagacagatacatcccagtttgatccctgtaaatctcgactcccaggaaataatgaacttctcctaagtcattgagtgaaaattggtgattcaagtcagtaacaagtttggtgatgagagacatatttggccctgtaactagtatatcatctacatatacgagaaggataacttgagttgaccctgagccataagtaaacaatgagttgtctgacttcgaagcagtaaaaccccactgatatagacagcttttgagcttgtcattccaagcccgaggggcctgtttaaggccataaatggctttcttcaaaaggcatacatgatctggcttttcaggattgacaaagcctgaaggttgcttcatgtagactgtctcatggagagtaccattgagaaaagcattagacacatctaattgcttaatgggccaattttgagatactgcaagtgaaagaacagtgcgcacagtgactggttttacaactggggagaatgtctcttcatagtcaattcctggggtttgtaaatatccttttgctactaatcttgatttgaatcgattgagagagccatctgcattcagcttgatcttgtgcacccatttattatcaataacatgcattcctggtgtgtatgggacaagaacccaagtgccagcctttttaagtgcagcaaactcatcagtcataga

SEQ ID NO: 102497 - DNA, 614 bp, Cannabis sativa
  modified_base (588)..(588): a, c, t, g, unknown or other
ttttgatttaaatggatactctctttatatactgtacactttattcatcttttttatgtgtttttttaattaaaaaaattaataaaaatgtttgatgtgatgttgcttatcatattgttggcagaccttttttttttttttaataaaatcaattttttttttaaaaaaaaaaaagagtgacaaataaggcacaataaatgatgatttgaaagtgattgtcacatctcataattttttttaataagaattaaattttaaaaaaagtgatacataaaactcctttaacgttattattattccattgttcttcttcatcttttttttttcttccatttttgttctaatttcttcttcttctttcttttttttttctcttttgcttttgttagtaacttaagaatgggaaagaactacttcaaaaaagaaaaaaaaattcatagccctacttccccagttcttgctaaaagaaaactaggtgatggtacttcgaagagcactaaatcaaaataccctcgatctgtattggagaactccaactctgattttgagttggagccagagttcgaaatgttgggttttatgccctanataaaactctttacaatctgattagt

SEQ ID NO: 102498 - DNA, 508 bp, Cannabis sativa
attaatttagagaggagattatatgcacgttgtttgaatatttatatttcttattttctttcttgagtacgatatatgtatgtacacatatattggttaccttttcttaactttttttaagaggtgaaatgcttgtggttgatgagatttgggtgattgtccttttgctttgtttggacgactcaaccttttgttaaaaaaaaatgtccacttatcattttgcttcactaatgaaaatagaaaatattaagaaatacttagtgttagtaacttgttctttcataaagcatgagaagatcatgaattgaaacaaatggagttcactgtcatatttatattttgtttgccattctgagtttttgcccaagataatatgaaatactttagatacaaactggtattattttttgaaaaactaggttaattagcaatttttcttccaaaactttgacatgtactaaattatgtcccctaaacttttttggaactattaagatttttagattta

SEQ ID NO: 102499 - DNA, 502 bp, Cannabis sativa
ttacaaaaacaaaaagaaaaagattatgttgggggtatcaacccaagtcccacattagaagaataagcaagagttgtcttggatatatgtgttttatctacttcattaatatgagcttttgggaaggtacccgaaaataaaattgtgagagcttagacccaaagcggacaatatcatataaaatctgaaacattcggtatttataccgcaatttaatctattataattaattcattacattattattactattactattactattaccatttcattacaccaaaccaaacactcggaccaataatcctatcccatgttaccaaacatagagcctccaccacttgggccacatttattaatctatattattattcatcattttcttcattttgatgattcaaaaagacactggtttcacaaaaagcatttagatattttttttaatctttttcaaacaaattaagtatcgttatagtcaattccgaacacagtaatgagttgg

SEQ ID NO: 102500 - DNA, 631 bp, Cannabis sativa
gtatatataaaaattaacattagaattttactttttttttggattggtccaatttaatccaataaatattgaatctaaaatattagatgaatccgattcgatttaataaatattaggtctaaaatattggataaacataaattaaaccaatatacatgaaatatatccaatgatataaccgatccaatccaactaattaattggattggatcttggatccattggatgactgaaattaattggatcggattgaatgataaaatatatcatctaatatataatttgattagatctggataggccaaaaaatattgaatgtgttccaatgaatacctctagtggcaagtcaacactttacacaaccattgagacagaattgatagttaaatactacttaactttgtataacaaatcatcttttataggtagtgttttacgattggttagcgatattctttaaaaattaattttaaaagttatatgttagtacttaattaataatataatgtctttttgtggataagattgtggttgttcaggaacctctggcaacttggggtcatgatttgacgggtaattttaaagagaggattcaaagctgcaaaagaagaattggtactttgaagaattg

SEQ ID NO: 102501 - DNA, 583 bp, Cannabis sativa
tatgttaatactctcttgagacaatattgatcaaacgcacatttgaaaaaccgatgttcgtgtgtctcaaggtaagttccatacatatatagcacttctacataataaaactttactattaattagtgggttttatattcattacaccaatttaaaaataccagttcagatcatcaaatttaaactaaacaaattatatcaaaacagagacaccgagtgaaaattactatgaaacaatgaagaagcgggccaagtagtggttctgccaataactaagcccattccaaactagagacatcgagtaacaccgttaagttccttttttccgatggctaacagggtggttttgagagggaaggtaactgatggccgagtaggttggttgattatgggcctgacggttatggttgtaagattcatgtaacaaatgcaaaagattgtgggaaaggtgtaacaactgaagttgatgtgcattatttgataccagatggcgctaagagattggcaaaattatactaagcaagtcaaatgtggaaggataatgagattgatttggacctagataagccgaaggttgatatta

SEQ ID NO: 102502 - DNA, 687 bp, Cannabis sativa
  modified_base (198)..(201): a, c, t, g, unknown or other
tcaaatcaaagtgaatcatggtggattcaaaaattgtgaaaagataacaaaattggagaagcaattttgaatcttaaataatcaaaatagtgaacaaaattgatgagaattttttcaactttggtataattaaaggctaatctcaatgagaagataaccttaaaattatgagaacaaataatcacattattttttaannnntgttgtgagtttgatattttagttttattgagaaaactaaaagtatcaaatgatattttttcaaagtgaccttaaagagtcatttcaagagaaaaatacacaaaagtggtattttatatacactttgtggtagaaatatgggggtgagccacaaacttaatcaaaatgtgatgagacattattgattagtttatttgatttaaaattcaaattctaaatcaattttggttatgtgcatatgcgaaaattttgacatattttggtatcaaattttagtgaaaataatttcaagaaagaaattaaagagaaattatagagacaaagatgccttctatattttaaaatgaagatattatcttgatagtgaaatatgagaaagtgtgagggtgaaatctaatatttatcaagcaatttggtaaaagaatggatgatatgtgaaatttaggcatgcttggtgcctaaaacttgagtataacttagacatgt

SEQ ID NO: 102503 - DNA, 1073 bp, Cannabis sativa
  modified_base (390)..(398): a, c, t, g, unknown or other
cctaaggctataacgggaacaaaacttagaaaagtgggtataaattaaagaatattaaaaggaaggtaaaaattaaaacaggtacaatgaaagggttatagagtataatttcctctattttatatgctaaatgatttttggattggcacttagaattagaggaaattacactctataccctttttatattgtcctattttatttttaccctcttttttaaaatttaccatgtttacttctttttttaaatattgtactaattttgcccctgtcactttaagatactctccatgtgactctcttatgtcagggtattttaggtacaatacatataaaaagaggtatatttcaatcaaatataaaattagagataaatttgattaattgatnnnnnnnnntggtatttttcaacttatcccttagaatcaagtatcaagtcaataattatgtgatagttttttgattggttttaagttattaaatttttattttttatttaaaaattaatttgaatatactaataaaaaaataaaacgttgataataatttaaaacttaatgatcaagtacttataaaattttttaaaaaatataatttaagtattattatttttaaaaattaaacttaattatttatatgtaattaaataataaaatatttacttcacaaattattttttaatttgtcaaaaatatgatggagtgcatctattcacttcattttgaagagagcatcacaactatttactttataagatatgaccaatatttatatatataatttagaaaaataaaaatgtatctaaacattttcttcgtacttttattattattattattattatttttatttattttttaattatttattatttttttatatttttaataattaagaaaataaaattcaacaaaggtacatttttgaaaggtatatattgatatatttttatttgtttagtcatctaagaaatttttttatgattatgtatactatatttatttaaaatattttttaaaactttgaaaattttaaaaaattaacttgtttaaaataaagtttaaataatttat

SEQ ID NO: 102504 - DNA, 1134 bp, Cannabis sativa
cggtgtaaattggaacatatttgtcgtgctttttctgtttcttcttatttttagatgattctctcaagtcatcctttcttttggtgtttgaaccattcggattatccacttttgttgagatagtactttctgtggtagtacttgcattgcgtttgtttccttagccagtcttcagcaatttcatctcatttcttgcttcctttttgtgcataaacacttgcgctctttcatttaattcattattgtttcttactggacgacctctaagtcatcccataactcgcccccagctgttgaaagatcggatccctgcttgaagagcagtaagctgaatgctattattcaaatttctaacttttgcagctgctgtgctgaagcgactcaggtaagccttaagtgactcgcctggttacgctttatgttagttaaggatgatgcttcaagtcgtctatctctagcagcttttaattgtttcttaaaatccttggacaactattcccaagacattatcaaatggtgggtaaaattatcgaaccagctgctcgctgccccaattaaagacgttaggaataaaatgatcgcaaattatttgagacattgttggctcgcattatggtattaaagttattcaggtgagtgactgggtccgtagtcccatcatactgggagatgtgtggatttttgaatccttgggggaattcagaatatcgggatgaaatggctcgatttcctcatccaagtcagagccaggtaatttcccatgttcaccatcctgatattttctaaacttatccttcaactcaatgattcgcagttggatgggatccacttgctattggttgacattaagttgatggcgtaagtcaggtgcattttgatttagtcgctcgcgaagatcgggttgtcttcaattcaaatgttcacgaaggtcaggttgtctttgctcataattgctcacagatctcgtctttgagtaactctcagattgatagcttcgtgtattgctcattctttcttgatcaacataacatcgaggcctgtttccttctcgtgtttgccttcctgatcgactgtgttcttgagatcttgagtgtctcaagctagaacttgcctcgtcttgtactggccttctcc

SEQ ID NO: 102505 - DNA, 543 bp, Cannabis sativa
gtaaaaataataatgaagaatcataatgtttttacttgcccaataattaagcttactattgattttatcaagaattacactacagtcccaaatttttcatcttgttggtctcaaaaggaccccaaggtatttaagagggaatttaccttcagtcatattgactttctcgagaatattaacttttcattcttccttaactccttcaaagttatgggacttcgagatgttggcagacaaacccgttgtatcacaacatctttggaaagcatcaaacatacaatttactgatgtcatgttgcccttgcaaaagataaggaggtcatatactaaacataagttcatcaatctgagattaatcttacacatcgggtgaaatctgaaccccttgttgttggaactctgagctaagagtcttgtgaggtattccacgattagcacaaagagcaaaggtgacatgggctctccttgtcgaaaacccttttcccctttaaaagatcgttggatagggccattcatcaaaaggttataatttgtagttgtcag

SEQ ID NO: 102506 - DNA, 956 bp, Cannabis sativa
aatctcacggtttaatcttggccgttgaaattatttcaccacgatctcaacagttgcagtgtgttgtcacatcacatccttatcttttgactaaaaaattaaaagataagaaatctcgcgatttaatcttggccgctaaaattatttcaccacgatcttaatcattgcagtgtgttgtcacatcacatccttatcttctgattccaaaattaaaagataagaaaaatctggtagtttaatcttggccgctgaaattatttcaccacgatctcaaccattgcagtgtattttccttccttatataatctcacacttctcattcaatttgatcacatctattcaacatattttctaaatagctatattttctttaaaaatgtcttccattcgcggttcttcttactcagtagaagaagatgtgcacttgtgtcgtgtctatgttgacatttctcaagatccaatcataggaagaaaccaaacaggtaataatttttgggcaatagttgaatcagagtaccacaaagatagaaaatttagtaataaacctcgaccagtaagatctttgcaaactcaaatatctactttgaatagtgaagttgcaaaattaaggggatgtatcaaccaaattgaaaataaaaatctaagtggtgctttagcagaagacagtgtaagtgtttgttattataatttatttattattagtatcttatttttctatttttattgacgttattacttaatttatattgcaacagttattcaagcgaagatgtgataagcctaagataaaaaagtacgataaaggctttaaatttgatcatgtgtggcacaccctcaaaggtattcaaaagtttttcaaatgatgaaaacatcaatgcaccacgtagattccaacacgaaggtcctagtttcacttcatccaaatcatcgtctcacaattttgagtctccaacatc

SEQ ID NO: 102507 - DNA, 812 bp, Cannabis sativa
  modified_base (164)..(170): a, c, t, g, unknown or other
atatctaccaagaacattctctgtaataaatactctcataaataacaaagactcatggactaaggctcgttaatgccccaaccacgtaaaaaaaaacccatgcattaaacttcctacagcttctgtatattcattgtttaatcggttgccgaaaacctcggtcnnnnnnntggtgctttcattgagagctgagggaagcgtctttaaacagacaaccttataagctaaagcaccaatggtggcaactcgcaacacacatcagccccgtcctcctcaagacgctcaaaaccctgaagacgaagaagtggcttcaagagtgaacgtggattctgaggaacgagaggaggccaacgatgacgaatatgaggaaaactttgacaagtatgacgcctatgacgaagacagttacatagagctactgctcttaaggcaaaaggttgctgatcatgaagctgagcttgcagcccaaaaagaacaaaacaaaaagatgcaagaggtgatggtcgccatgcaaaaagccatggagacagcagggatccaaattcaccctaaagccatccctgcaagactcgaggaaacgccagaagagtcctcaccaagcactcagaagtataagtccagggaacctagccccattcgataaccctctgaaggaaaccactggaaaaaccctacttccatcccagggaaaaataaaaagatgtaggattcgcaaaaagtacgctcggatttctcgaaagggaaaggtccgtagaggggaaaactccaaaaagggagtcttggccctaaggatcgagaggaccgaaagagcg

SEQ ID NO: 102508 - DNA, 709 bp, Cannabis sativa
aagcataagcccatgagcaatttcgtcaatttctttctttgcacatggaacaaagctaccgaatgagatgtacaagaccgagttagggagcttggagtttagccactcgatgcaatttgactagggcttgatgctggtgggtacaagagaactgttgaaacgtgatggaaaaagtgggccaattgcatatatgggttggttctcttgtatggccaaaatggtctcaaactcgagctcataaactgtattacagagaatcatatcagcccttttcacaccttcgaatgctttctttatgaattcgtgcatgatagtggagacatcgagttcttgaaggtttgatggtaagtcatttggtttaatagccttgactcccggaatgtaatcaataatgtcctctctattatctatatatcaacaacaaaagacattaaaaaaaattaatacttttttttagaatagaaaaaagtttatacctcaaaaaccaaaaaaaaaaaaaattatccaattcttaacatggtataagagcaaaaattaaaaataaaaaaaaaaaaaaaaaatctctagcaactattcaacccaaaaaaaaaatccgatcgaagtagaacaaaaaaagagccaccaaaaaaatccaaaaaaactgatccaagagccaaaagtcaaaaattgttacttgtgattcgggaatagtgagaaaaaaaaaaaaaaa

SEQ ID NO: 102509 - DNA, 583 bp, Cannabis sativa
  modified_base (515)..(519): a, c, t, g, unknown or other
tgatttcctccaccttgctaaccttgctgagtctttggatcttgccccatgtaaaaatcatcatatctgttataacagtaggcaattaatgaccatacctgccacacacttggcaggttgatttgttgtattggatcttcttcttcctcggccttgaaatccaccacctctgttgtgtgagttagcaccaccaccacaatttccattgtctccagtatgattttctctgcctctatttggatggttagctggttttctaggcagattggtagctacaatatttgcagttggtcctccactcaagttagatgaaattccattctccttgttagatggtcctccactcaagttagattggtagctacaatatttgcaaatggtccttcaccagcaacatgtagtctctctagcttactatcaaagcttaactaacatatcttggacttcttgccatgatatgttaggtctagttttgatttgaacaacaataacaagcagtgacggacccagaattnnnnntttgtgggggcttatttatcataaaaaaatatttatagctacattataatcactcttactaaat

SEQ ID NO: 102510 - DNA, 647 bp, Cannabis sativa
  modified_base (171)..(196): a, c, t, g, unknown or other
caaattaaacaaatttccatttttcaatttatactagatatatgtattaaacaaaatggaaaattaaataaatgcaatttattgcctaaattaacacgaaaataggaaaataattaatattccaaataaataaaaaaattaataaaaaattcggaatttttcctttttttnnnnnnnnnnnnnnnnnnnnnnnnnnacgacatgtcgtttttgcaaaaagcaaaacaatacgtcgtttctgccaatctgaaggagactgaaaatgcatagaaaaacgacacgtcgtttttccacaaggggaaaaacaacacgtcgtttactctcctgaagggctgcttcacaagacaaaaaacgacatgtcgttttccacaatgtgaaaaacgacatgtcgtttccacacaatgacaactgcatgaaaaaacttgcaaacgacacgtcattttctgcaaacgacatgtcgtttgcgtcatcttcaacaaccaaatcgggtcgatttttacccttttttgtgcacgcgggtccgacgaacccgacccaaacaagatcagaaatttcatttctgatgaccaaattgcgtgttttcaaatctaaaatgttctaaatcaaataataaagagatccacatagattttatgcacgaaaacacg

SEQ ID NO: 102511 - DNA, 812 bp, Cannabis sativa
cagctgacaatggtgtttattttgaatttcaccctgatttctgccttgtcaaggatcagaagactcagaaggtgttgctgcggggtactcttgaagctggtttatatgtgtttcactccataaatctcccatcaatcccagacagaaatcaaccttgtaatctacatgttcctttacatgcaatctgcaacaatattcagtctataccagacactaactcatgtaataataataaccagtctatgtccacttcaaacaacaattctttgtttcatctgtggcattctagactaggacacccagcagccaagactgttaaaagtgtactcaacagctgtaatattcatcacattaataaagcaatttctgatttttgctcagcttgttgtttaggaaagatccataagtttcctttccctaattctgaaactgtttacactcaacctttgcaactcattcacactgatctatggggaccatcacccatgatctcatcaaatggttattattactatgttcatttcactgatgcatactcaagattcacctgggtctacctacttaaaaataaatctgatgcaattcagacttttattaactttaaaactcaggtggaaaaagaacttggcttgcctattaaaaatctccaatccgattggggtggagagttccaagctttcacctcttatcttgttgaacatggcattcatcatagactttcatgccccaccactcatgaacagaatggtgtggctgaaagaaagcatcgacatctcatagaaactgccttaacacttttagctcatgcatct

SEQ ID NO: 102512 - DNA, 624 bp, Cannabis sativa
taaaatcccaaagctagggtgggccaacttttcctaaaaactataaatttcacttaaattttttgaaaaaactattttttaaattttaccaaacacatactaactcataatttttttccaaaagtgattttagcttttttaaaagctcccccaaacggggccttgttactatataaaaattattttaatattccccaacttggttagtatttaaatcaaattaccacttaaaatataaggttcctcattacataataaacatatgaattatagcgataagtcctcattatatgtcgaatattatattccatgtattacaatatattcattatataacaatatacttaatgttgcaatatacttaagcgaacaaaccataaacttcatgtttattctggtcctcttacgatagtttcctcagataaaattaaggtgcatataaatataagaaaatattgaaattagagttttattgaataattttagttgtacaaccaaaaaatatataggggtaacttaatctcatatttactttattatccttgaatttgtgttgcggcatgcctttagtcaaggatattgcgatcacccaattcagtgttacgtgcttaatgaccacttatc

SEQ ID NO: 102513 - DNA, 724 bp, Cannabis sativa
ctcagacacattgtcagtaaggatgggatcaaggttcatctacggaagattgcatccgttaaggattggccaagaccaaagatagttactgaagtcagaagttttctgggtttcgctggttattatcgtcagtttgttgggggattttctaagatctcaacacctttgacagaactaaccaaaaagaaacagtggtttttatggatagacaagtatgaaggaaactttcaagagctaaagcagtggttgatcacaactctggtattggccctaccattagataaagagaagttcgtagtttactgtgatgcatccagacagggtctgggatgtgttttgatgcaatatgatcgggtaatcgcttatgccttccgtcagttaaaggagtatgaacagtgatgcccaactcatgatttagaacttgccgcagtagttttaactttgaagatttggcgacattatctctacagagaaaagtgtgagatttacaccgatcacaagagcctcaaatatttctttacttagaaagattcgcatatgaggtagagacggtggtttgagttgtcaaggactacgattgggaaatcctttaccatccagggaaggctaatgcggtggataatgctctgagcagaaagggtcccgggcaagtaactagtttgatcaagatttcaccctagctagcagatgacacggtcagattaggtattgagtttgttgtagg

SEQ ID NO: 102514 - DNA, 670 bp, Cannabis sativa
agatgaaattcaacaaaatctcttcatcgcccacaaagcaaattatctcaattcttagtaattaaatattattttattgaattagcttacgttgcaaaaaattatttattacatagagataaagaattaaaattgatgttgtgcaaaatttaaatagaatttattcttaatttttataaaaaaaaaaccccattttatatttcgccctagacctcttatcacattaagacggccctgtgtgtggtgtgcgagtattgatataaaatatcgggactaaattaatatttttcttacactgagccacatgcaaggactaaataacatcaaacaacttgcattccattccataactgtttgatttataatgatttgatgatagatggaatgattacatttgaaatttatagtaactattcaaccaaacttattatgaaagttttaattttccaatcgtagctaggtatatgatataaagagtttatattaggtacattggaggattacaaaaatagtatgtatatataagaaatgcaagttaattaaaggagaaagtgaaggagactctaataataataaaatgcttacccacccctatagctagctagctatagatagatgccatctaacctagctatagctatgtacacaagtatatcaattaattatatac

SEQ ID NO: 102515 - DNA, 518 bp, Cannabis sativa
  modified_base (67)..(68): a, c, t, g, unknown or other
tttattttgataaaaaatcaatttaaggtcttatttgtaccatgttagaaaatacatggtctatttnntcatttaacaaaacagagggtcttattgataacttttgcaaaacacaaggtccaaaacacagggtcctattgataatatttaaattaactctcagttataaataaatacttaagtttaatttttgacaataataatacttaacttcacaattattctgcaaattactgttttttaagtgacaaaattttattattttgtgggacctacgcaccttttagggtaatttctactcctttgtttacttgaattttaaatagaggagaatgttaaacttgagtccacattccactcaaacccaaacctcaaaacaaaaaccccttaaaaatctctattttcccacaaagatgatcatgcaggaaagtgacatttacacattttatcaaatataattcctttgaaaggcttgtgatttagtatgagtttgactaagtgttgaatcattcccgaaa

SEQ ID NO: 102516 - DNA, 1047 bp, Cannabis sativa
  modified_base (32)..(36): a, c, t, g, unknown or other
aataatctggattacattgaaatagagttttnnnnngggcataaaacccaacaattaaaccataagcgtgaaaattcatgcaaacataaatcacttctaatttcttagattgataactaatcacattgtaattggttttatttagggcacaaaacccaacacgacccatctatgccaacccaaattatcaacataggacgaggtttgttgcaagaaatcaaattttctttgatcaaattttgagagcaaacctcaatgtgtttgcatggtcacatgacaacatggttggaattgattcatttgtgatttaccacgccctcaacatagactcccgcaaattttgtccagtatagcaaaaaaatagatttttagacaaggaatgagcatgggtactgaaagaggaagtagaaaatgctctgagctaactgaagagtaaatgtttgtcttataaatgtgaccacttttatgagttaatacattaaaattgattttttaaactattgattatttagataaagtgaaccaaaacatacataaatgagtgaaaaatacttctattttttattgatgttgaataaaatagataacatggaaatggagttttatttagggcataaaacccaacaatacttgcttagtagtgacgcgaattccgtaaagaaccgtgctcttctgattacgatatattcgctcagtagagatgtgaattcttgagatggatggatgaccaagaatacatccttagatctcaccaggtagagttagattgacgaaatagagaggccaaggatctgataaggcggttcaactagagaaccggtgtaagaggccaggatctcgtcagagatccacttcaaggaagactagttgatagatcagggagggtctatcaacaaaatgactaatttggccccttaggagctaggatagatcttcccttgccaaatggaggacataccttttctcaaaggtctaatagcgagaacagccagatcccagtaaccaacaacatggagggctggccagggatctcaggctcaacaatag

SEQ ID NO: 102517 - DNA, 1142 bp, Cannabis sativa
  modified_base (371)..(373): a, c, t, g, unknown or other
tatatgtatgtgtgcactcttaatgggtattactaatgaatgggtaaaattagaaaatttgaatttttatacttaatttttctatttaattaaaaaaatatctcatttttatttcatataggctgagattgcagttccatcggtaaaaaaaaacttttaaatatcatttttcagcaagaagaatatgaaaagaaaaggttgagtttgagttaaatatttttgcattaacatatttttgatatagtgtaaaaagagatattttttgatactctttttaattaagtagttaaattaagcataaatattcatttgtgatttaattattcgttattaaatcaaaattctatggtttgatatttttaaaattaatnnntatagttaaatttgtttagtaaccattcacgggtaatacccattaagaagtgttccttatatgtatatatatgtatatatatgtgtgctttatgtaaatgtataatttttaaacaatgtatatatatatattatatatacatataatattttgcttaaaaattttaaatgtataaatttgtaaaaatttagattttaagtgtatgtagtaataaatgcattttataggattatattttttttttaattttttggcaaagttattacatttgaaagttaggagaaagattcctaacaacatattattgaagttattaaaattagcttttcgaaaggaaaataaaattctgtcaaactactatgatgccaagaaaagattgaagaaattagggctggggtatgagccaattcatgtgtgcaagcataattgctgtttattttacaatgaacatgcaaataaagattcatgccaagtttgtggcaccaatagatggataacttcagaaaattaaggagcaaaaaaggtgcctcataaggtgatgcattactttctgttaactctgcgactaaagagactgtatacttctaggcatacagcaaaatacatggcaccacactagtaaatcaaaagatgacgttgtgatgcgacaccctttgtttggtgcagcgtggaaggattttgatgccaaacatcttgattttgctagtgaaccatgaaatgttcttctaggtttagctaccgatggctttaatctatttggcaacatgag

SEQ ID NO: 102518 - DNA, 723 bp, Cannabis sativa
  modified_base (640)..(646): a, c, t, g, unknown or other
  modified_base (678)..(678): a, c, t, g, unknown or other
ttaatggtgagtctattatagtcgaatgttcaacttaagactcaatatttgtccaagttattacacttgagacttgtacttcgttgatattcagcctatacgctgacatggtctggaaagtacccttgggtacggttgtcaagagttttgtctatggcttggaacctgtaaggaactctgccttagccgtagcccatatagaaactctgttcagttcttttttggctatacagttcttgcagggccttggccttatgcatgcgaactgattttttattcatatttagccttatggctttcatgttcttgcttttggcctataggccctctattttcgaacactactatcatttagccttaaagtcttttatcatggacatatgatcgtcctggctatcttcttatggccttaacacgtaagtatctagatttacttttctttatgtcaagctgaagtatggttgtacttgacttaaaggtagatttagtagcttattctaagcgttaaaatttctctacataagttctatgtgctacttcaatgcattgtacgatgtagggtgctccctcagtgaacgcacagacttacgatctcttggtcacttgcaacttactaagtttctgttggaaatattttacnnnnnnntagatttactaataagtatgtttcattaacancctaatatgaattctaaaacaatcaaataaacacatataaagttt

SEQ ID NO: 102519 - DNA, 637 bp, Cannabis sativa
agggtgtgtcccagttattatctcggatagttactcattaccatttagtgatgtacttgattggagtcaatttactgtacaaatcccgatctctaaaatacctgaaatcaagaacattttaaatggcattccaaatgagaagtacttgagattatataataaggtttctcaagtaaagaaacattttgtgttaaatagaccggctcaaccgtttgatgtgattcatatggtgttgcactcaatttggttaagacgacttaactttaagattggatcccaaaatagcttgtgattaagctttaattatttcattaatttttttgacgtattatttcattatttgatatgcaactttttaatatatacatatactagataatgtatccgcgcgcttcgcgcgcattttatataatttaaaatactatttttattttatttttctcaaaatatgttacttccatattttacgtttttttttatatttactttgttgattacaccaaaataattgtcaaaagttatttttagtgcattgagaagatctttcattttttgtaataattatcctctcgtatgattcaagtattatcgaaatatctttgacactttctttaaaaaatatttgaaacatataaat

SEQ ID NO: 102520 - DNA, 773 bp, Cannabis sativa
  modified_base (34)..(55): a, c, t, g, unknown or other
cgctcttccgatctttcatattaggatgttaatnnnnnnnnnnnnnnnnnnnnnntagatcctggtaaaatatatccaataaaaagctcctaagagggagatggggatttggggttttaggatcctctgaagacgacagtgtggcggcttcgacgattctctgaaggcgagggggttctcttgggtttagatcgagtgagttccttggatctatttgatgagtttgtggaagaagatgacccattaaatctctgatttcttttactctgtattctaacttatatatatatatatatgtgttgaagatgataaacgaagatatggtgttgaatactttttctttcgaagattttttttgtaagattgttttgaagaattgattttaattaaaaaaaaaaaattagtcacattgagatattgttggtaagttgttcttaaaaattcttttattttttttttaatttcatttttaattttattttacttttaaaataatttaatttttactatttttatatcaaattaaaaaaaaaaatgaattggacctattagataatgccaagtgtgtatctagttggcatttaacagataacttaacgttaggtaccccatttgcaacaaaatactgacgaaaggtatttttactgccaaaaaaataagttaggtatttatttgcaactctgagctaaacttaggtatttacgccgcaaattactcatcttttagggctcgtttggaacgccgtattcaggtcgtattgtattgtattatat

SEQ ID NO: 102521 - DNA, 562 bp, Cannabis sativa
  modified_base (27)..(28): a, c, t, g, unknown or other
actaatcagattgtaaagagttttatnnagggcataaaacccaacacaggcttcaaacttcatgtaagttcttaatacactttacacttgctttgtttgtttatattacatgtttacagtttttgggttgaatgttggacttttggtgataattttgcctgagtttgttgagtgatgcgttgaattcctcttttttgcatcttgattgctcctttttactacgtttctgttgaggaatcgtgtttaccttttgtaataacgcctttagggcttagagtagttcgtgctttctcggctttgcccttttttccctttttctttttctctttcttttggcaatgtcactgcctttcagatttttgcacctgatgtttgccaaggaaggtctctttgggcttcctaattttgcaagcatctagagggggcttctttccagcggttaggggtcccccattccctattacacattagggtttagtttggggcctaactgctggattttctcaattttttcagaatcaaaatgtctgcttccgcatctaactccaagtcttccaagaag

SEQ ID NO: 102522 - DNA, 709 bp, Cannabis sativa
  modified_base (158)..(158): a, c, t, g, unknown or other
aggtgtcataagcaggaggcaaacctttgaatatagcagcaacatgctcttttacagtgacaagatggccaacagataataatcgatcaacgatggttttaatacgcagtagatattcattgatagacaaggaacctttcttttgattttgcaactgngtagtgtaaagatcaatcttagcagaggtttgagtcaggaaatatacctccaaggttttctagatttgagcggatatgtttcagcaccaacgatacgtgtgagtatcccatcggacatggaaaagagaagccaagagtagagaagctaatcttgaacctcccatttagtgtatctgggattgatttgaccaagaacttcatcttcttgatttaggtacttgagaggagggtggaacgaatcagatatgtaatcttgaagacgatggccacggatgcagagagaatctgaggacaccatagaagaaagttgttatatcgtcaagtttaacagagactttgtgagaaaacacaactggagtaaagctggcagccattaacgaagcttgaagcacgagaaagttgcagagaagaaatgcggaagctaaaaaaaaatcactctgataccatgttgaaaagaagagaacgaaaaggaaagagagaattcaatagatttctcattgaatacagaatgagcaaatgctctgtttatatacaagatcagtaaagcaaaa

SEQ ID NO: 102523 - DNA, 523 bp, Cannabis sativa
aatatttggtaaataatcatgtttttcaaaactagatgagtacaagggcttcttaatttaatcacttagattttgaaatatcaacacatgcaataacaataactcacgggagaaaatataattaagatcacaaagtaaattgatgtcattacttctttcaaaatatattattattattattttaaaatttaataacttttacattttgaaggagcaaacacaataagaaaaatggtgcagctattataggcgtaatttaatttcggataaataaagagtctccattaagactctttatattttattagttgtcatttcactataaaaaaaaataaaaaaataaaggactttacaagggaaatgaaaataaaatcatggagttactaagtctattgaaccagcaataatacaagatgagaacgagattgaatttttggacttacattatattaaccttatttttcatttgaatcacaattttataataaatttattttatttaattttaataaattattaatta

SEQ ID NO: 102524 - DNA, 642 bp, Cannabis sativa
ctggaagaatctgaaaaacggataacgagccatccatctcgctataggaaggcatattcctggtaccttcactaatcagctccagacatctttcaatgagattcactgccccgtcaagtcagctctctcagaaagaagttgacattcaaatgattttggctcttgaagttcaccttgtcactaagaactgcgattgtcaaatggagcattaacccttcacacgcagaaacgatgggatttacattatcaacctccaaaagacatgggaaaagctccaactcgctgccaggattattgttgctattcaagttcctagcgagatgccccagcgaaatatacttagcagcgtatctatatcaatgtcagcattgaccaaacaaaactggataaatcaccactgtatgattttcaaataataaccacatttatttacgtggtgcataattaaatcccacaatttcggggaaatattattgtggaatttgaatctgattgtaattaactgccaccctatgtcactataaataagggcagaatgtactcaaaaaaggttgaaaaattcttgagagaaaagaaccctagtttgtatcagaataatctgaataagattgactcgtagactatgcagaattttaactgcaa

SEQ ID NO: 102525 - DNA, 661 bp, Cannabis sativa
acaaatgaactttattcagtggcggaaccaggccacaaaataaagaggggccaaacaaagtgtatttttacctattttgtttttagtatatagtattatataaattaatataagaagttaattaaagagctttatccaacacatataaaataatataacatatgcaaatatatattattgattgagaaaatataaagatatatataaatatatatcatgcaaaataatacattgtttaaaactgcaacctacgttcttttaaagaaacaaaatcatcaagtattgaatctaaatcaaaagtctcagctatctctctttcaatataaacaactaaattgtttgctggaaaatcatcttcaattttattccgaagccttgttttaataatcttcatagctgaaaaggctcgttcacaggtcattgtagatactggctgaagagttaaaataaggcgaattagtctatcaataagatagtatatctttgatttatctgtctccgttaatcttcgacataattctgcgatgattgacaaattttggaacttcaaattagtaagcacatcaagttcaaaatgcttcaattgaaaccttaaattaattctctcattctcagaaaaatcaagaggataatactcttctgcaagacaacatatatcatc

SEQ ID NO: 102526 - DNA, 544 bp, Cannabis sativa
  modified_base (30)..(30): a, c, t, g, unknown or other
ttttccaagcttcatttcggttatctgggngttccccagagttgagataggctgctattggtgtcatccagttcggagacgtgttgaccatttcgatttcttccgtgccggtgatgctgggctcttcaagaaactggatcgggaccaggttcgccttgttacttatattgctactcgctaatcgggctagcgcatctgctgttgtattttcttctcttggaattcgcctactgctgtagcttttgaattgtgcgagcagatcatgtattttgctcagatatgctatcattttttctccctgagcctcgtatttgctagatacatgatttaccactagctgcgagccactgcagatctcgatgtgctccgctttcatttccttcgccagtttgagtctagcgattaggtcttcgtattcggcctcgttgttggaggattaaatccgaatttgacctctgcatgcaggtgttgccccctaggtgtgacaagggcaattcctgcgccggatagctaatctgtggccgacccatccacatgcagcttc

SEQ ID NO: 102527 - DNA, 714 bp, Cannabis sativa
  modified_base (661)..(680): a, c, t, g, unknown or other
agatttgtttatgtgaatctgatggccattaggtaaagtaacaatattagcaacaagattagtgtttagagatgtaaaacaatgaagataatgacatatatgatgagagactccactaactacaatccataaaaaaaaaaattatcattaccaaagacgttagagaccacatgaagattttcgctggtggatggagcgctttggatttgctgactgagtaatgagattaattgttgtctgagttgtagttgagaagagccgacaacaggggcttcaggactggccgaaacttggtttgcccgagcagtaggtgtatttttctttttgtcaccatatctagatggaaaaccatggagaaaatagcacttctcaaccaagtgacctggtttaaggcaattggaacatgtagggcgaggcttcttgttccgagaaggttgattcattttcggcttggcaggggcagcagtaacaatgtcggtgttgccaagacaacgttggcgctcttgttgaacaactatggagaaaaccttggatggtggcagaaggggatccaagagggtgatttgagcatgtattccctaataagattcattaagaacgatcaagaattgaaggatctgttctcgagcgtagtaatcttgaactttttgcatggtaccannnnnnnnnnnnnnnnnnnnaggagtatttggttgatactcgttgagttcatcc

SEQ ID NO: 102528 - DNA, 609 bp, Cannabis sativa
ttaatttgtatctccattgagattgttgctctaagttttttttttttttgttctttttatttttgtcttattcatattatttataaatcattatttttattagtattttattttttatcaatttatttagttaataatttttacatgtattggttatacataaaagtttttgagatatgtatatttcataatttaattattctctaaacttgaattaaatatatccctattgttgaaatggatgaagtaattaattagttagacagttatatatttaaaattttttcaaaatcataagtaatttttatagtaaaatttatgtggaatcctgtatgacaatacttgagtataataatatttcttataaatattttatgtttactttaattttttctgttttagatttttaatgaaaatagttaatttttatgcagaaacttattttttttactttttctatttatttattatttgtaattgtttcaaaaatttaagagaaaattaatttatcctaaaataaaataaggagtatttacataaatatgggaaaaataaagctagtttacattaatatggtaagcaaacttaataagaaaaaatatggtattt

SEQ ID NO: 102529 - DNA, 940 bp, Cannabis sativa
ctaaaaaaattctacccatgaaaaaccaagagaaatcatctatacacatagaaaaatatcttttaccattcaaactttcaatctgaattggaccatcaggtccaggttaagaattttaagaactccaaaagtgtacatatcagtaacatttctgtaagatgtttttggttgattgccgaactgacatggtccgcctttgcctagagcttctttatccaatttaggtaatcctgtgaaaatccctacattgaataattcttttagattttcgtaatgaatgtgtccaagtttcacatcagtggtgttatcaagagtagagtgacaagtagcataagagtttcatctctattattaagaaaataagaatgactactatcaaaattaatagtgtaatcctgatcacaaatttgactaatgccaaggaaattaacacttagtcctttaaccaacattacattcttaagcctgggtagaccttcaaaattaagagttcccatccttagtacttttccaacaagaccattaccaaaagtaacatctccacattacactggtataatgttgtcaagatagtctttttcacctgtcatatgcctagaacaaccacagtcaaaatacaacatttgagaagcaattgatttaaaacaagaagaaacaaccaaacatttatttttgacaacccatttttatttttgagaaacatatttctttccaaaatatttagaattaaacatgttttgcattgtaatacatctaggttgaatgtgaccttttcttccacaaaaatggcatataagaatgaatagattcctatttcctttgggattgccaaacttaccaaactacctattttctgtaatagtagtacatttttgttgggttttatgctctaaataaaactctttacaatctgatgagtaatcaatataagaaatttgaa

SEQ ID NO: 102530 - DNA, 743 bp, Cannabis sativa
  modified_base (547)..(547): a, c, t, g, unknown or other
aggctaaggttgagcaccggtgagtccagagctcagagatgattgtacgtatcaagatggttacacttagagagttcaatctcgggacaactttgacttacattttgtagtcgtagagcgacatgtcaataaagtgtattttgaatatgaatgtaaattttaaagacgagatcccaactttttgtacagacatatatatatttataaattttaaagtttaattaaaaatttaaatttgacatgattgttaataaactctttgattagcaaatgagtgcacagtaagtaaaaaaatcactgtgggggggcctaagcaatagggcgttacaatatgacataggccgatatgaaattaagttttctttatcaaacatatcgtttattataaagacccaattcatatcataaaaatgatcaataatagatcgacttgaatctcgagtaatcatgaactcttgttcatgttattagtttatttgattcactcattaaagtttctgagagaagatgattcttacaacttatattttagaaatctaataatatngattgttgggaacatgatctacaattataaaatcctaactttcctaacaaaatgaatgtttggaagcctttaaatggtaagtcattatccacgtatcatttttttattggtatattcaaactattttttaaaaaaataaaaatttgatgacttagaccaattaggaatttccacatggtaatttacttaatactta

SEQ ID NO: 102531 - DNA, 559 bp, Cannabis sativa
cccactctctctgcaatgttggttcgcccaatttctttccctttgttgccttcatcccgttcgttatgttgatggttgtcctcttcggttattccctcctctaaccagccctttatgctgttctgggctttgtttaggtcaattaatattggtcctggcctaataaacacataatgtagtgattggataattgaataattattatagggatctaactcaaagataaaaaatctgaagtcagaagcacatgcccgctactaattatagccaaaattaattaatataaaatctaaagctgaagaagatgtgatgtcatttattcttgtagtgattactagaaaaaagcttcgtgtgatttgcttacagtcataaattagaagggttatatatatataatattcaaccatttaaaataagtcaactgacataatcttaaaaaaatttagacaattggacgaatagacagtgcttgaagaccacataatatagtcaaatcatactctaaactcaaacacaaaataaacccagatgttaaatgacacccaattccaaaattcca

SEQ ID NO: 102532 - DNA, 675 bp, Cannabis sativa
acctcttgtatttctcaacctcttctttgagcatttcggggctatatttaaaatcttggaatcttgatgcagcatctgataacaaaacatcaagtttctgagggaaagtatccatgtgcctcaagtcacctactctaatgccatttcgaataactttgctcgagtaacaaggtccaatccctctccttgttgttccaataaaagacttggcaagctcagcttctctaagcccatcaatctcttgatggaaatcaaatagtaggtgggcacgatcggaaaccaatatccttccgtcgcaggagactccattcgattcaagcccatcaatctctttgaaaaaaccaggaagatgaatcacaactccatttccaataacacacatagtttcctcattcaaaataccagacggcacaaggtgaagggcgaatttctttccctctgcattgtagatggtatgtccagcattagctccaccctatttaacaaaacactttcagggaaaaaattcacaactctaagctcagctacacttgaaaataaaggacagaattcaggaaattcgccaaactaacaacatgaaaatgttaaattaccccgaattttttttttttgaaaagggaaagggtttgcaagtcttagacagaaccctccccgaaataaattaataagcctcgc

SEQ ID NO: 102533 - DNA, 586 bp, Cannabis sativa
aattccgtgaaaccgtattttgttgtttttgtgtatttgtgaaattaacccaaaaataataggaaagtggagcgtgaattcaagccctataagaaaacatgtccacccaagtaaaacataacacgaaaatataaacttacgggtcatgctaagcttacacaaaacacaaaatgattcatatctttctatggaccgacacagcactcacatattattgcgggctttttaaatatgggtgaggcctgacatagctatctttttttattattctctctcaaaaaaacaacaaaacaaaacctttttcttatatgtatatgagaatttattccttcatcacggaagttttttcttaattattataagttattcgcaaatgctctacatttgtaattacccaatgtttaatctcgtgtcgtgtctctccttttttcttttattcttctccaccattcaatttataaaggtacttaaaaaaaaataatccctaactcaaaattttaaccaattttaataagggaaattttcatgggccaccttattttgacaattattttcaaaaataacgttatttttgttatgttaagtt

SEQ ID NO: 102534 - DNA, 555 bp, Cannabis sativa
taaatgataatttaatttgataattaattataattgttaaataaatagttttagcatttataggattgaaattagaaaatatgacatttgttaaataactaattacttttttattataatactaaaaaaattaaaatagacacataaagagcggctatgttacctagttattataaataatgacacgattacaatacattatgagttgataacaattttaaatgtagtgactacttttaatgagatacgattatgacaataacttaaatgtagtagagactatatataaaatataaataagaaatagtaataacaacgactttaaatatagtaattaaactgaataaatattaattaaaaattatgatatataatttaaatttcataataaaatattaatttaaaacgtccaattagtttataaacacccaatataggctcgaatttaaattattgatctattctatttttgtaatacatattttagggatatatttgtacctaattttaaatattatcactaaatttgacatttgttaagaaaaatggtaaaaa

SEQ ID NO: 102535 - DNA, 503 bp, Cannabis sativa
catcggtaagcttttgatttttttattcagtttctcacttgtagttgtaatacatatacaatttctttgtttgtttctaatttatatttgttatatatataaagcatacataactgagtgattaatgcatgtgttttatcatttcaccctttattaaacaaatataaacatgtaatttctcatttatttttttaggccccgtttggggaagttttttaaaaagttaaaatcacttttagaaaaagtaaaagttatgagttaatatgtgtttggtaaaatttaaaaaataactttttcaaaaatttaagtaaaatttatagcttttaggaaaagttggcataccctagctttgggatttaagcttttaagggaagctacaattttagtttatgaatttttcacttgactgaattgccctcatctaattttaaatttcctatttaccaattacttttaggccttcttacattctttcaatttcatccttattcaaaaaaaaaaaa

SEQ ID NO: 102536 - DNA, 569 bp, Cannabis sativa
ttgtcagaattgttggccctacactgttggagtgtttgtctcatggatttagagtcgaattatcgtttgaaaacacggttaggttgtacgttttcttgtccatagacattagattgagttttgttcaaaccagtagtaccaatcaattttgctatagtggtaacagcagtagtcgacagtgacttgtgttgtgctgtagtctgaatttgggtggtgtgtggaggtggcaaaaatcataggaatagatttatgcatatcagtagatggatattccacaatgtctggtgtatagacatttattttaagtgaatcattactggtacaagaagtaagaattcttttcccctttgaatttgaaccatgttcaacagatgcttggtgtattatgtctttgttttggttagtggcagtggacatagtgaatgaggcattgttaagaactggtggagtgaataatggagaagtaacactatgaaccaagtgagaattagcaacagtactaattgtatgatccgcaacatttgcaatgttttaagtttgattatcctgaagtgggactgctgcagaag

SEQ ID NO: 102537 - DNA, 858 bp, Cannabis sativa
tcaacagattatataaaagcctttgtcttggtgagcaatttgagcaccaacggtttgtttggaatcggtatgttgttcctaagcatagactcatttaatggtaggttgtgagagatagtttactcactcgagatcatctttctaaaattttacatattgacagcaggctttgtccaatttgtggccgctgtgatgaaacttcagagcacttgttcttctcttgtatgttttctcagcaggtgttgaagagtgttaatggttggttgggaactgcttggtcggaccatctagaggactgacagctttggactaagcagctgggaataaaagggtaaatttagtcgttgcaatgattctttcagcaactgtgtattttgtgtggcaaaatagaaacacatgtattttcaatggtttttcttaccgtgttcaaaagattgtagagatgataagaaaagatgctaagtataggttagcaattttaattttaagaagttaaaagatgaggagaggttattattgttaaaaatgacctctttgtaggtgtgggcttgagttgtgtagaggttgtaagttggctattttgcttgttgattaatgaagattttttcttttttgataaaaaaaaaagtaattataaacctaaaaagtaagcttgaaaatgttccattagcaagaaaagaagaaaaggaggaggaacccattttcaaaatttcgaaaaacacatattgcaactcaactagttcctttccctaagacataatttaattttgaagaaacaataagttttaggttttaccacttgagtaaatggcagtcttccatggctgaatacaaacgaaaaacataataagagattga

SEQ ID NO: 102538 - DNA, 742 bp, Cannabis sativa
ccaccatcagtatagatgggaatacggagtatggatggtgaagttagaagagaagggtataatgtgtatgaatacaaaatgtgcctattttttaaattttagtaagtttttattcaaaaaaaaattaatatactacaaatatatgcatataaattcaaattttccaacaattttattctactctattctttttgttactttttaatatttttaagcaaaactaaatattaattaatctaaaaaaataacatcactatttacaaatataaatatttaaataataatatatatttttttaaaatgatttttatctaaaaaaaaaacacttttaaaaattataacttttctatttttatatttgtgatatattcatttctttctttttttttaaaaaaaaaaacaatattaaatgatcacattttttcaaataaataaatttatatttatatcaattaacaaaaatattatattttttttttataaaaattaataactaatttttttggaggggtttttccttttttttttttctttttaaatttcactcattaccatatatatatatatataaataaatatatcctaatcttaattatttttttatgctaccccctcttctctatttttcttatgttgttacaattttttctttttctgtttcaattttatctgtttcaattttatgtaggagtgttcatccaatccaatctgcactattttgctcatagtgcatccgatctgc

SEQ ID NO: 102539 - DNA, 526 bp, Cannabis sativa
tataattactagaattaagtaatttagacagaaatatatgcagagttatatatacccttcgattaaaattaaagattatagactatatatgcatttggaataacattgcaattcaataagatgattgagtaattaatattatttaattgttaattttgtattttgatcctttttttttgtcacttatatgtgttatatatatgtgggatattgctaagacttagtatactgttaggttattttgttatttttattaataaaagtttgatatttcgtttttggatttataaaagacaatgtatgatgatttattaaaatttaacatacgtttttggatatatatatatatatagtgtgtgtaatttatcattctataatattttttttcttttatgtatacatatttatttttaataacttgttattttttgaaatgtgaattgtagataataaattcaaggtcaagagaacaacaaaggagaagactaagacatcgcctctgttgctcctgattttgcccaaaata

SEQ ID NO: 102540 - DNA, 1110 bp, Cannabis sativa
tggatcggatgcccacccctaggtaaaactataatgaacccttaattaaatgggtgtttttgtgtatagtacaataaaatttttaatttttagtcacaataaaatttatgactaaaagtaaaaaattctgactaattatatataaattattattcttatgttagaattaaaaagttcgtgactaaaggtattagtcacaaaaattacaatttattgtcactaatactaaatatgttttagtcacaaataactttttattgtgactaaaaatcacatttaatcataaaaaatttattttgtaactaaaaaattgtcacttatcaattttttataataagtactttgtagatgatgataaaaattggggttcataccttacatgtataggaggctcattgtctattatttgtttgaatttaattcttaattgtgagctataaaactatacttccttaccaaaaaagaaaaaaaaaaaaataggtcttctacacacaaaagccaacataattgtgtctcactttcaataactataattatgattgctcattaaagaaagtaataaaagttattgacaagaagacaaaattacttaccaaaaaaagagagttaattagatgaggacacaacactttaatcaatcaagttgtatttaattaatttagcaaaaaaagttgtatataaaaataggactctaacaaatcgataggcccacaccattacaattaattatatgaaaatttaatttaatccagtactttatgttataatctatattaataaataaaagataatattaagggacatctgatgtcaagcattacagagatagtatattatcattggtacaaaacattattataattctcacatattttgatttgataaataatataaaagattcattacaaaaaatattacttttaattacaataaaatttgtgaccaattataaatcatcattaactataaaaaatccgtgactaaaagtcttagttataaaaattataagttgttgtgattaaatgtgtttttattcacaatacttgttgtgattaaagctaaattagtaacaacttgtgtttaaataatattttagtcacaaataatttt

SEQ ID NO: 102541 - DNA, 955 bp, Cannabis sativa
acgaaatggtctctctccttgtccaaaactaagttaaacaaaatggacaaaatagattcaaaattcaggtatagctaatcttaacactgcaggacaagtttaaaaactatgtctttacacttgcattagcaatcgtgctgtctggccaatacgaagatgatgttgatgaatctgaagatgttgtctatacaggtgaaggtggaaatgatttacttggtaagaagcgccaaattaaagatcaggaactaaagcatggtaatctggctcttaaggtgtgacctggaaaatactgtctccatttatttgaattgttttttgttgcctttaatgtttatgctttcctaaatttttgttgagaaacatcacagcatctgctatgtatcaacgagtttatagcatatctttttctgttgtagtgaattactaactgtttactttcgctgtgtcttttttaatcattgtgcagaataatatggagcaatccatacccgccagagttgttcgtggacataaatttcaggctagttacagtaacaaggtttatacatatgatggtttgtacaaggtccgttgctctaattatgataatatatataagtaaatcgccattaacggaggagtagtagagacactctaatggggaagaaaaaacagaaataaacacggcaatagagatttggttgaacagaggagatggcagtgaaatgagtagagggaagtggaaaattaagtacatttttacggaattctacatagaaatccatattgcaactagtgctgtaacttaaattgcaacaaaaaaatcatatagaaactcttactgtaactagggctgcaaacctccaaccactttaaaaaccaaaccgtaaatttaaaaaaatattcctctattttttttttactatcaatttgtattaaaaattaacttcaagattatgttttaaaaaattaaaga

SEQ ID NO: 102542 - DNA, 608 bp, Cannabis sativa
cttgattttcctgcttttactgggttagaagtatcgtgtattaaacacgtatttaagtgttgattctggatatttctcgggagaaacttgattgtagtgaccccaacagcgagcatgaaccattcttataattgagatcaacaagatatgttttatgtcgattggagatataaggaaatctgtatacttgccagggttatgagtcttactcctgttagatgggtggactagagggagcttcctcgtagtgagatgaccatctcgcattcttgctctttgagccgattcaactttatgcttagtttgcttgttgcaagttagggtatgtgttactcttctcgggtccctcgctattctcctttacccacttatggtttcttattaatactctacgtatttgtacatttattccttgcctaagactttacatactcaattaatactcaattaatgagttattccataaaaagatacgacactgattcatattctctttatctttacatgtgtcctccagcaaatttttgggtataacaattgcccattaaaaagttctttttttgtaaaaagagctttttaataatggagggcattttcatcaaaatcct

SEQ ID NO: 102543 - DNA, 637 bp, Cannabis sativa
agttaattttgatggtagaaaaatgccaggaacactttttagggaaaattattggaaacaacccaggttgacaaaatgtcaactttgtcaacctgggtgctgggtccagtttctggccaccagatgactccatttaattcttggaaacacttttatcttaatctttgacgaaaaaggataatatgcctagaaaacttctaaaaaatccttggaaattgcccaagcagacaaagtgtcaaccttggagctaggcccttcaccaggtaaacctaggcgctggatcccagttctgacccccaaaaggatctatttgtttcccaaaaacactcatatctttatttttggcaatagttaagaatatgctcgatagagttcatctaaagtagtaatggacgtggcccagtgccatggtcaacctaggcgatgggtccccgttctagcctcccaattgatttgtttatcccttgaaaacacccttttccttattttggatgaagacaaggaaagttcttgggacagttctctagtattgtggttgaaatcatttggaatattttacagggatctagatttactaacaagtatgtttaattaacatcctaaatatgaattctctaaacaatgaaataaacacata

SEQ ID NO: 102544 - DNA, 840 bp, Cannabis sativa
ttttattggtccacgtaaaaattatttaaaaaattaaaaaaaataatttgaaattaaaaaaattgtaaataaaaatatacatagaatacacaacataatttgattggcctacataaataattattaaacaataaaaaaaatattaagtaaaaaattaaattaattttcttatcttttctctaatctttatttttctattggaggctttttttcatattcattcctcttcaaaaatatcatcatctccaccaccattatccaccacagatgcccaccacggcaccaccacccatccaccgccaccttaacctctttttttatttccaaacaaccacaattaccaccaactctaccccaactcaaacacaatcccacaactcatatccaaacacaatcaaacaaacctaaacctagcaagatgtcagattcaaatcccagcaacaaaaaacctaaatcagatccacaagaaaaaaaaaatctctaatcaaacaattaaatctgtcaaaaattaagtgaaagaaagagagagagagaaatatgagacaatggagaagctcaccaatcaaagggacaagaagcgagatcccaaatctcgttgtggtgtgaaacaatccattgccaaccctcgcgcgaaacccaaatcctccttaaagacgatattttagatttgtgacgaccatttgtgtgaaggcgataaaaagacaaggaacatgacaaagagagggtcattgtctatcttgttgtttgggttttgacggagctcttgtggcacagagagagggggggatctgttgggttttgtgccctaaataaaaccatttacaatctgattagttatca

SEQ ID NO: 102545 - DNA, 1887 bp, Cannabis sativa
aggcaaccgtcagggtggtttcgagacccaatacacttacctggaatgccccagttgtaaaaagtatcatctgggagagtgtagagggcaagggtgcttccagtgtgatttgtcagggcacgataaaagagactgtccagagcttaagaaagaagaacaaaagattgtagcaaaacccgctctagcaagggtgtttaccttaactcaggcagatgcagaggctagcccctcagttgtaacatgtcagctctcgatcaacaactcttacttctctatgttatttgattctggggccactcactcttatgtggcagccagaatttttagtaagttagatagaccgcatgatagttattataaaggatttggaaccctacttcctagtggagaattaggcatccccaaaaggtggattaggtgtatgccgattagaattgaggataggaaattgagtgctgacttaatagaaatgggtttagcagattttgatattatacttggaatggatttcttatccaagtactcagccagtattgattgtaaacggaagatggtaatcttccaaccagagggtgaggaaccgtttgtttttgtgggattagttcacggatcccggatcccagtgttttcagtattaacagcttgagaattgttacaagacggatgtttagggtttttggtcatggtattagataccacacggtctgagacagtttggccagcagatctcagggtggtttgggaattttttaaatgtttttcctgatgaatttctaagttttccaccgcagagggaaatcaatttcatcatcgatgtagcacttggagtataacttgtttctaaggcaccttagagaatggcttcaaccagaacttaaggaaataaaaattcagcttcaggggttgcttgacttagggttttcacggcctagggtatcaccctgtggagctccttttattatttgttaagaaaaaagatggatctttgcgtatgtatattgactatcgggaattagataaactgacagtcaagaacaagtatcctttaactaagattgatgatcttttcgatcaacttcaggggaagatggtcttctcaaagattgatctctggttgggctatcattagttgagaattcgagaggacattccaaagacatctttctgcactaggtatgggcactatgaatatttgattatgtcttttggactaaccaatgctcgtgaaccttttatggatatgatgaatagggtattcaaggatttccttgatatttgtgcaattgtttttatcgacgacatccttgtgtactctcaatcagaagaggtgcacgaacaacatctcctgattgttctacagcgacttcgagaacataagttgtatgccaaatttaagaagtgagagctttgactatctcaggtgtcttttgttggacacaatgtcagtaaagatggaattaaggtggatcaggggaagattaaatctgtcagggattgactgagatcgaaaatagttacagaggttagaaatttcttgggtctagctagttattaccgttggtttgtagaggagttctttaagatttctatgcccttaaccgagcttactaaaaagaattagcagtttgtgtggacagaccagtgtgaagtaagctttcaggagctgaaacagagattgattaccactccggtattagccctaccgttagataaagaaaagtttgtagtctactgtgatgcatccagacagggtctggggtgtgtactgatgcatgctaatcgggttatcgtctatgcctccgatcagttgaaagaatatgaacaacaatacccgactcatgatttagaacttgtcgcggtggtgtttgctttgaagatttggcggca

SEQ ID NO: 102546 - DNA, 553 bp, Cannabis sativa
cacatgtgcgggctcttggggaaatttgcttctatgagcagatagagtagatgcaaaggcgagacatccaaaggtgcgtaggtgttgataatctggtaacttttcaaataacaattcatatggagttttgttctttaacaacggtgtatgaattctatttattaagtacgcagcagttaatatgcactcactccaaaattttatgggaactttggattaatacagcagggatcgagcaacattcagcaggtgctgatgctttcgttcagctatggcattttgctctggcgtttcaacacatgaaaactcatgcaaaataccgtgctttaaaaacagctccttaaaaacaagttgtggagcattatcagaacgaaacactttgaaactttgattgaactgagtttgaatgtaagtcaaaaattgaggtatgacaaagttaacatcagatttatgctgtagaagaaatatccatgtgaatctagagaagtcatccactaaaataagaaagtatctgtgattcgtgtgtgatacaatgtggtagggtccccaaata

SEQ ID NO: 102547 - DNA, 575 bp, Cannabis sativa
aagtaaaaaaaaattgtaatacaatttaaaacatattgaggagttgatattgttttgtatattgcaattaggtcattattttgttattattctgttgatttgcagttatctttttgttgtttgttaagttgttttagaattgtttttaagttatttttttttattttactgaaatacaatatttttataattttataattttataacatagtatttttaaaaacttagtatagtagaaatatataaaaaaaaagtgaagtaaaaatataaaaatgacaaaaaaataagtattttgtaagatcccataaaaaacgcattttgaaacaaagtctcaacattataatatgggccttatatgaaatgggcctagtgttgcttattctcttaatctattttgcttaataatttttgtctctaataaattaaaaagataattacggattattttttgtaaaaaaattatatttttatatttaataatttttttttttacactttaacaattttccataaaaaaaacacgaaaacaacaaaaaaaaaaaacatgaaaataacattaaaataacaacaaaaaa

SEQ ID NO: 102548 - DNA, 879 bp, Cannabis sativa
actcaagctgagtttgaacgtgctatggctgaaatcaaggaagtctctataggtgcttacaattggcttttagggaaaccaccatctcaatggagcaagtcacatatatcggagtatccaaaatgtgatattttgttgaataatctatgtgagagctttaatgcagcaatacttgaagctcgtgacaagccaattatcactttgctagagaaaattaggttttggttgatgtctcgattttacaacaagaaactagagttggagaagtggactaatcccgtgggaaagagaattttaaaaattattgaaaagaacatagaggttggaaaaaaatgtttggtgaccaggtctggcaactacgagtttgaggtgacatgcaacaatggtagtcaaatggccgtagatttggaagctaagacatgcacatgtaggaggtttcagttatcagggatcccatgcggccatgccctggcttcaatttggttcacaaatggtaataggtttgattatgtgcatgtattctataaaaaagaatccttggaaaaaacttatcaaggaagtgtgcatcctatgcctagtccgaatatgtggccaaagattggaggcaacccaattgatccaccacctgaaacaaagttacctggaagacctaaaaaagctaggagaagagatgcagaagaacctccacctggttcaaaaaaagctcgaagaacaggacaaattaaaacatgtagcaactgcaagaaaataggtcacagaaaggaaacttgcaaagcacaacaagtagttgaggtatggtaatttatgctgccattatgagctaaatatttgtatcaaatactagtgtacactgccattgatttgctgaattttataatg

SEQ ID NO: 102549 - DNA, 695 bp, Cannabis sativa
aaaaacaaccgaaaaagaagcttcataacaacataaaaacaacttatttattctttttaaacatttaatagattttgtttttgttgacttttcaactatttcgattttttgtttccctttttaacgttaaaaattatgaaaatattgatcatactgcttaaaaataacttattctttttaaatttagatgggatgagtcaagatattgttggcgacacaatgttctttctctctctctctctttattattctcttggccaacacactcgtctctttaatctattttttattactcatatgaaaatatgacattccttgattttgtgttgtgatttggttgcctgagcatctttttatttcataaatgtagagaacaacgtaaacgaaacatgataacaacgtgaaaacaacatagtaatatattaaaattttatcacactcattgttctcattatactactctaaaattcaatttagtggttttctttcaagatttttcataaaattattggaaaacactaaaaaatatatgtgaatcaacaaaacaacaacaattgatgaataaaataattaaagcaaaggaaagatcaattttgttcctaaaatgtttgggcaagtcagtgttcatggaaatctcccatttgctcatcttctcttgtcggtgttcatggaggccctccattagattttacatg

SEQ ID NO: 102550 - DNA, 718 bp, Cannabis sativa
atgagtgttaacatcaccatgctatagctgtctgagactaaatggattcatatccctccgtacgatctaatataattaatcatcatactacctcatttatgcaaccacgtgaggcaatcaatatatatgatagataaattcaacttcgttgatagccttgaaactaagcataatactttgaaaaattaagagacattagcgagaagtccaaaagcaattttgacatagaattcccgtgctggataccaatttgaataaatggaactattatatgaacatataacaataaagttaagaataatagaaacaaacagacaatttgtcaaaatattgtcctacgtttaagtttattagagttagtctttgtggaaataaattattatatataaaataattaagttattccttccattatcaattacttttgatggaatactatgtaccttatgtcatattctaacatagtattagagccgcttgtgatctgttgtgagctcaaagtatcgcctgttcaaaaaaaaatgaatcacaaatgagccgtttgtgtccgttgtgagcccctgtgagtatgccaattttcagcatttatcttattccaaattctaaaccttaccagtaagcactacaacaaatttttgtattaccggcggagccacccgccggtaataatagaggagaccgctgacattaattaataccggcggattctgccggtaat

SEQ ID NO: 102551 - DNA, 610 bp, Cannabis sativa
tcagctttagatattcttttataacatattggaattcccaagtatttgaaaggcattgcttgcttggaaaatcctgaaatatgagcaattcttgtgatctcggtttcttccatcccactacaatagaaggctgacttttgaacatttggttgaagccccgaggtattcgaaaactgctttagaccttgttgcattagataaatgctcttaaaatcacctttgcaaaagagaagcacatcatccgcaaagcataggtgattaagcttcaaagatctacatctatcatgaaatgaaaactctgctttctctcccactttccccatgatcctggtcaagtactccataccaagtacaaagagtaaaggagacatggggtctccttgcctcaaccccctttttgcttcaaaaaatccatgaatgttcccatttaacatgattgagaatcttggagtcctaatacaattcatcactagtgaaatgaactgggtaggaaatttaaatgcattcaacatttcctctaaaaagtcccattccattgtatcatatgccttttgtagatcaagcttaatcatacaattaggcctaatagattgcctcccataatgcttaa

SEQ ID NO: 102552 - DNA, 667 bp, Cannabis sativa
  modified_base (631)..(632): a, c, t, g, unknown or other
aattaacaatatattataaatactctatccaagaataacttttagtttgttatataaaataaaatcaagttctaatttagaccaattataaataagaataatctataaattgttattaattatatattttataaattgtaattctaattgtaatttttaatagcaataatatttaagttatatttctagaacttccgcacatacctatttgttaagtatcaagtcaatcgccacgtgtcagtttcttattgattcatgttatttaattttattttttatttaaaaattaattaaaatataccaataaaaaaataacacgtggataataacttgacacttaatggctaaatatctacaaaagtttcaaaaatataacttaatagggccacctccgaggatagacgagccacgcgtgcgcctcagacccttaaggcctcaaaattgtaaaaaaaaaatattagtataaaatattaaatagtgaaaaaaaaaaatataacaaaaattgtttgatgtaatagttttaagctagttcataaattaattcccaaatttattgtgtaactatgaagaattgaacattagagtttttaaaagttttatcattatagtaagggtaaataccattttggannctgtgttttgcaaaagttgccgattggatcctctg

SEQ ID NO: 102553 - DNA, 670 bp, Cannabis sativa
gggggcatgtgggttgtgaagtagtgttagatttgtatcaattgatataattctatgagtggtgttgtgatataatcccgagaggggattcattccattaggaaaagagaggtttgctaatgcttaattatggcaataaactcacttctttcctcaatatactatgctctcagctatctcttggctgtccttacgaggagagctccataatcaaatgtgaggtgaatcgaagttttggctttagcctttaaaattttatgaatctctagttgtttcaatagcaatagttagtatatgctaggagaaataggtaataaaattgtgtcacattgcttaagcagaatattcttgtcctctaattctggaaaaatttctaatttgttaaaatttattgtatgtttgctttggtagttctattcgatacaaataaattaatctttgtgtatctatcttctcttctctatctctatcatatatatacttttcatgctctatttttttttttgactaaattataagtgtggtggagtgagcactagtaggcatggtctcacctgtttacatgtaacaagtttgggtatgtctattttattaaaatacaggcagtgttagatgataacagtgggtcaaaattaatcaatggtttttttttttatatgtatgcacattt

SEQ ID NO: 102554 - DNA, 653 bp, Cannabis sativa
  modified_base (30)..(40): a, c, t, g, unknown or other
tgttaggaatattttaccagtatctagatnnnnnnnnnnntatgtttattaacatcttaaatatgaatatctctaaaacaatgaaaataaacacataagcttttagaaaaacttatattggttgcagcagaatataatgactccttctgcacaaatctctaacccttgttcctttctgttgcagagtattatcaagatgtgagcttggaggtctttctctccttcgagtttaattaccaccgtcttactcactataattgagtacttgacttactatgtgtgggcatggcactcgatcactaagggtgaatggtgaagaacaataaaggaggtgtaaaatcactaagaaaaggtgtctctcatctactagttgtatgatagagttagaagctagattttggtaggttgaaagagttggatgagatgagagcatcatgttccttatatagtgtttcaactagggcttagggattaattatatggattaaaatagaataaaatattgggcaaaaatacacttagggccggccacttaaaaggaccactttctagttacaattttgccacattatttcaaccacttattcttctttcagtaatgccatattttctaattcgatcgtataaatgtcaaatatatttatttaataatt

SEQ ID NO: 102555 - DNA, 502 bp, Cannabis sativa
cccaggttccaccaacaaggggtgggccgcggcatgctcaacccatgtcgcggcacttgggttgaaaacccagaaaacagccaccttcaacacaaatttcagcaacaatacacatgcaaatcctcccaaatcacatctaactctcaaaacatgaacacaaattattaaactcaaagatagggtattaaagcacacaagacatgcattaaaactcatagtataccctgaaaatttagtttgcacaaacacaaaagtcatgcctcaaactagcaacactcaagctcatgaacttgagtttcaactcacttaattcaatcaattccagtagcaaaaatatcaaagaaagttagattcaaacagaataatctctctaaaataacttccatagctcaaccataaaattctatcacaaagttatggaatcaatacccaaatccaagaagatcaacatcaaactcccttttcatgcaactcaagatcaataacacctattcatgctttt

SEQ ID NO: 102556 - DNA, 596 bp, Cannabis sativa
tttgggaaggaattttagggccaagtactcccaagtgttgataaaattgggcggcaaagataccaaccaactcttggctcgctcccttagtgagaatgggaacaagctcagcctgatggtgtcatcgctaactccattcatcttgaatgtctaacaaagctctttgaagttagctagatgcatgtttgggtcttttgatggcagcccccgaaactggactgaagattgaaccatctgcagtatggccggcttgatctcaaaattgttggcgtcaatggcaggtggccttatacaggatatggcccctgtcaagttaggcagcaaatagtccctcaggctacggtcattgtggttgcgaccattagcctggttgtttccattgttgccgttattggcgtggtcagccatgactacgttgtgctcaatctctattccagccttttctaatcttttccttcttctgttttgtttgcatctatttcaagatcaacaggtaatctggcagttgtaccttgacgtctcataaactagtgaacttgaaaaaaagataagattttaacataaacagaattagtactaaaatagaaaagaaaaac

SEQ ID NO: 102557 - DNA, 757 bp, Cannabis sativa
tgaccattttacccctaggcttgattcagcttaagtttaagcatcaagggcattttggtcatttttttagtgagatgtggtggctgtttggtagcttgacagctggatttttctatttcaattcagcctaggtttatccaattatttgtaaaataaaaaattaaatgaaaaagaaacaaaaacctaattttcctacacctccttctctatctctttgagcatcccttgtaccagcaagaacttcaatttttaacagtgagtttggaggggttttggctaaaatcaagtatagaaatcctaaggcaagaactctagtttctatttttagagtttttaagttgttagttagttcaagcatgttgaaatggagaatttgctactgtttgagatagggtttatacttgattgttttctagtgattaatggagttattctgggtctgattttactagtttggaccttaattcttgggttgagcaagtttgagttctaagaactcaaacttagctcaataatggttgtttggtatttatgtgtttttctagattatgttgcttagattatgttgtttgaggttattataggtgttctggaaggtttagtatggtttggatatgaattggacaaggttccgaattagtttgggttacctagtgcaaaccggttaaccagttttacaggccctgtaaaaccagctaaaccgaatcaaaaactgttttctcgaatttttcgtgttgtctcttcgtgtttttttttt

SEQ ID NO: 102558 - DNA, 504 bp, Cannabis sativa
tctataggggttcatttgtggactaatgcttgtcctagatttattagtgctcctgtaacagctaatttgatttgagttaataacatgttgttcttcaaaaaaaaaaaaaaatatatgcactatttaaaaataactatctaaatggtaaataaatattactatttattcttaatgatgtaagttttatgattaattgtactacaattaataaagaatatgcatagtaatggaatttaaagtttttaaatattcattcatagtaaaataaatttttaaaaaataaatatgtattactgctaaaaaaaagtaaataaattttgtattgttaaatattatttttataattttgtattattcaagaatcaattgcttttattgtcatttataagttagcataatatttaaatattaaagtaatgtgttttagatattaggaccttacaatttttttttaggcaaaaaattaaatattattaaattaaattagctaccaagatagcttcc

SEQ ID NO: 102559 - DNA, 612 bp, Cannabis sativa
gaaattgagttgatttatattttttgaaataacataaaataatatatagaactcaatttttattaaaataaaacttaataattaggaggtgcattacattttgtgtattaattatctgtactagaaattagatttagtttgtatatgttaaaagaaaattgagttgacttgtattttttaaaatagaataaaatagaacaacataataatttattttttatgaaaataaaacttaataataatatatttttgaagtgtttataaccagactaattacattttgtgtattaatttgtttgtgctaggaattaaattcaatttgtatgttaaaaaaaatcagctgagagtattattttgtactattttaaaaaatataaaatttaatttgttatttaataagaaatagaatccaatccataatttttataaaatatagtgtgtaaaagaatatttacccataaaagagtataatcacaataagtctcttattacaccgtgtaagaaaaaataaataataccttgtaattttttattttttattttgtgaaaagaatacttatctcagctcctaaaaagaaaagattcttctttcccttaaattttattacctat

SEQ ID NO: 102560 - DNA, 1075 bp, Cannabis sativa
  modified_base (525)..(530): a, c, t, g, unknown or other
gaaaccatgccaatcttcctctgggatttttcatcatcctaaggaggatctttgagatcgctcacaagatctctaccctctggaatcacttgtgaagatcggttgtggcaggctacggggttcccctggtttggattggtcggaagctccacaaccctagaatccgtcgtttccggctccggttgaggcttgaagtctgttggaacaaatggaaaatggttggtgcatctgggtattatgagtctgaaagaataaacttctgaacttagaagaaatattttgggaggaaggaagtaatccattctgaaaatggatttcactaaagagccagaagatttcacaagcctgagcccccattttatatatgaagttcagtgacaagaaagccaaagattgagaaatctaacggatgggaatcgtgcagaatatgaataggcaattcataatgatcttcgaaaccatacaactgccagaatcagtgctctttttttactaaaaaagaaatttttaaggggcaattgttannnnnnaaattcggctggaggacacgtgtcaaggaaaagggaatgtgaatcggtgcaatatctttttatagaataactcattaactttgtaagtatcagagtatatttgtaacccgctgactgtaaggtcttaggcgaggaatcaatgtacgaactgacacttagtatattaacgagaaaccatatgtcgctaatggagaagtcagatcggttgcaataagcagagtgtaaaagtcaaattgcttcgaagaacaagaatgtgagatgaccatctcgctatgaggaaacctcctatagtttcatccaactaacgggagcgggtctcataaccctgccaaatcagaagatttctgtatacccacgaccgacgtaagacatacgaaagaagaatggttccagctcgaatttggaatcactacatccaagtttttgtcaagacatctccagattcaacaattttttttttgacgtgtccagattcaacaattaaatacgtgtttaatacacggtatttgtgtctactactcctagcgagataaacgcctcgatgt

SEQ ID NO: 102561 - DNA, 934 bp, Cannabis sativa
aatatttttaaatattatcatacggttatacattttacaaaataccaaaaaattcaaactattttattaaaatttttattgattctaataaaaaaaaataataaataatagtaatggattctttttttgcttaaaagcagtaatagaatttaaaaatgagctttgagaattgaaatggaagtgactaataataaattgttagatcttagaaagttgaaaaaattaaaaggcattaaataaaaaatatattgaatcatatgcattagctcaatttgcacacctataacctatagagtcggccctgcaaatgagatttggaattttgtcattactattattatttttgctatttgtttttgtgaaaactttacatttaaaaatttttatgtttaaagatttacttttgtatatatatttttaccggtatttataaaaaataacataaaaaataactagaaatatttaaaataataggaaaataatatccaattaataacaaaaaataaaatatatataacaaaaaattaacaacaaattatctagattctaacataaaaatacatcaaaagaccgtattttctgtaaataaaatcataaaaatatttaaaattctgtacaactatatttttgtaatttttttttgttatttttgtgtatttgtaaagtaatcccttattattattattattattattattattattgaaaagagatcttttgcattttactttttgactttcatccccttattagaggtagggatagtacgtgttaaggtcagaaaaactagacacatgtaaaaaacaggtcaacatgacttgacacaaaataaaaacggatcaaacacgacacaatcagcttaacgaatttgacacaattttttaaataaaataaaataaaaaactattattaataatatatttatataaaaata

SEQ ID NO: 102562 - DNA, 728 bp, Cannabis sativa
agaaaatttgcatgtaattgagatttatatatctgagtaaactataaattatcttagcaaacctgctattgtatagaaattagtaacataaattgaattatattaggccttaatatatagatacaattaaaaccaataactttagttctaatcattgttaattcacagatcaatttacttattttctgtttttattttttttagttttcattttctcttagtttcgatatagccgaataaaagtaaaaatttaattttaacgtatataactataacccatgtgggttcgacctcacctttatgagtaatacttgcaatagatatgtacacttgcttcttaaatattttcaacaattttcccacacactcttttggaatatatggataaatttcacaaacaatatcgataagcatcaccaaaaatcgtaaattacaacaacactactacatatcgataaataaatcgctacacatcgctacttgttgttaaacgacatccctaacattcaacacgctctcttatcactagatttcgctatcaacattactagttatcgttaaatatcattcctaacctttaacacactctcttaacgctaaatattgatagtagcatcgctaaaaatgttaaaacacgaaaaaaaaaactacaaaatacaaaatcactcaagtccatttcaggtacaaaacaaccaaacaaaaagaaggatatgtgtagatctattcat

SEQ ID NO: 102563 - DNA, 698 bp, Cannabis sativa
ttataattataaaattaaaattttataaataagtaatcaataagtattatgttaatttacctattaaaatatcatcagtcaccaccaaaaaccccgatatttattgacatggtaaacaactaaaaatattttgtttatcaataaaaaaaaatacatattaataaaagaatgaatcattttttatgttgtgtagaaaagtaatttcataattacttctaattttacttttggtatcataagcaactaaatagttacttttaattatggtgacgatgagaaaatacacatttttcttacatgtcaaaatgaccacattgaaaagtagtttcttttttcatttagttaaccaaaaagtaaccagatttctaaaactattttccgactatattgttgctcacttaagtaaaaaatgaatacatagtttttaaataactaatctaaaaattgaagattatttacgggagatagttttatctaaagttgatcattttgtgaaaagtaatcaattggtatattatcggaatcataattaatttaaatattactataaagtatactaaataaaaaatgaatatatagtttttctaactatatcgttgctaacttaagtaaaaaatgaatagtttttaaataactaatctaaaaattgaagattatctacgggagatatttttatctaaagttgatcattttgtgaa

SEQ ID NO: 102564 - DNA, 718 bp, Cannabis sativa
tggggaacttgaggcacaagtgtcgaatggatgtaactacgctaaagtctactagggccggtcggccaaggattgcgttataggcagatgggcagtctactaccacaaacgtgcagtacttaaaagtactctggggtgtgtctgggcacaaggtgactggcaacctcacttttcccattgggataagtgtggttccattgaatcccatgagctaggaaccgcttagcgacagatctcgattcgtgaggcctatcaccgtgaaggcgtctttaaacaataaattcatagaactcccattgtcaatcagtatcctagccatgatctttttggagatgggggtctctatgaccagggagtcatggtgaggaaaacgcaccatctttgcatcttcttttgtgaaagtaattggctgatccatgagtcgaggtctttgagctggaagctgagtgacttccgacacctcattgtgtttaacggcccagcgtagtgctttaattcctttcgagtggtccctccaatatggggcccaccaaagatcatagccactcttccgttgggtcttggtggcaggccaggggtctactgaggtcctcttgagggtgcagctggttccagtgctccgagtgcacctccgggtgtctcttggagcattagacctcctgccggaaccgggttgagatgggacagctggttcttgatccactcatagaggtgaccc

SEQ ID NO: 102565 - DNA, 996 bp, Cannabis sativa
ttacattaaaatatccacatcacctaaaaaatttaatattccacatgtccttcacatcattttttatttaaaataatactaccatataagtcaattaacagtaaaattaaacagaagtgaacggaaggactacaattctgcattcgttataatttgaggactattcgtaacaagcagtatatattagggggcaaaatttggtagaataaaaagttcggggggtaaaaatgctatttattctaaattttataattgtgcattgtagcataatactaaaaattgatacaaatacagtaaaacctttattaaaaaatacacttgagatcaaacgaattatattctaatttagagattataaataaatagtagtacactagaaaaaaaaattaaaatgccaaaaagtatcaaatgtaacaataataacagtaaataatatttaatactatattataatagaataatttttagagttatttgcgtctgacaacgcaaatattaaattatttacgtaattattattagttgttttattgtttcaaataccatgtccttttttatttattttaggtacgtaaatcgatacaaaacaactcacctttaaacatcagtctttttgtttattatacacgtggtcaccttttttctttatatcttttcaacacgccctattaggatttttttggtttattttttatacacaccttctctctcacttttttttattattttttttgaaaaggttttttttaatattttattaataaataaataattattaaatttaaataaaattgaatgtatcaaacaatttaataagttactaagaaaataaacttatttttacaaaattattttaatagatttataaaattatttgtaaataaagtgaatagtatttaaaatattatatgagttacattaaaaaaaggcaacctcaaggtatcttaaataataaaataacacaatatagtcaaaaaaaatataaaaaagaaacaa

SEQ ID NO: 102566 - DNA, 782 bp, Cannabis sativa
gctaatactgctagcactaattttgtcccttcctatgtgtgagaagtgctagactgcataattgtgaggatgagctactgtgctcttaatgaatttcatatccattatgggttgtgtattaaatgcagtatatacgtgatgaaatcacctatatgagtgtggagtggggccgctcctatgagattgtggcataatttctagagcactcatgaattgccaggcacgcctacggcctatttgcgcaacaccgcgcaaacagcaaagttgtgggggtgtaatgtgattgataagattataatatatattaaagattattggttcataaaagctaaatgtttcaccaatattctatttattgtgtcttatctttctagaactggttcatagtccaaaagacaccatactcaaagcattttacactcatacattttacccagcaaaaattaattttataaaatttcttttgaaatgtgtaggggattgttgtaaattattatataggtgattatatattatatattatataatcaatatatattttaaataggaaacgtggccacttaattttttttttggacttgatagtatatgcatgtgtgccacttaatttttgacttggcaatataatagagtttattgtgttcctattaattaggatcaagatccacctttttctaaaagattaaaagcaacgttgataatgaacgttattgctttgtatgtatatatatatcgtacttaaggagagagcataaggtaacgttattgctttgtatgtatat

SEQ ID NO: 102567 - DNA, 1495 bp, Cannabis sativa
aacttataaagtattccccgaagctacaacacttctttaaaagctttcgtaatcgccataaattctacttccatggtggaaagagcaaccacagactgtaactgagccttctagcatatatagttccagtttgtcaagaacatatacgaagtggttgattttctggtatctctatttgatgggtagtctgcgtccacgaaccctttcaactccaattctcctttttctttctcataggttagaccataatcccatgttcccttcagatatctcaataaccatttaagggctttccaatgttccatgcccaaatttaacatgaacctacttaggatgcttaaagggtgagttatgtccgctctcggctcaccatcacatacaataagcatccaagaaccactgcatagggtacatctttcatctcttctttctctttcgtattgttaggacattattcttttgacaaaatgaactgttaccgtaaaggaacggatgtactctttgcatcttccatgttgaaaatctgaataatcttcttgatgtacttggactgcttcaaactaatagtcccttccttccagttccgtgagacttcgataccaagtatcttttgaactggcccaagctctttcatcttgaattctctcttgagcatggctttaatacttttgatcattgatttatctttgctcatgatgagcatatcatccacctagagcaataagaacacggttgtatattgctccatattcttaaaataaaggcagtgatcgtatggagatcgtttgaacttgatttgatgcatgtatgtatcaaagcctttattgcattgtcttggggactgttttaaaacatacatagatctgttaagcttacacacttcaactccttttccttccacctgaaagctgggtggttgcttcatatagatctcttcatccaagaatccatttagaaaagcagtcttaacatcaagctgttcaacttcaaactccaaatgtgctgtcagggacaatatcagccttatcatcttgtactttaccacaggtgagaagatttcaatatagtttataccttccacctgagtaaaacccttagccactaacatggctttgaatctcacatgttcattctcattgattccctctttcaccttgaaaatcttcttgttttctggcttcggcataccttccatctcctcatccatgccctggagccatttagacttgtttccaccaaaaattgcctcttcataacttgtgcgctcttcaatttcagtttgttgaacaactggcagtgcaaatgctattatgtctactttcacaaatcttactggagaataaatcatttttcgagttctatcacgagccaactgataaccttctagacctatctgtccgaaccctttcggcacttctgtttggtctttgttatcttgttctttcggctccataatggctttcatctgcgcattgtcttccagtttcacactatc

SEQ ID NO: 102568 - DNA, 606 bp, Cannabis sativa
  modified_base (348)..(349): a, c, t, g, unknown or other
  modified_base (428)..(429): a, c, t, g, unknown or other
tattttttctttaattttttttcttcaatcttcttcatacacactatatcaccatgaccatcatagtaccaccagttacgaattcaatcatcaaaattttttataacccattaagaaagttgggtaaaaactcagatctgaaatcgaatctgtaccaattttttcaggagaaaaaaacaattcttatatttgataaaataacatacaatcgaattcaaaagcccgaatctgtttttggggttctgcaacttatctagagaagattgaatatttactttcataattccaacaacacaatgaattgtatacaagaaatcaacatcccacaaccacttgaggctagctcanntggccataggtgggtgtgtgtgtgctggaggtcctgggttcgagtcccaggtaaaacatggttgtaatatataaacgcnnaaatcaaaaaaaaaaaaaatcaacatcccactttcttattaatcgaaaagggaagattgaagatccaatatttttttttgttcaaaacaaaacccaaaaaaaaaactaaacctgaaattaaacgatttggtacccactatccagccccaattacttcatccctcttcttggtgcggt

SEQ ID NO: 102569 - DNA, 513 bp, Cannabis sativa
taaaggaaacatgtaaaagaaactactacaaaactacaattaattgcatcagttttttgcgtcaatttagtacaaataaatgtaagtgaaaaatgttggtctcaaatctcaattgcatcatttctcaaaaaagaaaaaaaaaaatctcagttatcaacttacactatatttttaacaattgtggcagctttgtgtttgtttacaattggtgcaattgatagaactcaattgtgtcatttataaacagacacacgtataggctttttttcagaaaaactaaaaacataataaaaaaagagtaaaaacaagaaaataagttgacaccaaattattagaaaatcctaatgctaaccctaatcacacacaccaactagccgccactctctctcacacactcacggtctatctctctgtcacacacactcgcactactaaaaaaatagagaattcttttttttttttttgaaagagaaattttattattgagcaacactaggcacatctgctaataaa

SEQ ID NO: 102570 - DNA, 820 bp, Cannabis sativa
acggttgagtctcttgtttggtcttcccccaaaagattggataaaaatcaattgtgatgttagaattggttgattcaatgtgtgtggtggctcttgctaggcaccaaaaggagtcggttttgtggatagctaccagcatgctcaacttctctaacctgcttattggagaagtcacagcctgtttgttggctatggaattagcggtctactggaagtattcttttgtgttgatcgatagtgattttgagacagttatcaacgtgttgaagggaacatgttctatttggaatattggtaactatgtacttcaatgcaaacaactccctcatttgtttattagctgtaatttttcgtttatttcaagattgtgtaattttgcggcccataatgtggctaagtgggcgttcgccaataatgtaacttgtatggttgatccttcatctataccagataaaattttatgtaacgatcatgaggtctaattttcgttgtttaatataaactacgccggttcttctaaaaaaactatataatacaatgaccaagatttggatatgacatgacatgataaatatgtccttaaatacaacacgacacgagaagcacgaatagacttagcccgaaaagcacaacatgatacaaaaaaaaatgattttaagaaatggaaaatccccgaccaaatttttaaaacataaaccttaaattctcaaggaatcaattaaaggtggctctggtaccacttgttagaattctttatcactcataaaaagatgcaatgtcaagattgatttcatagaaaaacatattacatattattcta

SEQ ID NO: 102571 - DNA, 547 bp, Cannabis sativa
  modified_base (108)..(114): a, c, t, g, unknown or other
ttgccttctatgaggaaccgcgacagtaagttcctcactggcatagtccacgtcctcaaccaggacgtcgccatcgttatcaactagctccccagcctcattatatcnnnnnnngtgtgggggtgcaacctcctcctcctcctctgcctcagacggactgctaggatagacatcgccctgctcttcaatctcctggacctcagcgtccccttcatgatcctcctccctctagactgctggatcttgttcgacattgggtaaggtggcgtgccgagccacttgagggttggatgcatcgaccctacgcatagtctttttggtatgagccatcattctatggctggacaaaaatattatggaagaatgtctgtcacttgaggaagttggactagaacgaagacgaggatgatcctcgtgcaagagttgaagcatatccaggtcaatttggtgttcgcttcccccaaaactcacatgggttcatctacagaagacaacacacaagatgagtgtttggtcggaatatcgaacgttaaaataagcaaatatg

SEQ ID NO: 102572 - DNA, 520 bp, Cannabis sativa
attaaaatacggaatttcatcatttttgttttttcattttcttggttaccttttctccgatattctagatgttgtctttttcttcattttaaattgaaaatgttttttgactttttaaaatcttaactgtggttggataatttcatctaaaaactatatgatattttataataattttggtaatttttctgaattttagggtgcaaataataaatttttgtgtagaatttctattttaatttttagcaccaaagaattaaattatttgataaataaaaaaaaaaattcattattctgcccaaattaacaaattgaatttttttaaaaaaaaaataattattcatataaaaatttgaattaaaacaattaaatattttttttttagaaaaatatttaatgttgtggcattctttgtgtgtcactatatctccaaatatattaataaaaaattaaataaaagaaagaaaaggatatagtgacactttatttgtgttgttgttatctttttagtctgataaaa

SEQ ID NO: 102573 - DNA, 1370 bp, Cannabis sativa
  modified_base (1344)..(1344): a, c, t, g, unknown or other
ggtcgaccgtctcaccagaaccaaccggtcgatcggttctagaaggatacatatcttgggttttcaccctcaactcgaaccaaaaccaaaccaaacctatgcaactgctccagatcaataaattatcataatcacaacatatcccaagaatcaattaacaacaattcattcattcaatcaaaattgcataatcaagtgaaattagacttaataaacttcaccttaaccaaaccaaagcaagcagtcactaactccaactgattcaaacctaataatactccaaatccaatctacaaacacattctaaactcaccaaaacatcacagctcagaaattagacttaaccctaagcaaaacttaattcaaaccatggaaattcaagctaaggaacatgaaactcacctttcaatcttgggcaacacttagaattaacttaatccaacgtagactttgttgattgaagaagaaaacttagttttcagctggtttcttaggattttcgagagagagaaagagagagcgaatatatgtatcctttttatttcatctttttgtttttaatttaaagttcctacccttaaataaaaaaacaaagaataaacctaaagtttatctttaattctgccaataaaatgttaagaaaaatcacataagacaaaactaaagttatacatgtaaaatgactattttaccctccccctaaacttaaactaaacacattctaggggtattttggtcattttcttattttcccgattaaacctacttctcaacattttaacctagtcaggtataattccaatataacacaatttcaaccatagtgacatttctgaccatttcgtcgagttccacaattgccaggcccaaaaaatattttattcaaattatggtatctacgatacccacatattctaatacaatctccgtaattaataaattacgctttattattcattaattcatatttccctaatcaactcataattagtttaagtaggattataatcctactctaatacccatataatcatatatttaataaaatatgtcaaattaaaatatcaatatatttttcgggatattacagaaggattttctctaggggcatgttcagctttgctagcgaactttccctttttcccattgccttgcctgttgttgatgttagaccttttactgcccgagcttgaattgcttgtgattggccaggtttaagctcgaattttgctcgctgaatgacctctttaagtttgatgaaaccatctgcgcgatcaaggaagtcactcatagaatctactggtccatcttttctgatatcctttgtaaagcccgcttagttantttggaaattagcagttatttatgtt

SEQ ID NO: 102574 - DNA, 525 bp, Cannabis sativa
ctgcaaacctattttcccattccttggaaacctacaccgggttatcatctccccgaccacgtgccctacctctagggcctctgctttgaccacgaacatttgggggaatttgagctccctaaccgccactagacccgaccgaattaccctaactcctggtgtttcacttggcatcgatactattagaacaacctaaaaaccaagagcaagtctggttagatcgcgatcaagaataatttacgaattaccgcttattttggaattttaaaacatgtgcctattcagctattaggctactaacatgcttcctatcaggctttccttaaaacataatattaaaacaaactactaaaggaattaaggcatactgaaccgtgagacgagatgatcgttgatgatgattgtaaatgtcgtgacgatctacgacagataacctggcggctttgatatcaaattgtaacaccctactagtctaggcgtgataacgtgatttttaacttaactgtgtagctcgttgctaatcaa

SEQ ID NO: 102575 - DNA, 833 bp, Cannabis sativa
ggcataaaacccaacaataactttgttagcttgcatcaaaacacatcctagaccctggctggatgcatcacaatttataacaaacttttctcgatctgatggcaaagctaacactggtgctgttattaattgctgtttcaactcttgaaaaacttgcttcccacttgtctgaccatataagttgttgattcttcttagttaactcggttaatggcataaagattttagagaacccttcgacaaaacgtcgataataccttgctaaaccgagaaaacttcatacttccgtcacagatcttggccttggccaattcgtcactaattcaatctttcccgggtcaaccataattccatcttttctgacaatatgccctagaaaagatatctctgacaactagaattcacattttttgaattttgcatataacttatactactacaatttaaccttttagtgacatgcacaaaatctcacttttgtgcgcgtcactaaatagttaagaatagtttttagtgacgcgcataagtagactctaaattttcgctgttagtctctcatattgcgggtcactaaaaatatgaagtgtgaccaaaaagtattacccataattttttaatttattaaaaaaactgacttatagagtcatatcaagagtgactaggaaaatgtatctccatgtgctttacacgtcacaataggtatttttaataaaaaaatataaaaaaaaattaaaatcgaaaaggcatagtaagtgttggaaattgcttctctatctttctagatagatctttttaataatttattcttcttatatttttttattgaaaaatta

SEQ ID NO: 102576 - DNA, 594 bp, Cannabis sativa
tgagatactacttgattgcgtatacttgcgtaataaacataaaattcgtaacagttctccccctcatccctgttattcatttcatccaacacagttccaagggattcaaatctgttattcactggtgtctcccctgcctcctgttcagctgatacttttttccctttgacaactttttggaatccctcttcatcgacctgcgcctcctggttctccttttttttccttagggatccaaacttgtttcactggctcctccttcctttctttcttccgacatgattgagtatcatgcccaatacccgagcaattataacaaacaagtggtatccattcatatttcacttccgattcaacctcatgattaaattcatcaaaaaaagaaatctgattcgggaattcctgagaaagactcacctgaatcaaaattctggggtattagagacggtccctattcttagtgatgttgtccacttgtagaggttctcccaattgcccaaccatcttgaacaatgatgtttccccccagtatttgatgtccaatcccttcaactgaatccaagttggcacgttcatgacttcctccttggtaaa

SEQ ID NO: 102577 - DNA, 827 bp, Cannabis sativa
  modified_base (586)..(589): a, c, t, g, unknown or other
tatatatatatatatatttgaggagcttgatgaagttacgcaagtgttactggtcctgcattcattcagagctattagattggctcactaattaatctattactattctaaggctgttataattacataatacttattatattttttaaaaaactaaattctatggctatttagctaaatatatttttttttgtgcccaacttaataatcattctcctttaagataaaataagttttcttttcataaagaaaataaaataaaataaaaaataagaaagaaagagaggagtaagttgaaagagacattttttttagtattttcaattgtagtctatttgcacttagtcttccaaacttaaattttagtggtaaaataaaaccctccatacgaacgaccgactgagctgttagtaaatttaaagtgtcatctatttttttacagttaactgccaacatggactacttatgtgtacactcttgtacacgtagcacatttatattggtagacataatattattatttaaaaattataaaaaattatttcaaaatttataatattttttaattattttattttttattttnnnnattttatttaattttgaaataaaaatattaggtgtaccaatataaacataccgcgtgtacaagagtgtacacataaacagttcatggtggcagttagctgtaaaatttttctctaaattttttcatctctcttttctcttagaattcttactacttaagcttctatttatagggtgataaaatgactactgtgcaaatacacttacgacagattgcataggggaaatttgcacccaaa

SEQ ID NO: 102578 - DNA, 746 bp, Cannabis sativa
aaattctttaatacttttttagctttgtcaagtgtgtattatatattgaagctgttttttaaaatagtagatctcttgtttcaaaaaaaaatagtagatctcttcaaataactatgatttgattatatgtatatatttatatataaaaaaaagtacaggtcatgactcgatatttctaatttctatagggggtttggtatgaagacatcaagataatttggttaaaaaattataggttactcattactcctaaggtgttttggtatgagaatactagggaatagtaccgcgcttcgcgcggttttaataacttttcaaaattatatgtataacaaatttaatattttgttttattatgaataaaattttaaatcgaatattattttcttattaaattaataaataataatataaatactatataataaatctctcttatatatgattagcacaaaattaatcataacacaatataaataatattgtcttttgtatttttttggtggccaagtttatcacttacccctaaattagttaagacatatgttattttcactataaaataagtaataatataatcatatataataatcttacattattaaatttttctttttacaaaaaaaaaatcttaaataatagatatagtcaaataatatagttgagaaaacaattatgaatatatataaaataaattataaatctattttcacaaatatataaaaaaaaagtcaaatgtaaaaaat

SEQ ID NO: 102579 - DNA, 552 bp, Cannabis sativa
atatacctttgaggatcgatatatcataaaatgttctatatatttaaagaaattatatacagttaaaaacttgaatgaaaataaacgttgctttaaaataatgaaaaagaaaaaacgtacatacatattgtacacatagattatattattagaaaaaatagtggtcaattttatattaaatatttgcagagacaactggtctttggacatagtagcatgcatgtaatatgtgcacatagatatttatctataaaatacacctgtcttcctaccaaaatattaattacgcgcacatgtccaatttctggtttgtatgtatggattttccataatttattatgatttgggccactcttatatatatatattagacagatttgattaattgaattatatattacaattacatagtcatttctggaaaacagtattatacatcaaaacaagaaaatctggaaagtagtacttattacatgatctattggcattgtgatctttcttttcgaatatcttccaaccctaacttctttcacatactatattctgtctatc

SEQ ID NO: 102580 - DNA, 583 bp, Cannabis sativa
ttgagttatactcagatcataagagcttgaagtatctttttactcaaagggacttgaacttgagacaaagaagatgggttgagtaaatagaagactatgatttcactttgcagtattatcttaaagaaagctaatgtagtagcagatgcactaagtataaagcctcatggtacttttgcatgtttggctcttgaggactggaaaaggacaatcacaatgggtgattataacttgtaatactatgaaagggaagaggtagcttgtatctctaacatagtagctacaccagtgctacatcaataagttaagcaacgtcagtggcaagatgaaaagctgagacttatttagaatcaaatccatgatggtgagtccattttgatggaggctcatagatccaagtttgttgtacatcctggaagtaaaaagatgtaccaagatttgaggagacaatattggtgagaatgtatgaaaacagatgtggctagctttgtagcaaagtgtatatgtaatgaccgctttagtaaattggattagaaaaggcaattagcactaatatttgtcattttataattatttatgaatt

SEQ ID NO: 102581 - DNA, 514 bp, Cannabis sativa
aagagtcttcttcttttgtttctagggttcttttctagataattcttctaaaaattcaaaaccctcttataaataaatcagttttaacaactcaaaatagcaaaaagatgaaatcaccccacgtcccgtacagagatatcaccgcaactacaaatagccccgctgcggcaattgtatagagtcaaaagcatttgattttatcttcgctcctcgtcgcgaccacaaataatcctccccgcgacgataattagtcgcaaccaccaaaggcctcaccacggtgaaccttcaaaatttcaacacgatttttcaccttttttcttcccgtcttgtcctttcggtagttaacaaattttgcattttaaaaccctgggaacttgaaacaaaggaaagcaagtgtaaaactgttcaaaaagtaaaaacaaagaagaaaaataactcttaaaagtggtccaaaaaatagactaaaaatggtctaataagttcccccaagctaacttcttactcatcctcgagt

SEQ ID NO: 102582 - DNA, 515 bp, Cannabis sativa
  modified_base (450)..(468): a, c, t, g, unknown or other
gcaacttgacgtcaacaatgccttcctaaacggagatttacatgaagaagtttatatgaagcttcccaaaggcttagttcttccccctgaatttgctaatgaatcggacatagtttgaaagttaaacaaatcgctctatggtctcaaacaatcatcaagacaatggtacaagaagttgtctgatgctttaatacaagaaggatttgtgcaatccccagccgattataccctattcactagaggatctcatgacagtttcattgcactgttagtttatgtagacgacattatactcacaggcccaaatcttgctctactcaaccaacttcaatctactttgaatgacaaattctctctaaaggctcttgggacactcaaatattttctaggatttgaaatagcccgtgcaaaagaaggcttggtactcttgatggaaattattttaccagnnnnnnnnnnnnnnnnnnngtatgttggattaacaacctaatgtgaattctaaaacaatgaaaata

SEQ ID NO: 102583 - DNA, 718 bp, Cannabis sativa
atttgaatatccaaattgtttttgtaacgaaaatatacctcacattgtaaaaaatgttgcacttttactactccaataaacaatatatatatatatatataaaaaatatacaataacctaaaaagtgtgtgcaagggtttctagtgttggattatttttaataatttaatatgtgggcttataaattaagataatttatttgaactaatattttaaattaagttaaacaagtgatctaaataaatgagtccaataaatatcttatttggtatggactttgttatgtgtaatactcaatagtaaacctaattaggattgatgtaactttaattagtttgctatataaaaaatataagggtttggtccccaagactaatctcagccactctttgttcccatcaattgagtgagaacctatagagagaagattagtctgtagaaagtgatatactcacgatctcatcttgtatccaatatcttggaattaggtatgtcttccatcttattaattttatagagtaatcttaataatttgagatgagtttaagatccatatatatttctagatttaatttctatcaagtggtatcatgagccttgcttatgttagattattaaagttaatcatattgattgtcgttattaaaattagatcaacatttgaatttgtattaatttaaaattttgattcatatgtgtaatttattaatcatgatta

SEQ ID NO: 102584 - DNA, 561 bp, Cannabis sativa
tgcctatatgctgtattatcatcaatacagactttacctaaaaattgagtaatcaatttgaaagaaatctcttgcttttccaaactctccacagtcttttcctcattgaacacgaaattccaactcatttgatctgaaatttagctcgaactaaaaggtgaactttgtgatgaaatcaatttctcagtgtcgaaagctgaaatcggtggaaagttttgaaacaggacaatcaaaaagccataaaaaatacccaaatcgcctccccctccattaacgatagctaaaactaaaacctcgcctgtcaactcagctatatcagttgcaaaatctagtgaaaattctgccatgtgcctacatatcccaaaaactcggcaaagaacgaagcaattgcatcagtaccaaatgattgcggccaaaacgatttacaaaatgaagtccaaatagaaagaaagaactccaaaatcactactttatgatggagatcagcgcattctagacatttcgataggaaccgagccacagcaaggacaacattgagttgagaatgttgggttttgtgcc

SEQ ID NO: 102585 - DNA, 709 bp, Cannabis sativa
agtctttgacagccagcttggacatgatgctgtgaaattgttgtggaaacagaggcttggttaatatatcagcgagattattttgggaagagacatgattcatctgaagtataccgttgttaatcttttcaggcacagtgtgacaatcgttttccacatggatagctgcagtgttatcacaatacaagatagaaggagttttgatgggaactgcaaagtcttgaagaatttatgtgagccatgtgagttcgcaagtggcatgtggcattgatctatattcggcttcagtagaggatcttgagatggtttgctgcttcttagacttctaagacagtagagaatgcaccaaaaaatgcaatatcctgagatagatctccttgaatctgggcaagccccccaatcggcatcagcaaaggcttaaagttggagagggtgaggtgtttgaggatggtagaataggccctgccctagagattgtttaagatagttgacaactcgtattgcagcttgaaaatgaggttggcgaggttgttgaatgtattgactcagtttgttgacaacaaaattgatgtaaggcctagttatggtgaggtagatgagcttgcctatgagacttcggtattgttttggatttggcaaaagagcacccaattcattgcttattttgagattgggttccattggtgtggattcaggctttgagccaagg

SEQ ID NO: 102586 - DNA, 537 bp, Cannabis sativa
ttttctcttatgaatttttcgtcctttctccagtctaacttgcctctatttataattacatagtcaggcagttaattatagagttgactgaaatctttacaacaattatcccctgaaatcgtggggattaattaaatatcacgtaatataaatgcggttaatatttgaatatcacacagctgtgattagtccgcttttactgggttaaagtaaatgtgtataaatcataacattctgggatgtctcgacaggaactcagtaccaatgaccttgatagcgagctggagcttttttccctatctctctgaggttgataatgtaaacctcgtcgattcttcgcttggagatataacgcttcattttgacaatcgcggttcttaataacaaggataacttcgatagttaacatcatttgaatgacagcttctgctcaagagaaccaactcgtcaagactataaatctcattgaaaaacgtctgaagctgattggtgaaagtaccaggagcgtgccttcctatagcaagatggacgcctcgc

SEQ ID NO: 102587 - DNA, 819 bp, Cannabis sativa
  modified_base (26)..(53): a, c, t, g, unknown or other
cttgatttttttataacaaattagannnnnnnnnnnnnnnnnnnnnnnnnnnntagaggttctactgtattatttttatttaatttgacctaatactaccatttttctttaataatattaccacatgtcaacatatgaattatgatagtgttatacacaagagttaacgtggcattcttaagcttctaattattttcattacttatttttttaattaatttttttcaattgctttaaatattgtaacttacttaaagcaaaataaattcttatttttttttgaatgaaaatttcatcttttttgaaattaaaccctcacacctgctgccaaacacgatagtaactcagttggaacaaactccaaactgaaagtacgatcatgatataatctatcagctttggcaaacttatgagtcactacattagccgatcgcttaacaaaagacacaacaacattattaaaagatgcaaacaacattttacaatcttgaatgacactaccaaacaaggaaatcatatcaatggaactatgaaaagcttgcaccacacacagcgaatctgttttgataaagacttgaggccattgtctctctttcagccaactcaatacctcacggatgcctattgcttctgcaacagccacatccacttggaccgaagtgtacttcatcctaccttcaagcaacaaaccatctgaatttcgtgcaaccattcccaagctgaaactccttattaatatgctatatataaagaaaaactttaaaaggacatatggcatcataaatgagttttgtttcattttttctaatatctcaattt

SEQ ID NO: 102588 - DNA, 682 bp, Cannabis sativa
  modified_base (642)..(646): a, c, t, g, unknown or other
gtgcatcaggccatttgttgacttaagcattgggccttttcaactgagctcctgggattctatttttgatacttccatggtttttgaaattaaagatggggtctcctagacagtttttgaccatgctagattcaataggttcattggatttggcatttgagtaattaaatgttgcattttaggttgcttgtcaacctgggcgctaggcccaaccctaggtcaacctgggcattgcgccctatttctagggactcaaccttgtgtttttctccccaagtttacttgaatcttttttatttctaatgatggaaaaaaatctcggaatactttttgctaaaattgatctgaaatagcccaggttgacaaaatgtcaacttgggcactgggcctagccccacgtggtatttcctctcaatgtgtttacaccgcttgtggcttcgaggctctttagtttttgctatagcaccagcgttgtcacaaagtaaaactagtgggttttccattctaggaacaacaccaagttctacaaagaactttcttagccaaataagttccttagcagcgtcagcagcaactatgtattcgacctccatgttagagtcagatattgcagactacttgtcactgttgggttttatgccnnnnntaaaactcaatttcaatgtaatctctattattcaat

SEQ ID NO: 102589 - DNA, 529 bp, Cannabis sativa
atacagatcgtaatatcgtaaatagaagtaaatgttattcttaccttattttgaatttgacgggagagatttgagtgtttgaatcacattgcgatgattttgatggaaattgttgataacaatcgccggctggatctctgtccttgaaaagtggagaagaagaagaatcaggaagagcatataaatggaataaatgcaacaaaaatggtaattgtgaatgtaatgtcacaataccctataaataaatgaataaattaaggttttaaatgtatgatttcaaaaaaaaaaaatgtattaataaaataaccccggaataaatgcatcaaaaatggtaattgtatcaccaataaaattggttattatattgaaaaaaaaaatggtaattgtgaatgttagaccatttagatgtaaaaattgagttatattttatataaaaagtcatttttattataaaatattagtattatgtaatattataatttagagaaagaaaatagagaagagatgagaattttctgagtgttttatt

SEQ ID NO: 102590 - DNA, 860 bp, Cannabis sativa
ataaatttgatttattaagttttaacatatatttgtatgatatacattagatttttaaattattatattttttatattaaaatattaattgtatatgtaattttttaaaaaaatatatataaatatgcgtgaattggattgaatcggttacttttatatgtcaaacaacatttaatccgcacaagtgtaaattttaaattttctaatccagtctaatccgtacaaatgtaaatatccgtactttgcgaattaaattagattgatttgtacaaattgaattatattaaatattttatgaatacctctaattgaaagtggtctaagtttttattttacctcatcaactcggctatttaccggtgacacatattgctactactttccaaatattaagataaaaagggtataattttattcacaatgtaaatataaaaggattatttcacaaatgtaaaaaaataacaaaaaaaattatatatataaagtttaaccgaattttaaataattttacgatttttataattttatttacataaaatataattttttgatgtatttttatgttgtacttttattaatttgttgttaattttttgttatttatatattattttttttatgtgaatgttatttttctttacttttatatagttttttttttgttatttttataaaacaatataagaatatatatatataaaaaaacataaaaatgtaaataaaaaatactactttatgtaattatctcaaatataaatgtgatttttacaaagattaccttaatgggcctggatttttttatgaatacgggcctaggcaaggcctgctagtttcatttgttgggcggctatcaccaacag

SEQ ID NO: 102591 - DNA, 787 bp, Cannabis sativa
atttttctcagagtaaactttagggtgtaatagaccgatatagttcgatcgcaaaaccttaaaaggaaagcgaacattgtccgcgactcaactagaattttctatcgataattcattctagtttcattatttttaatttcggtctaataaaaacaaatatttttaaaactatgatgtatttctttgcaatgcatttgaaagtaaatttcagtcggtcagatttatatttttaagtaatatattcacacactagaccagcacacgcgcgtcgccgtccgtccgagttgggttggcgggtgaggtatgtcacttaatttttttttaaaaaaattatttaattaagtaaagatttattttttatttattaattaattaattgcaacgttatcagaagtagtaagacacgatcattcaatgatccccttttactgcccatgatccaactctttctctacgatgatattaccgttttcttatcgtttattcttggatcgacttccctatatataagtcgtatcagaacaacggaagaaaatatcttttccaacatcaaaattttttttctttcttccttacaatttttctcagagtaaactttagggtgtaatagaacggttcggtcgcgaaacgtcttaaagaaaacgacattgtcggcgactcaaccagaattttttatcgataattcgttctagtttcattatttttaattttggtctaacaaaaacaaatatttttaaaactatgatgtatttctttgcaatgcatttgaaagcaaatttcagtcggt

SEQ ID NO: 102592 - DNA, 639 bp, Cannabis sativa
tggtaacttacttgtaatagcttacttgtgataacatttatttatgtatttaatattttgtatagcttacttgttaggcttttttttatgtacgtagttactctattatatagctagctctatattttgtttgttaatggtgtagatatggctaactcaggttcaggctcagattcaaacccagaagcagattgtcctaggccgataccaacacgaggagctactcagatgaatgaaatacccaagctgatggaccaaggaaaaagagtggcacttgaagtgaatgacaaaggacagtactgtggcaaaaaatactccaagctagtatcaactttataagttagatgtcgtcaaacgatagggttgtctataaaaattggaaagaagtcaaccctacactaaaaaataaagtttggaaagatgtacaggtaagcggttatttgtgagaattttgatttattttttattaattcagatgttaacttgaatcatgtttgttttccttcaaattagacgagttttatagtgttggatgatttcaaacattattgtttgatccttgctaggaagttaatgaaagacttcaagaatagaatgacaaaagatgttattatgcccgcattagaagaaaaagatgtg

SEQ ID NO: 102593 - DNA, 559 bp, Cannabis sativa
ttctaatttttagagttttcaaagtggtatttttaatttaggcccgaaccgaaacacatgttcgaggtttgggttttactgggttatgagagttttcaggacatcttttatttactttttctttggcctgtcgtatccatttgtttcacttcatctttgaaaataaaatctaggccctgttattgtcattatgcattagggttcccgaattatcaccatgcaagccgttgtatggtagtgatgataatggtgatgaatccagtggggacctctccaagtagttctgggggaggcttccccaggtaccctatttgccatttgaatgtagggtaccgactgcttggactttcttctcacttttttcaatgtctggtgaaggtagtgatttccatttagccttgctgaacctcgaagaggatcctgaggcatcatctatcgaaatatctcctccaaaggagaatcctagagaccttgttccagatgaagggcctcccaaatcagtcccacctaaatgatgccgtaagaacaaggacaagggcaaagctcctgcaacctctcc

SEQ ID NO: 102594 - DNA, 745 bp, Cannabis sativa
tggatcttcctaataattacatctggggaacataatagtactatttagtgggagagctaatcatagatatagaatctatagcttctataattacataaaagtgaaatgatgatttcttttgagctttgcttaatagagataaatgaaagaggtaataaggctcttagttcttgcaattctacagttagtacagaaaaactggagacaaattacttcgaaacccgcaaaaaaagaagtggaacaacaacaaaaagcctcttaaagttgtgaacgcaactaataagtgtaaaaaggctactaatccaaaggaaaaatgaaaagggaaatgcttttattacaatgaaaaaggccactagaaaccctagtgtcctatgtttttggcaaaaaaacaaggtatttctaactttgttgtgaattcatgtgttttagagaattattatccccttgggttattaattctagatctactatttatgtttatgttcttcttattttagctccagccacttagacttggattattatcccagcgagttgagatagatagctggacaaaagggtggagattttccaagcttgaagatgaagctcgtctttattatttttgaattaattgttttatttcttgaacaattggttggaatatattttaccaggacctagatttactaacaattatgattttaacatcctaaatatgaacttctagaacgataaaaattaaacaaataaaaggtatgagaaa

SEQ ID NO: 102595 - DNA, 783 bp, Cannabis sativa
ttgggtttataaagttacaactcaaaactttgggtgttcgcaaatatttctcaatatttttatttaataatttatcaaatatacgaattgacgtaccttatagtttttgaggaaaattaattagagtgttttcaaattctaactcacattaaataatccataaagaaattctaattgcataatattaaaaagggataattgcggcaaaagtttccaaaaactattaatctcctatcacaatcttttagttaatttttgtgcttaaattaaaatacaagttaaaatatttttttttatttttttcatggcgatattcgttatagttagaacttcattcttgtaaatttttgaaaaatttcgaatagtttacaaaaaatttattacaactttattcgttatttaaaatttttcaaaaatttataaaaataatattacaactataataaatatcattgtgaaaaaaatattctaatataaaattttaaagtaaaaattgattaaaaaattataatatgagattcttattagaattccttttaattataatagataccagtagtattatgagcatagttataaatcatattcatgggagactcaatattttctttttttatacataaaatctaatagttaattacatacatattaaaatatagacgaataagagtcggccacctgtgtatttaaaatctgaaaactcgaacattgccttaagttgagccgctttccatctaaatcctcttaccaatgcagccaagccgttcgtgtatggaaagttcc

SEQ ID NO: 102596 - DNA, 566 bp, Cannabis sativa
acgacgttccaaacaagcccataataaaaattttaatacatccctccccatctcaactctgagaaataaaaccgataattttttagttaattaaaatacatttttttgcatggtggtattcgttataatttcaatatcattctctataaatttttgaaattttttgaataatttacagtgctaaaaatatataagtttgaaaatatttttgaatacacgtggtaaactgaaatatcaagcaaggctggctaggctaaggtgggctaggcccgcgcttagaacccacccctatcaggggcctaaatgaatatttttaataaataaacataactttttaataatttttaaaaatactatttatcttataaaaatagccccccaaaaaaatattttttaggatccaaattaactcagggtcgaccctaatatctgtttttggtattatatactattcaaaaaaatttaaaatttatagaaataatattataactataacgaatactgcaataaaaaaaaatatattttaacatattattttgaatgtaaaaattgattaagaaattata

SEQ ID NO: 102597 - DNA, 536 bp, Cannabis sativa
gtgattggaattgaaaaaaaaaattagtgttgaaatagtaattttttggtgttgatttaacactaaatttagatttttccattggagatgcccttaggtttcaaattggattaaatggctgaggacatttctaggaaatacaaagggattggtaaaaagcccgtcagatgaaaagacatttaattaatacctttctcggtgaaagttaaattgccaaaaggatgtactcattactggtaagagaaagaccaaactgttccagcttcggttgtttaaaaaactcttccaactccaaaaagaattttttaggggacaattgtcatgcccatattttgagccataaatataaatacgacacgtgaataataaggttgaacattaaaaaagattattaaatacaatagatatctggcttcggggtaagtggtcataaatagataaaacacagtattgtgagttgacgatattttgagatcttctcggaaactaactatgaggttctagaaaaatacggctgaaattgtatcgttggaaat

SEQ ID NO: 102598 - DNA, 954 bp, Cannabis sativa
aactataatattttattttgtcttttgtgtgtataagagcatctctaatggtaaaaaaaatgaggatgcttgcttaagtggatagatgatgtggcaaaatggtgagatgctatatcattggagtgaaaagtatgtcattctaggaatttgtggagatgctatacagtagcatcaatgctatcataattatttaataaaaattaaaactaaaaatttattattattgcaaaaaattaggaaacatatacaattttttaataataataaaagaattttttttaaaggaaataataaaagaatttaatagtaaagtattataaaaatattttgtatggttttaaaaaaaaaatatatatatataatattttaattaaaattgaataattgaatatatataatattaatgtattagaaaaaaaaaattgtattttaattaattataattttgttattttaaaagttagtgtaatttttttttcttaaaatttaaattttatgttaagcatatttatattaatatataatttttttaaatttagtgtgataatgtatttataattaaaaaaaagtaatatattaaataataatatgtgagatcataataattctagcattttttaagagtactataccattggagtgtttttagaagtaaaagtgctaagaataatgtggaagagaaataaaataaaattttatatttttgaatgatgtggatattgttagcattgaagatgctctaaataaatacatgacgtatgatgatatacatgtcttagtaagccaaaaacgattcaaaagtttactaataaacttttgacaataattactaaatatttttttatacaaaaaatttgtacaactttaaaagaattggtgcggacttacattttttctaaacatccatttattcgtgtcaattatcaccttattaaagtaatgtgtaaatatctt

SEQ ID NO: 102599 - DNA, 734 bp, Cannabis sativa
gctaatgacactgatattgatgatccgaatgatgatgtcatgttgttggattctaaaaaaaggcgcacaagggatggagtgcaatcaggcaaacgggttgtgggccaacatttctattggaccgtgttatgatccagttgagaaggataatagtagtatggaggttcaggtggttgaagttaatcatgatttgggctcaaaaaatgagcctttggtgggtgctgggatccaggcccactattcattatgagcatcattaggtggaattaccatgggcttgggaacccacgggtttatcaattccttgtggatcttattatctaaaagaaacccaatttttttgtttttgtgtgagactcttggtcgtaaggacaagttagaaaggctacgggttgcggtggggtttgatggattttattctgtcgatgcgagaggacatagtggtggggtggccatgctttggcgtaataatgacgatgtgcagctgcttagctattcgttctattacgtttatattcagatcttggaagtagcttctcctccttggcgtttaatagggctttatggagaacctaataaagctgttaggtataaaacatgggatttattgagatcgttaaagtcgagatcttcccttccttggtgtatcattggtgatttaaacaatactactagtcatgcagataaaagaggaggaaatagatatctgcaggtgctggtggatggttttaatc

SEQ ID NO: 102600 - DNA, 855 bp, Cannabis sativa
  modified_base (34)..(35): a, c, t, g, unknown or other
gttaaatttaatagaatattcttttatttttaannatattctgttaaaccaagaatgttaaaccaataaatgccgttagatagacacttttaatatataaagatatttgtagtataatattaaatttctactcctaatattaataatgtggtcatatagatagatagataaataatttcagacatttcttctcatatagaggtggctctgatatcaaaaatatatttacgtcattttaaatataaatatataatagagagtgttgttttattttgaaaatattataattcaaattttatatctcttatatatagcattattttttataaaaaaaaaatatatttttatatttaaataattttttttatatatttttacggttttttataaacatatcacgaaaactgcataaaagtaatatgaaaataatatcaaaacaacaacaaaatacagataaaaaaatcaataacaaagtagcaagagtacaacataaaaataccatattttcggtaaataaaattcaaaaaatcgtaaaaatatttaaaattccgtgaaatatttttttttttaatttttttgttatttttgtgcatttgtgaaataatctctatatatattcaaactcaattcaagtataacagaaagtattgttctttttttttaatattgcaattcaagtttaaacttattgcacatatctaaaaaaatctatcgttctattatcattattttatataaaaaaaatattttctattattatttaaaaataaataaaaaagtattataacattaaaagtattccagttaaactaaaatcataattaacactttttattatatttttttttttatata

SEQ ID NO: 102601 - DNA, 693 bp, Cannabis sativa
gttataaatgaataattaaaaaataataatttttttaattacagaaaaatttataccattataatatttgattcatttaaaaaaaaatatatatttataatagctttgttttatgataaataactttatccgaaatgtgcttttatttttattgtattatgattaaatttgtgccgatcgctaataattttttttaaataaatatattatataattttatattattcataaaaaaaatataaaatagtattagacttgaaattctattcgtaactaaaaattaatttttttaatgtaaattttaaaaagttattaaaaccgcgcgaagcgcgaatctattctctagttatatataaaagaaactattttttatacactaaaaaaatgcaccgttttgattaacgttttgaatgaatagtgtatatatagactctttttatatatataagatatatatatatatatgtgactatttaatggtcatatttttattgtaaccatcatggttgtattttttttttacttataattaggggtgttcgcagtgcgggtggtgcgatttttgactattttttcaaaccaacccgcgcatgcggtttttccaatttcccaaactgcacccgcaccgcgaaactaaaacccacaaaaactgcaccgcaaaagtagtgtggtgcggtgtagtttttgtggttt

SEQ ID NO: 102602 - DNA, 619 bp, Cannabis sativa
acccaaactcggacccgaacccaatttggcacttagactcggactaggatttgagacctaaactcgaactggaacacgaacttggacccagactgggacctagaacctaaatatagatgggggacctagacccgagaatcgggcccccaaaccaggactaggtattgggcatcggaacttggatggcatctgggacccgaccctatacccaaacctagacctaggaccaatcttgagatctgagactcgatgcttggacccgacccgtagtcgctgtctatatctaggacttagaccaaaacccaaacccaaactcgaactcaaaccaggacccagacacataccaagacccaaacccacactcatgaacaaaaaccgaagcttgaactggaaccaaacaaggaccgtgaccacgacctggacccaaacctggaactggaccaaacctcggaccctaactgagactgaaacccggacctggactaaaatcaggttccgaacccaaacttggtctaaaactcaacctgaacacgtagtccgtgacttgaaattagaatgaaaagcatggatcaagacccaagaacaggtcctagagaaagacccaaaactataaccggac

SEQ ID NO: 102603 - DNA, 968 bp, Cannabis sativa
cgaaataaggtttttctttcttttgatcttttttgtttcttttttgtgtcgctcctcttgcctattacttcgaaataaagtttttctttctttctttccatcttttttgttttcataaaataatattgttttgcaaaatttttctttttctttttggtttaatgaatgattgtatcggattacaaactagtttatatctttgatttctattgtatatttattcgattttctaaaatttaaatctcatatgtttgtagatcttctaatacataagttcataaattaactaagtgtattcttaccatggaggcataataatatatttttattgaaatatgactattgctttaataaaattgcctctatcttttttttttattatttttttattaaaaaaaattcttgttgtttaaagggctgttgccctctttcatcaataaagtttttattttattataaataataataataatcacctaatttttttttatccaaaaaaaaataataataataaattaatgaagacaaatatataactgccggattattatattttttaattcatttttttatagcaatgaatatatgttctttttaattcattctaaactttttctttcaatgtttttttttcataatttttacattaatttcagtaagatattttacaatgtttttataattatcttattttcatgactatttcaaaaagaatgaaatttttaataaaaaaaaatctaacaagtttattcatatatttttatttaatggtttttattaatatttaaaaaatatacatttttttgaatatgaaaaaaagagaaaactatacacttataaaaatttaatgggttctttataaaaatttggaatatatattaaaaatggtcgaaaaaaatattaattactatcatttgtatatgtgattttgtgaaattgacatgtttttgtttgtgttaatttggcag

SEQ ID NO: 102604 - DNA, 995 bp, Cannabis sativa
  modified_base (325)..(327): a, c, t, g, unknown or other
gacaaagtctcataggtttatttttcatctctctctccactaatgtagacaaacacaaaactaaagatcaaaaggactttttcaagcttgtaatgtagggcttaagtgaaggtggttaagagaacccagggaacataagggttccgccaactgtaaatcccagatagccatcaattgcaggtcacggtatgacgactcctgtggatgaaatcgcgcctggtgtgcaagagaataggaataccagttcagaagccaaccagggcattcataacatagccgttccgcccgccacaaatgttcaaactgttgggatttatgccctaannnaaactccatttcaatgtaatcttaaatatcaatacagaaacagaagtattttcatcacttctcgtgtcattttgttcatgttatcatttatctgttcatttgattttgttgacctcgcttttagcaaccgacaatgagtctattttataagcgataaatgatttataataacagatatacgataaacaataaaaaggtgcaggaattttatagaggttgaaccccgagcattgaaacaaagttttatttagggcataaaacccaacaagtcttagctcaactgcttttcgactgatcccttgcctagtgaacatatatcactatttatagggctaggaggcttggggaggaagagtttcccctctcgttacattgtgtataaatagaaagatcgtgggatcaatgctgaatacaaggatcgtgggatcgaggctaaatacactgatagtgggatcgtgtgtatgccatatccacgtaaattgatccctgagctatacggattgtgttgatgactcatgatgcgaaagctgaattcgctaagtgtgggtcgctctcggtagattgctgtatacttcgctctaagcgtgccagcgatatgtcctgcctcgaccattcttcccgagcagatattccaagtggattccacatgtcaccattcatgtgatgcc

SEQ ID NO: 102605 - DNA, 508 bp, Cannabis sativa
  modified_base (454)..(459): a, c, t, g, unknown or other
taattgaaataattttgtaaatcaaatgcttagtaattttttttatttaattattttgcttaattatgatttttctcgttctcggatcgatatgagtgcaaaccgtgcaaataaaatatgaggtcttgtataatttaatataataggaatatcgctaatcaattgcataaagtgtcacttctagaaagagttaggcactattaatgtccaatagcaatactttttgattgtacagctctaattatgtgtaaaagttgtatgtaatttgagtgtgtacaaatcattattatttatttaattaatattgataatttctagtttttacatcttaaaattatatgtgtgaagatatttattaaaattttcatatatttctcgctataaaaagtcacaagttaaaaaattttaaatatgatatcagggttcgtttggtacgccgtataagggtcgtatnnnnnnaaataataaataacactatgtttgtataaaacaatgtattgtattaatt

SEQ ID NO: 102606 - DNA, 955 bp, Cannabis sativa
gaaaacaacaatttgttgcaatcaccaaaacaatcaatgtcagtgattaagtaaaactcctcggcactaaaccgtatacaatggctagcaaccttagctcaaaaatctttacgattgggctggtacacttccctcaacagtaggctatgtacaacttgggggtggaaaacaaaatcaggtatatcaagaaaatgaccaaattgggtgtcacggaacatagacagtaaattcacagataaagtattctttatattatcaataacagaaaaattgctagtacaaacacatttggatctgtaaaaatcagagggactaaatttgtaatcccagacctgcaagttaacaaaaatggcaaaaataaatataaattgcaaataaacaagtatacaaactataatgaaactataaaaaaaaaaaaaaaactaaaaacaaactgacaaacaaaaacaactctacgaatataaactagaaagatctttaatcgaattgttacctaaaaatgaacagcaaacaactatacctaataatatttccaaaacacaacatatataaacggattaaactattaaaaaattaggaaaaaactaaaacccactgagaagagacactaaaatgaaactgaagtttaaaaatatctaaaaaaactgaaaaacacaaacagaacaaaaaatacaacaaaatgaaacaaaagtaagaataaacaaactaaaatggcaaaacccacaaaacaacaaataaaattgatcaagaaaaattaaagccctaaaaactgatgaaaaccaaacgaaattttaaaatgaaaaacctaaaatatcacaaaccagaaaacacaaaatcgataaaattgaaaatacaagaatatgtacaaaaaagggggagacgaaaaagaaactgaaaacgaacctcggttcgaatagcaccaccaacattctcatttttcccagaaacatcttca

SEQ ID NO: 102607 - DNA, 627 bp, Cannabis sativa
  modified_base (49)..(52): a, c, t, g, unknown or other
ttccatgaaaataattttattttccttctgaaaatattttatttggatnnnntgtgaaaaattaagcaacttttatttttacagagctcaattccaataaaaattgagaaagttattaaggtttgaagtttcgggtccattgggtgtcattgcatgacaatatgcgcgcgcaggttctgggacaaggtcgatgtccgcgcgcgtgcttcagacaaaaattgtttgaagcctcggtcacgcacggtctgctcgcccacgtgaccctgcaatcgcccgtgtcccaggctgtaggtgctgagatttctcggtatgataccgtgctgacgccccctcccgcgcgcgcaagggccttgtttgcagcttgtcaaggctgcacgtgcaggcctcctgggcagctagccaccaaatgcgattttcatgggattttttctcaatttcgaattttttgctattttcaaaccctaaaattaaaataaaatattttttatatatatatatttaaacttaaatatcaattttaaattaataatatttaattctaatagattattattaatatttgatattttgaggttgaaatttaaaaattgattattatttttttttaaattatggtgagatttaaaa

SEQ ID NO: 102608 - DNA, 716 bp, Cannabis sativa
cttctaacatgcccaaacactggattagacaaattagcttgtctaatccaatctagtcctgcgtaccaaacgggcccgtacagtttgaccataattagttaaacactacatgtcaatttgaaagaatattatgtactacatgtaccaaatctcaatagtgaaggattaaacatattgtgtacatatcaaagagaggcacttgatgaaagtagtcaattaattatgctagttcgttaataattatcaagttgaaaaatccaagcatgtgtgtttacctagtcattactataaattgaaaaatactacttttattaatcaattaattaaatttatctctaattttaaatttaattgaaacatacttcttttcatatgtatcgtaccaaaaataccctaatataagagagtcacatggagaaaatcttgaagtgatagggacaaaattagtacaatgtttaaaaaaaaaaggtaaaaatgatagactttaaaaaagagggtaagaataaaagatgataatataaaaagggtatagagtgtaatttcctcataattaataatatatgtatatttatatagaaaatttctactatagtctataggtacacctattttgtcattatagtatagggacatttttctaacccttgatatatttggcttttgagtgacttatctaacatgaaaaaccgtgtttttgcaaatgtcagttgtatata

SEQ ID NO: 102609 - DNA, 567 bp, Cannabis sativa
caagaaacaaggggtttggcactatattaaattttcagttttggaaaatacaacataaaacaatttatgtaattttcaaaatataagactgtttgataaatttttcttttttttttttttggaagaaggaagaattcattcaaactaacaatccaaaatacaaacaaagcagctgaacaaaagaacacagcccctaaacagccagtactacaagttacatattacaatccaagtacttttgtctctatttttaaagttacaaggattcagcattctagttctaggttaatagataaactaaccatcttgactgaataacaaactaattcaaagacacattgattgcggttacaccacacatagtaaatcaaggcagaaatcatagcattattaactgtggatattaaatcatattgattcttgttacaccggcaattccattcttccaaagtggcaggccacacaaacttgttgaaccacttttttatctcagtaacaacttttttagtgaactcacaaccaaagaagaggtgttgatgagtatcgggttcagcatcacacacggga

SEQ ID NO: 102610 - DNA, 823 bp, Cannabis sativa
gtaaggaagtgcttatgaaattggttattcaatctttaccgacttatgctatgagtgtgttcttgatcccttcggaaatttgcaaagatgtggatcggcttatgggtagatattggtggcatacgaagtcttcacaaggccaaggtattcattggaagagttgggataagctttgtctacataagcataaaggggggttgggttttcgaaaatctggattttaatttagctatgttaggtaagcgaggttggaggcttttgacaaataatagttccttagtggcttgggtctttaaagccaggtattacccccattccttgttccttgatgctgcactaggtgctaatccaagctacgcttggcgaagtgttctagagacaaaatatgttgttaagatgggtgcgagatggcgtgttggagccggtttttctataccggttcttcatcaaccatggcttccatgcaaggaaaatccgtatgttatctctactcatgtggctctccacgattgtaaggtcaataacttattaaaagtgggttcccttgagtgggatgaggaagtacttcaagatttatttgttcaaagggatattgatttgatccgtcgtatttcgttgtctccttcttcggttgaggatgcttggttttggatgttggagacttatggggattattctgtcaaaagtgcttatcgcgccttacaggtaagcaatgctaagtggaatactcaagacaatttgggtttttggaggaagttttggaacttgaaattgccacctaaggtgaagaattttctttggcggggtcttactaattgtctcc

SEQ ID NO: 102611 - DNA, 795 bp, Cannabis sativa
aaattaatatctgccattacattcgttgatacgtattctctaaggttaacatgcgtcatcctctatagtgccagccgaatttgaaggtataatagaaggaaataccattccagactaacatgagaaaacatttaatgatttttatcaataagttatgcatttgaaatttaatattattttcattccaattcccattccctgaaccatgaaccctgtaccctaaacaaaaaacccctaaacccgtaaaccctcaaacccttaaaccgtaaaacactaaaccctaaatcctaaacgccaaaacccaaaccccaaatcctaaccccaacaccctgaaccctaatgactgaacacagacccttaggtggcattttgttagaggtaagaaaatggaatgaaaaagaaatcagtttcattccattcttttgtttagtttctttttaaagtattagaatgtcatcccaatagaatgccctttccaccattttggtggaatgaatattctatttcataatggaaggaacaacaattatcatgtaacatgagaaaaaatttaatgatttttatcaacttctttatgcattttaaatttcattttattcagttctcattcccattccccaaaaccctaaaccctgaacccagaaccctaacccctgaacccctgatcccaaacccatacccataccctaccccaaaccctaacctctaaccccaaaaccccaaccccaacagcaaccctaaaccataaaccctaaaccctaaacctaaactccaaaccctaaaccccaaagccca

SEQ ID NO: 102612 - DNA, 1130 bp, Cannabis sativa
aactcggagagagagaaagagagagagggagttgaacgcgaggtggtggtgatccgacgtatgagacgaagatgagagggacaccaacggaaggtggtggtgatccgacgtatacgacggagaggagagggagaccgacggtcggaggaggggtgggtggagatcgatggacgagaaagacaagaagaaagggagatcgagagagggaggaagacgatgagaaaggagggcgatggtgcggaggcgtgggtgaggttttggagagttaagattttcgttttaaggtgtaggaaatggagaagaaataggtgagaaaaaataggtaggcatgtgggaaatagaaaagaagtaggtgggaacgtaggaaatgtggcgagaagtaggtaacaattttttattgggcccttatacccgacggtttaaaaccgtcgcctatagtatagaattccaacagcagaagagtatccaattgattagaccttgatcatactctgtgatagaaaggatcaagggttagagattacactacaataaattgaagttttaggggcgaccaatttagaagcgacaaaaagtcacctctaataataggggtaataggggcgacaaaattgtgtcgcccctaaagaaatctggtttatttattttttaattcgtaaacaattaggagcataactttttaataaatagagacgacaatgtcgccccaaataaaattgaaaatttcccattcatttaggcgggatttttccagctaatggcattaggggcgacatttgttactcctaaaagtgtcattaaacatagcccatttattaggggcgacttttaaaggtgacttttgtcgccccttaaagttcatcatattaaaaccctaaggctcccccttagagcttcattctcttctgccttctatttttcttttcgacagccttcaacaagaaaaaaaaaatcagattgcctactttgtttgaccccgtccctcctctccctctccgtccagctccctccgtcgcggtgtctctgccttcaccaaggaccttgaccccgaggctgccccaaccggcgatcccaaacgtaagaggtatgttttcctttattttttttaaatctgattttttaattaagaa

SEQ ID NO: 102613 - DNA, 827 bp, Cannabis sativa
taatgacccttcaagtttttttttaatcatttagttaattataatgatgttatggtaattttctgtccctttcatatgcagaggtgtgtcctggtcatatgcataactaaaactccccacttgttcatgtgtgacatagacatgttggcgagtaaggcattcatttggaatagcctgaaaacaccatgcgggaaggatgtgaaagatttctgtgtacgagctgcttctgaaatggtatttactttcgattgtttcatttcacataccagaatccaagatttctttagatgaaaactagaatccaagttgactagcgaatttaataagtaatgtgaggatcttcatctcttataccttgcagctaagagcacttgatgatcttctccaagtggatatggctctagaattaggagagaaacataactttgcatcacttcccttggattacgcaaaatgagtgccgcaacaagataatagggtagattgtggcgtatatataatgaaatttatggaacatttcttgaatagaggtaatgttgctaaaattgatgttaaggtattttttcaagtacaaatgattgaaattagacttaaattgaaaatttcatatagtggataagcaataattaactaatatttgttttgtcttccaactttcagcatgtaactaatcaagacaagtttaatatcatgatgaatctaattcagcatccaaaaaataagtgtagggctactgtttcggcagatgttgctgagatgtattcagttaacaatgtcttagatgttcccccatctactcctacacatactgacaaggaattggttat

SEQ ID NO: 102614 - DNA, 1158 bp, Cannabis sativa
gttaaaccaagaaatgtcgttagataggcacttttaatatataaagatataaaagtaattaaatattaccaaaatactactttttctactacttcagctgcatgaaatgaaacaaacaatctcacgcatggaactttcgatcgactaacctaacaactcaacacaatcgaaacgaaatccaaccagaagataaccatcattaattctggtgacttcatttgaaaagacgactagaatcaatcaaaataggggttatttcgaattcatgaaaaaaaaatgtagaaaaactactacaaaactaaagtttaaccaaaaatccaatttaactcccataaaactaatctcttaacttcaacttttagatccatgaaatgcagatctcaaaaaattgaactagagttctcaaacaattcgactcaagtataatctaaaaaaattacatcaatactataattaaatatttattccgatgcattcttcgttattttctagatttctaatagtgaatttgtttatattaaatcacgaatagaatagtaaattcacatgtagatagagtcacatacatggaaatactgttctggttttttatgttccataacagttgcattatagttgtataaacattttgcaattttcatatcgtcaatacaataaaaagttctttaaacaaacatttataacatgtttggttttattaatatactaaattagttgatataaagttggtttatagaggtctaacagttgtttcttcacatattactattaaggtacaataaattgtcgacaatgtaaaaaaaaaaacactaacaaatagtttcttatatatacacattcacatttaatatttctagttgcaattatgttgcacgttagttgaataataattttgctactacaatatcatggtattataaaatcaagactcaaaattatcaaatacgcgacctgaatagataaaacacgatggttgtaatattcgtttgtacaaattatgtagaattatagttgttttgtagttttatatttgttggcttgcaatataactgttacattacacactacaaaaaatagctacttttagtgacaactttttagtcacaacataaatttgtgacttttggtcacaacaaaaaactacttttagtgacaact

SEQ ID NO: 102615 - DNA, 575 bp, Cannabis sativa
gataggaggtactgggtagcatgttcatccgattcttgagtcttaaagaggttctcgaaaaaggaagacacttctcgagatatctcatccacagaagtgaccactcttccatcctcacacttaagctttcgaatgaaattagttttcctcctagcagtggctttattgtgaaaatatttggtgtttttatcacctgcttgcagccaatggatttttgatcgttgtttccacagaatctcatctttatagagaagagaatccagttgagattgtaaggcagcaacctcctgaatctcatctctggaaaggggaaggttggaatgaatggcattgattgagttttcaagagtactaatcctacgagaaagactattgaaaccagcattccaatttttgatatcatcaacacacagttgctgcttaagcaagaaagagtcaagggttagggggatttggttgggagagccatggtgccaacttttcttgacagtttcgtaaaaagatggctccgtgagccaaaaattctcaaacaaaaagcgtttgtgcttcggaggcatcatactctcatcattgag

SEQ ID NO: 102616 - DNA, 503 bp, Cannabis sativa
tctaaccaatttgctaatgtgatggtgagttatacacataaatgaggattttgaggatgactcgaacaagaacataatgataaaacaaaaaacagagtagatcaactagtgtagaactcaatctacatcaaataatatgaactaaaacaatcaaagataaaacagtaaatggagatagattttacgtggttcgaacacgaataacagaatattatcctgcttactccacgaccagaaagaaccctttaagactttgatctttattgattgagaatattcaccaaagataagaactctcaagaacagttcatatatattcaaatgaagcttcgcttaaattacaattagatactcatttctctctttctcactcaatttttgttttttgtcaatttatctctattccctcgcaatggcttgatctggatctacagaactgtcatagcagaatgttagttaattttgttatgacatgtctgagctgttaagtggtttttatccaa

SEQ ID NO: 102617 - DNA, 586 bp, Cannabis sativa
tatatcgaatggattcgttagaaaaatgactaacaaatttgtaaaaaatatgatcttaaggacgattattgtcaattttcaagataattaaagacttatctgccactacaaaaaaaatttctttttgtcacagtaaaatttgtgattaaagataaaataattgtgactaatattaaattattattattgtgttgtgactaaaatgtctgtggctaaaaatattactcacaaaagttacaatttattgtgactaaatgtgtttttagtcacaatatttgttgtgactagctaaaactaaattagttaaatactgttttagtcacaagtaattttttattgtaactaaaagtcttatttagtcacaaaaaatttatattgtgactaaaaagtaatcaataaaaataacagtttttgtagtatgaatcaaataagtttctatagacttatgccctaattttcctaaacaaaataatattaattataatgtgagcaaatccaacaattgaatatgtattattcatataattaatatataacacatagaaaagtaaaatttaaattattgactcaaacggataggaatgat

SEQ ID NO: 102618 - DNA, 786 bp, Cannabis sativa
  modified_base (694)..(707): a, c, t, g, unknown or other
attaaacgtgattaactgctaattaaactaagcggtctttacaaaagtcgccgacaccggaaaagtcgccggcactggaaaagtcgttggaaaaataaatgtcaccggaaaagtcgtaggaaaagtcatcgtcgccagaaagtcaacagaaaagtcaacatcgtcataaaagtcaacaaaaacatcaacgtcgccgaaaaagtcactggaaaagtgaccggaagcaaatgtctcatatataactaaaaatataaccggttatatgaataaaaactaataactcaaaccagttataattgaaatataaccggttctataacataataaattaaatataaataacataaaataactcaaaccaattataattaaaatagaactagctctataacagtgttataatgaataaaaaacaagtaacacaaaagaactcaaactggttataactaaaacagaaccgattatataacaaaatgaattacaaacaagtaacacgcaataattcaaaccgattacaattaaaaacaaagaagaaatcagttcctaaaacacgaaaatataaattaaagacaaaactagtttcgcaataaaatacttcataacacataatacctcataaaaccggttataatttttttttaaaaaaaagcggggatcgaatgtctcggatataataaaaatagaaccggttctnnnnnnnnnnnnnnaaaaataaataacacaaaataattcaaaccggttataattaaaatataactggtgctgtaacataatgaataaaaacaa

SEQ ID NO: 102619 - DNA, 933 bp, Cannabis sativa
tgtcaagtcgtgtcgacctgtttttgacccgcgtctaattttctcgacactaacccgtaaaatttgtgtcgtgttcgtgttcgtgtgatatgttgaaacttgttttcccacccctattcagaatggagtttgacttagaagccagttccttgactagcgccaagcaatagtaagtaaggagaaagcttgaagaagttcatccaatgcatgatcgatgtagctactaaaaccaaagtcactgatgacatgaaaatggtggttctaacatcaaaatttatagcagaatctttgctgtggggatatcttcaatgcaaaagagcagacacggtaagtgagttcatgacaagagcttaaggatttataaacctagaagatacttacagtcaggcatatggaatactcccagaaccttccactgatgtaacaaatgcccaaccttcacagatgacaactccactccatccatttaccctccgtcaattgcttgcttttactactcctagagtatatagaccaagtacttttgtgcaaccaactacacaagctagttttttttgggttcggagctacaaaaaccaaatacagtgccgctcccagacaaacaaacccaagatcaaaagttctagagtccaacataacccactcacggagtaaaaggagtttgaagggtccaaatcaaagtgagtctgcgaagaagggaaagacctaagaattaagatacattgagtatacgagtctcatagacactcaagaaaatatataaaaggtaacatgtgacatggtgcattacaggaagtctccacccatgtataaaggcagaaaataaagaagagatctgagcaagaagtgtgaatatcatggtgatatcgatcacaccataaatgaatgtgatgctttaaaagatgaaattgagggactagtacagaacggaca

SEQ ID NO: 102620 - DNA, 725 bp, Cannabis sativa
actattcaagttgatactcaagcctttgtggaagactgtgatgaacacaatcgaaggaggagaagattcaggttcattctttggtaatactgtgcgacaaaaagaaaaaatggtttagagaactgaacagaaggagataatatattccgttgcaactactgtaagaatttcttaatacctttgtgtgtttattttaattatttttggaatccatattagaatgttagattagtcttaatttaacatgcatgaatagtaaataagattctaagtaaaacaagctttccaacaatcactcactatcttgctgatggtgtactcgtggagacagatgggtgctcagatcaggatctgccactattggattgctcctattaataggattttacacattaagatttgtagccatcagatcaattgtttcagtggtttgggaccttttggtagttatagccatctttggagaggatcaaagctataaacagctttttttgctctcaaggaaagtattaaaatgttgacctcacttttagctaacgatgctaagtcaattaaagcaataagaataaatgctaattattaaatgaaattaaacaataagaatacaaagatttatagagtttgacctcgtgatagtagtaatagcatactctccttttgcttgtattacttgtgagaaaataagcgattgagtttcttgattttttttgaaagcttacaatttt

SEQ ID NO: 102621 - DNA, 568 bp, Cannabis sativa
tttaatatatatttttatatattttcatttttcttttttacaaaaataaaaattattatcgttcagttatcttcacgttgtccttagggaaaaataacataaaaataaaataaatataacatttttttttggaaaaaaaaaaattgtaaaaaacctgtaaaaaaattgtaaaaatgtaaaagaaaagattttattttaagtgaattgtgtaaatttaccaaaatttatatctatatcgatatatttatataaagaaaaacaaaaattaaataaggtggcatcctatattttttttttgtattacacatttttttattagaattttagtgagtttattttttttatatatataattttatatatattgaataatctatttcttacaatttttttatttttttggataaaagtctcacattatttacaaataatgtaggggttataaataaagtatttcttcatgcactatttgtgcaaaaattagtatttttctttaattttgtatgggtgactgaatacgaccaatttttgattatttttgaacaatttgccccattattattagtta

SEQ ID NO: 102622 - DNA, 506 bp, Cannabis sativa
ttagtgaatgactaccgcccgatagctctatgcaacgttgtgtataagtgtatctccaagatcttggcgctcagacttcgacccatcctgccaaacttaatttctcctgcacagactgcgttcattaaagggagatccattgctaaaaatacgacaatggctaaggaaatagttcactttatggcaaagaaaagagggtctagaggattcatgctgattaaactcgatatggaaaaggcatatgataagatggattgggacttcgtgtgcgaggcgctgctttttcatggattcaaagaacctcttattgggtggatcaaaagctgcatgtgtatcaagaaattgaatctaatgataaatggagtcaaacaaggttctgtcaccccgtcgtgtggccttagacaaggggaccccttgtcccccgctctcttcattctggcggcagatcttttatcgcgtttaattatggatttcaatgctacgggcttgatcaagggaataaaagt

SEQ ID NO: 102623 - DNA, 652 bp, Cannabis sativa
cattgattcatgttcaactaattatctaattaaaaaagtgttattacaaaacatatttcattattaagtaaaaattttaaattttaatcacaaatgacaaaatacaagtagaattatgttagcaatgttttgaagctttttttgtcttctccttgtttgagaatacagagaaatggagatttttttttataaaaaattataaaatttgatttagtttttttttttgtatggattgtttaaacaaaatttaattgtttttttttgtttaaagttccggaggcagttttgtcccatgtggcttgcgattagaattttgcagatcatggtttggcaaaacatgcctttcggttagacgatgagctatcatggttcgaggaggttccatggtcgattgtggtttgctgcatagtttaatcatgtgtgactttattcaccgcgtcaaaaaaaaaaaaaaaacacactgttagctttttttttttttcactctatctctctctcttttcttttttcgaaagtttaaaattttttttcccgctacaccgataattatttagtcttaagagttgcacaattgctattcctatctcactttggttgagataccaagttttccataatttttattttatatatatgttagtttttgttgtct

SEQ ID NO: 102624 - DNA, 945 bp, Cannabis sativa
  modified_base (809)..(811): a, c, t, g, unknown or other
acccctatttatagtaacataggtacttaattacatttaaattcgaatccaataacaatattccccgaaattgtgggcttaaaatacactccatttcaatatgtgtaaattatattacacagttgtgatttaaaccatctttaaggcggtcaacgctgacatggataagaactaaatccttctaacgataccttgctagaggtatctcgccttatacatgaatgacttggtttattcatataccttctaccaatggcatgagcaccagtgtattgagcaaacttaagaactgctctttgaccataaggccttgaagattagacaatcatgtcctctaagttatttcacttagttattatagcgtgggttatatgctaactgttctaataatcgatttgccttgtcaataattctttacatacaacgagatagatgcctcgatatgtgttgtctatggctccctcaggattatgcctcccgagacaagagagtttctcgtcaatacatgaattgatagtttgtatatccttatctcgcttagtaatatacagttagcgagttacaaatgtactctattaattctacatttaatgagttattctattttgcatttaatgatataattaccattatatttgctgattcatattccttgagattgacacgtgtcactttctgaagtacaaccaaatttttggtataataattttaatcaagatacttaattattttgtttctatttcatgaaatttaattaaacactaaaatatatctaagttgaaagttattttttttaattaattttagannnacttaaattagaatattttcttatatattaaattagaattaatcattaagttgattttattctagaacttaattatttctattttaataactttaattcaatagaaaattatatttaagttagaaattttttaa

SEQ ID NO: 102625 - DNA, 584 bp, Cannabis sativa
aaaaagacaaaacgatataataataaatgaaaaaaaaaattgatgtcagaaaaaaaaaaggtggagagtttgagagaaaaaaaagtaattgacacttgatagatagataaaaataatttagtggcttcggtatacgctcgtaaaaatttaaaaaccaaaaaatcaacattcaatgtatataaaaatatttgagcgtatttttataaatatttaagaaagtatgcatactgagctaattttcacccacatgcattcaagaatatacaccatggcaaaatatatatctcaagcttcactaaattaagaactcaataaagaaaatatcaagatgttactccaaatacaacctccaaagtgccaacaagaatcacttcaagatcacctccaatttgaagtaaattttctcaaattaaaagcttcaaggagatgagtaaaagagagggagtgggggttcggccaagtgcaaggaaactagaattgaatttctttctatttctaccaaaaaaatctcattttattgaaagtaaaacaaatggtcaaaaagaccaaaatgcccctaggaccattatatcacataagcataa

SEQ ID NO: 102626 - DNA, 569 bp, Cannabis sativa
  modified_base (415)..(415): a, c, t, g, unknown or other
tcattctgagaagcagccaatatggagttgtaaatctgtaaagaaaagctcaataaaggaattaaagtgagaaagttacaagtatggttagattttgcatgtgagtaaaatagaatttcctattaaccaagtacaaaagtaaattataattactttagaattataacaaaatatacaccaaaagaataacaagttactacatataacttattaaaagagttactattatttatattttgaatgtaaaattaaaatacacttcttatttcttagtcatatagtttacatgtaaataatagtagttactaaaaatgaaacactacatatatactaggaagataaaactagcatgactctatatattgcggacaatgtcccacatgtaataaatggtagagtattgagccatatatangaacatgggctactccattcattgccaattggttttgagatagaactctataattctcaactctatacaatgtgtaaataaaaaattgttaggggtctttaataaaaaatataaataaaatctgaaactttagactttggatagtttggacctt

SEQ ID NO: 102627 - DNA, 602 bp, Cannabis sativa
ggcaaagtggtcattttgacctttgaattatattcaataaaagaaaggaattttgtgaaaatgagaattgatttttctagttctttctccacaaaaccatccccttccctctctctctctaaccctctttgtattttgttgaaaattggtgatttacttggtgttcatgcttgaaattggagggtgttaaagcttgatcttggttggaacttgaggtactttttattgctgatttttagttgaatttatcgctggaaattttatgtagaaaagtaaaaaattgtgtggtatttccttgaaatgcatgtgacttgaatttatgttaatcttgttgaatttgagcttgatttttgaatttgtagtggggttgtgtttgttgagttcaagatgagattttagggtgttttccatgtttgaaattaagttttttgcttgatgtttattgatcgaaaataaagtttggtactagcttgagagttctagctattgaacatgaattttgttaggtaaatgttcaagaatggagcatgaaattgtatgtatgtgattgttgtgtaatctgaattttaggggttattattgttggatttttaatgcttgaa

SEQ ID NO: 102628 - DNA, 1517 bp, Cannabis sativa
tagccataataataattagttattcattggtaaggctacatatgattccaatcaaggccagctcattcattggtatttgtaacaaaatttgaggccctgcaaaatatagactttgaaagctttattctggttcttcttctagtctaatgtcttagtcgaagaagtttcaggttctacaatctaaaattaaataggaaaatttgtaactaaagtaccaaaatattcaattttttttttttggattgtaaaattaccacaattttttttttggtacttagtacaagaaaagtaagaattttagtaatttgagtttattatattagtagtcatcaacttttaactttataataaaattttggtaattagataaactgtgttgtaattaaatttattaaaaaaattaaaaactaatttcattgttgagagaatgggaagaaaaagaacttgagagtgaagacaacataaaagcaggggcggagccagaatcgaaattcaatgggggccaaactatattataaattaagtgacagataattcaaaatatattattaatattataattaaaagtaaaatacagtacatctctcttagatgtcatgaaactcatatataagtgaatttttgctaatttttttagcaatttttttttctatatacactaacaaacaatcacttaaaaatatatcttttatttaattgcgaagtgtaatcttcgcaatattcatagcagaaaaagattgatctgtagaaactgaaagtgtagaataagagttactattttatacacaaatttaattttttttgctttttttattttttactaactactgacataaataaatcagaaatggttgctaaaatcgtaaaatcaagaagttttccactttttttttaaaccaatttttgaaaaacattgtgaagtagtaatggtctaactagcaaataaaccaaataaatattattaaagaatataaataaatactttaaaagaaaaatgacacttattattctttttataaaagaaagtaataattgtatatgattttgttagtgctagtgtagacaaaatagatttatttgcttcaaattttactttgacttttttaaaggagccgccatgtaataattattaaaaaaattcaactacagtatattaaattttaagacttagaattacatatatataattacatatatgctaaggggccaattacaatatactaaagtttaagacttaaaattacatacacataattacatatatgctagggggcatggccaccataaataaccatgtatgtctgcccctgcatagaaggatgtgaaaccagtgtgtcaaaatgtaaagttaatttgtctgataaatctgacgtggcaatgacacgtgttcgagatcgtattgttcaaaccatatggatggcttataataatagaaattagttaattatattctaatatttgatgatacattcaagattaaatttatttttatgagaatatattgtagactaatagtt

SEQ ID NO: 102629 - DNA, 929 bp, Cannabis sativa
gattcatcacctcagtcaggaaggatcttcaagactccaaagaggaaaactaggaattcactgtgaagctcatgtatctaaaagagctacactgaactgacttagagacaatagccaatctgactgttgagctcggagcttcgtgaattccaggaccaaactcgaaaggaggctgctaaggctgcgagggaggctttactggctccagttaattgcaagtaatgtgagaagtgcttcgaagatggggtgttcatgtgctgcaaatccaacaagttcaagcctcgtctccctttctttcctgatcctatggctgttttagctcagttttgggaaaagaacaagaaactggaagttgtcctggcctagcgcaggggtcctcgtctacctccacgagttgattaattaaacccttcccttttttttatatatatttttcttacttccccctttaagacaattttattttttgtatttattatctatattttctattaggggggactattatggctcgacttcaggccttttgctgtttacattttagacaacttatataagtttatatctattttgtttttcttatgtctagcctgtctatgcgcgtattttatgcctcacttagcttaaatttatgtgggataatgcatatattttgtccgccacatgttaacttatagagtaaagatgaatttaaatattggactcttagctattgatagtatttgcggagatggtcagcattccaggctctaggtactatagatccatccgttctctttagcttataggcccagagcctatttcatcttcaattttgtacgcgccttcccaatttagcccgagtacccccactcttggctcttggaggccgggaagacccttcttaggaccagatcaccagtggcaaactttttgtctttgactttgga

SEQ ID NO: 102630 - DNA, 505 bp, Cannabis sativa
gatttgatatgcatggtaatgctgatgaaattggttgatttattttattttcacatgtttagatgtatattggacatttcccatttacgtcaaaagaaattaggtcaaaataataagttaaaatcaaagatatagtaagattaataaattgcatgatgatagctcatcattgctatttgcacaatgtagctgcttgatagaaaggattggaaagatagggaggtggagctatggaaggatttgtgataggataatttatttggtggaaggatcttatatggaatgggattaggtaatagactgtaaaatcttattaaatttggaatacctttaaatttgatggatttagatttgcttacttttcaagtgattaatttatcgtttcacatatatccactttccttcctaccaaacaaaagcttgattttcacctcttaatacattgccaaacactcggaagaaaagtaaaggactatttccttttccaaataatcaacccctcctt

SEQ ID NO: 102631 - DNA, 967 bp, Cannabis sativa
atgtatttttgagggccccaaaatttatttcgtcttgggcccatatattttcagggccggccctgggcacaaattcctagcatgtacaaaataagacatacatgacctataccgtaggtatcttagggattaggtgaaaataatcttttatccttccttgattgatgtgagtcttcataatggagccgtcactagactcgttgattatcgtgtaatcaccgtaaaagaggcttacaccatttgtcaaatcctcttatagaggttctaatacgtttttcacatgccgcattaaatgcaaaatgactgctcgaacgggctcttcttctccgagaaatgcattgttacatttctagctcccggagagtaaatgtgtgctttacgctcctctccgggaggctcttctctgtccattcatgacttagccaatttttgtgagtgaggtgctcttgaaatctacgtgtcacacgcagccgctgccacgtatttagagaaaaattcgactagtaaagggtaaatgaggcttgtacgcagcctccgattaccttataaatatagtggcacgtgccctaggcgcgtgggttgcatttatgaccgtgaatgcacttctctgtccattcatgacttagccaatttttgtgagtgatgtgctcttgaaatctacgtgtcacacgcagtcgctgccacgtatttaaggaaaaatatgaggcaacatttaccccccaagtctcatttagtaaagggtaaatgaggcttgtacgcggcctctggttaccttataaatatagtggcacgtgccctaggtgcgtgggttgcatttatgaccgtcatcattgatatttatttctttttgcaggcaacgattcgcttcccgtccattgatagacacatgtgtttaatgctggtgtcagagaggcactcagacggtaaagatagcagtatttgggaggatccttgggtggcccatggg

SEQ ID NO: 102632 - DNA, 608 bp, Cannabis sativa
ggaagagggaaaaccaaattgagtgagaatcggttgtatgaaaccccacttcactcaatcaaatgcttttttcatgtcaagtttcagagcagcccagccaactttgccaccttttcgattattaatggcagtaataacctcattagcaataaggacattatcaaagatgatccggtcgctaagaaaggcactttgattattagagatcaaatcactcaaaaccaacttaagcctattagcgatagtcttagcaactaccttatagatagtagtacaaaggctaattggctgaaaatccttgagagaagaagcattcttttttttttttggaatgaggaccaagatggtttcattaattgaggaaaagtcggattgattgttaagaacatcaagaacagcagcagtaaaactgttccccaccgtggtccattcttttgatagaattgagcattaagcccatcagagccaggagctttatcaccaggtaattgaaacaaggctgaatggacttcatcagggctgaaaggttgactgagaagttggtattgagcagtattgagagaatgagagattccttgaagaataaagttaatggaagtggagtcact

SEQ ID NO: 102633 - DNA, 545 bp, Cannabis sativa
agcccatacttaagcaaaccctatttttttgtctaaaatgttatgtacaacaaaatttttaaacttataaggtgttttttttttccttcttcagcctatcaagtctagactctacacttattcattggtttcaatgaatatttatcctcccagcataagctataaaataagttaaaaattggtagtactcaagaaaaggacacttctttaatctatcaagtctatagactcaatgttaatttcacctataagttaattcacaaagattcaactcgcttatcgttgcaagcgggagacgttagaagagtagctgggtcaatgttggaggaggtcgatcggagtagtggcagtgggttggccatcaacaccaggaaggtcagtgaggtgatggagttaaagaggatgagaggatgaagataacttcaaattcagattttttaattgtttgtattacttaattcttacaaaaaaaaaaaaataataaggctaattagcaatttttcctcttaaattttgacatataccaaattatatcctttgaattt

SEQ ID NO: 102634 - DNA, 542 bp, Cannabis sativa
cctgtttttgatccactcatacaaatgacccaatcgaattagattctcaatttcgtccttcaagtttttacactcctttgtggtgtgaccaatgtcgttgtgatagttgcatcttttgttggggtctcctgggagctattcctatacaggggtggaggcttccggtaatgcgtatttttctgagtgtattatggagtatacccccttcgctattttttgtcatcagtgcgcatgcaacctttaaaggatctcttactccgggagctttgctgagctcctaccatactggtggttggtgcggactgggacggaattcggacactcaccccagaggggttgctcatgggcgcaccaaaatgcgacaatgcaggagttaaagtgaggctttggttgtaccctggagtagtggagaactgcattctgcttgtttggggagtggcaggaggtggagctcttgtaggctgtgctcctgatgcatatcttgatacttcggttgggtaataccctccgtaagccactatttgagcttcttccaaaaaggg

SEQ ID NO: 102635 - DNA, 505 bp, Cannabis sativa
agctaaattattggtaattatttcctgtagaaataaaaaaaaaaatcatgtgtagttatactattatagattaattaaatcaatattatagacttcttaaattacttattttcacagtataattattattattttttatcaattctttcttagtaaaataattaaatttctcaactaatttattacataatgtcaccactaattagaatcattattgtattagagaaactagggaattaagccgcgtttcgcgcggtgttgcttaatttttataatttttatgtatttatattaagtagtataatttaaaatataacattttagtgtgtatattataaacaaattaatagtgttgaaattaaaaatataatttgcaattttaaaatatatagaaaagtgaagattttgtgataaatattattgtcataattactaaaaaaaattattttatgattattttttcgtattttttatttcataaatttatattctaataaataattat

SEQ ID NO: 102636 - DNA, 995 bp, Cannabis sativa
ttgcaataacatgagtgacacagatattcaaagaatccttgatgcttctggattcaagagacatgaaatgccctttaggtatctgggagtgccaatttgcccaaagagaatatcttcatcggaatgttctttgctcgtggaaaaaatggtagctcgaatccgaacatggagtactaggcatctaacttttgcaggaagagtggtgcttattaactctgttttgatggccattcactcgtgagattgaggcaatttgcagaagtttcttgtggagtggcagccaccaactcaaaggggttactgtcgtagcttgaaagacaatttgcaaggagaaatcagcagggggtttggggctcaaacaggtaactgaatggaatattgctgctatgtttaaatatgtttgggccattgctaataaagaagataatttgtgggtgaaatgggttcattgtgtatacataaaagagcaatcatggtgggattataaagctaaaagcaatgatagttggtattggagaaagattgtggcaatagaagagagagtgaaagagatctatgatttagaagaaaggagcacttgagtaacaagtatgtcatcactcaaggctatcaaaagctcatcttgcccgaacctaaggaacattggccgaggattgtttggagtaggctaaactatccaaagcatagttttattttgtggatggtcatgctttacagactcaagacaaaggataggattgccaagtatcaacctgaaattgataaaatttgtctattgtgcagcaaggaagaagaatagatggaacaattattttttgattgctcttttggaaagacttgcttaaatcaaatacatgtttggctgaactggaacatgtgcaaaagaccgcagccaggagttataagatggcttggaaaggccaaaatcagcaagtttcgaagaggtgtaatggctgctgcacttgcagctttggtatatacattgtggggctccc

SEQ ID NO: 102637 - DNA, 540 bp, Cannabis sativa
ttatgtttcaatttacctctttgtatacatctaataattttatgttttacatctgcaaaggcacttatgagcaaagcatattatattctactgcattaggaagcaccaaacatccaataacttaactaaaacaactatacaattcagaactcaaaactctttctcaagttttatatatcaattgactaaaaatgaaatgctaaagcttattcttttattgaagctttactaccattttcgtatgacattgaactttcgctgaatgtcactagctcgacatacatttttactgcagcctgtgagaactcagccaaggactcaaaaagtgaagaaaatccagtctgaaatccattcactgctgttctttgtgtctcgtgcatgttagtttgatgcttcaccttctccatgtctattctcttttgaaacatatccaactgttccttcttctcggttaaatactcaatcctactcctaacatgcatttctgcctcctgtcccgaaagcttcgattcaagcactcttttttctgccttttgaaat

SEQ ID NO: 102638 - DNA, 986 bp, Cannabis sativa
tcgtgatgtgcttgagatgaaagagttgcacttagaaaatgtgcataccagtgagaatggttctaatatgttgacaaagactttgcctaagggaagcttaaagcttgtaggcgaagagcgggcttagttgagcccattaattgaggtaaagggggagatttggtgggtccaccacattagtgggcttggactaaaataagggcttaaagcccaaattaaatgaaacataaaagacacataaagaagaagaagaagatgtagaagctaatggtgtcgtgaaaaactagcagccaagagagcaagaaagaaaaagaaaggggaaagaagataagaaagctaaagtgggttttgccactttacattgaagatcaagtggttgattctcatctatgttagctcaaatgaatccttgcaagacgctctaccaatctaccagttccgatttggtgattgtcctcgctaaagtactcttctacaatacttacttggtgagacgtaatttttttttatttgtgtatctatcttttgagatgatgataattgtattaatgatccaagattatttaattttgatactattgtgagcctctagttatactagagaagcacattttaattccattattgaacattggtgatagttgaagatttgatcagactacggtctctgtagtttttttttttttacattgggtttctacgtaaaaattttagtgtctcacttttatgtttgatttgtgtattttatttgcttgtggtgtttatttttaaatggaataatcaactttattaatcacaaattttatctactaaataaggtagcaaatcagttggaacatgttataaactgaaacgacaactaaagtataatataacagcctttacaaaattatgagtcactatattaacagatcatttaataaaataaacaataacactctttaaacttgctaacaagtttttaaaatcattaatgataccataaa

SEQ ID NO: 102639 - DNA, 524 bp, Cannabis sativa
ttcggatccccgatgggaaactaaaaactactctttattttgtaaaagaatcgttccttccttcattacttgtttattttgttttacggctagaacgcgtaattttatggctcataacgtggccaattgggcttttacctataacttatatgattgtattaatgttgttcttattcctcagaatatttgttgtaatgaccgcgaggtctaatattttatgaatcaacgtttcctttcaaaaaaaaaaaaaaaaaaacaactaaacaacttacaacaggctttgactactatctttattaatgagcgagagattaaaaatgtttaccttaaaagtttcctttaggcccgcctccaaaatctattttttgtctatgtttaaccgaaaactttcatcaatagtgatacgacgtatatcattattagtagaattaaatatcaaattttatataatttaatttaataattattatgaaaaaagtcactacccaatctttgctaccagaatattaaatactagtgcctta

SEQ ID NO: 102640 - DNA, 917 bp, Cannabis sativa
aaaaataatacttgtaaagaatatctctttcatctaaaaatatcttcatcccaaatcaaatctcattgcagctaataaatttgtgaaaatttaattcgaaccagtaagagaaggccattggatgttcgagattgtgacagtgaagcaactgagcgttgaaaaaagcttgttaatatgtggataaactcttacaacaagatcctctgcattctcagctttacataattcatgaagcttcttaacctaattattcaaaaagcgaacacaagacagtgagtgagagagagaccacaccacgcattacctaactcgaattaagactcatttttcaaagttttcatttcatacaagctttaagaaaatgataaatcagagacactcacagattgtacaagagaagaatcagaagcgggatcactggcagtattggagtctctggcagactgcactattcgataaacttctgagataaaaatcccagtcgcggcttcgctcatccatttacccaaacaaaaacagaaacattacattttgaatcaaaacattaaaacgcacaaggaacagggttggaatccagaacaacaataaaagcaataaaacgcacaagataccttattgagatgagaggaagggaaccggcaaagtgggcaagccggaggaccccattggagcggccacagtagagaagtttaggggttttcctgtgaatgaactatgtttagccacatatagaaaggggacggagaagaagaagctgagactgaaaaaaaaaattgagatgcaaaccctaaaatcagacgagagaggaattcggattttctcgggaaaatgaggagaagaaaatgagatttggtgaaattgggatttaatttagggtagattcaaatttcttatttcttttaaaaaaatatattaaa

SEQ ID NO: 102641 - DNA, 747 bp, Cannabis sativa
  modified_base (377)..(381): a, c, t, g, unknown or other
taaaataatttccaacaaagttgccatcaaattgggttccattatcggatactatcttcatcagaattataaacctacagataatgttcttgacgacaaagtcaaggactttcttacaggttatggagacgaggggctcggcctccgtccatttagtgaagaagtcgactgctactaccgcatacttagctccaccttgcctagtggataatgccccaattggatcgatcccccatatagcaaatgggtagggcgaggtcatcattctaagttttgttggcggtacgcgaggtatatgtggaagcttctgacacttatcacatttcttgacaaactcatgtgtgtcattattgattgttggccagtaatatccttgnnnnntgatctttttagatagactttgccaacccgcatgatccccacagaagccttcatgaatttctctaatgattttgtttgcttctacgaggagaacacaccaaagtaggggcattgataccctcttctgtatagtttgtcttcgatcattgtgtagcgaggcactatatacaatagtttttgcgcctcctttttgtcatttggaagttgcccgtcgagtaaatagttgataataggtgtcatccatgtcggagagtgatctatcatctcgacgtctttggtttcacatatacttggctcgctcaacatctctaccggaaccagatttagttcatccaggtcattctgcaaggccagctttgctaaggc

SEQ ID NO: 102642 - DNA, 589 bp, Cannabis sativa
tcgaaattgtaagatagagctttaaggtgtgtttgacattgttttctattttttattttaatactaataaatcgaatttgttggaaaacttaagttatgaaaataaatctagtttattaattgtaaacgtttatttttttgaatgtatcagaattatttgattattttcgatggtgattcaaaattgtgtttaaaaaatgtaaacagaaaataacttttgtagtttttaaaatacatgatacgttaggttaatattttctaaaaactattttcacacctcaacaagaacccaacccaagccgacacatactctagacgttgagcctggaccccagaccccaacttcgaacatagcctcaacggccctaaacctaaacttggaccccggacccaaactcgacaccgaccctattgaactctagatcccgaactcgaccccaaaccccagtcttggactaaatcgccaaccctagaccctaacccccaaacctggctccaaacccagatcttggacccattccagaacctcgactaggactaatgaagagaaaaaaatatgtaaacaaaaaaaaaaatcaaactagaaaaa

SEQ ID NO: 102643 - DNA, 543 bp, Cannabis sativa
tggcttgggagacattatttcaaagtctaagtcgcctggttcaaaagcaatcgtgacttcaagtaaaagcaaaggcttagccaaaggaataaaggacacactaggagattctagccaagctgcatctcgcaagaaacggcgtttgccttcaatgaattcttgcaagaagtgtctgtggcgactagcattatcttcctgatgggctctcactaaatgttccttaaccctagcatcgtttaactctaatttagatgtgggttttgaagggttgggttcataagggacggctgattgtgtaggaaattcaagctctaaattttttggacgataaatttctgaaccatattgagacattgcaacaagaagaaagcaatcccaatccatgcaaagaattttatcaaacttgaaggtggtgagttgaagtttttgaaaaaacctacgtattgtctgaaccctaatgttgacccaaatacagttcagccctaaaaattactacaaccgaatgagatggcgtcgatacaaacagatgatgcaacaattaaa

SEQ ID NO: 102644 - DNA, 635 bp, Cannabis sativa
gtaagctagccccgaggtatattataccttttgaggttatcgagaggattggggaggtcgcttaccgattaaacttaccagggcagttgggacatgttcataatgtgctccatgtgtctatgttgaggaattatactcgagatctatcccatgttattgagtatgaggctatccctcttaaggaagacatgacttatagagaacaacctgtcaaaatcttggcgagagagctaaaagtgttaaggaacagagagattccagtactcaaggtcttatggaaaaaccacagagaagacgaggctacttgggagttagagtctgagatgtatatgaagtatcctcacttgtttaatttttaacttgaggttgtgctttgaaatttcaggacgaaatttctttaaggagggaagaatgtaaaatttcggttgaccgagtcaaagaaaaaaaagaaaagtagtatatataataataataataaataataaaatgatatgatatatatttatatatatgaattctttaaaacttatcagacatcaacgtctctctctctttctctcttttcatctttctctctcttcaagcttcaaataaaacccacaaccaccatcaccaccaccctccggcgacccacc

SEQ ID NO: 102645 - DNA, 1130 bp, Cannabis sativa
ctttctttcttttactattgattacacctttatttacttctttttaatgtttattaccaaaacaaaaatcacaaaatcgtttgcccctattatcattatttattaaatttttgtttctatttttctactaaagtttttgtccataatcacctccctgtggaatcgaccaccctatctatactacaactaccgctagtggaagtcacattttgggcgttacacatcaatttcaaaaggataaaaatgcatcaaattttattcagcatagaatacaacagtcccaatcgcaccaacatgtctggtaaagtccctatccatacagacgtccgcacagggacttagacgtcaaatattatcccaatttttgtcctcctaatgtggcatacttacatggaaaaaatcactaccacatggtagtacaattgattaataagaaggccaagtcagcacctaagcaaacagagacccatgtgttatacccaaaatttggttgtactttagagagtgacacgtgttaatctcatggaatatgaaccaatagatataatgataagtatatcattaaatgcaaaatggaataactcattaaatatagaattaataaagtatattcatcactcgttgactatatagtcttaggcgagacaaggatacgcaaactatcaattcgtgtattgacaagaaaccatcttgcctcagaaggcataatcccgagggagctacggacagtgcgtagcgagacatctaccttgctacatgtaagaaggtattgacgaggcgaatcaactgttgaaactcttagcgtataatttacgttataataactaagtgtaacaactgggaaacagggacgacatgattgtctaatctgctaggccttatggtcaaagagtagttcttaagtttgctcagtacactggtgctcatgctattgttggaaggcatatgaataaaccaagtcattcatctatgtataaagcaacatgcctctagcgggacgatcctgtctcacgtcagcatccactatcttaaagataggaataacaaacggttatgcaaatttttagctctacacgtgttaagatggaacgtggtcaaagcccacaattcgtgaaaacagttatgtattt

SEQ ID NO: 102646 - DNA, 626 bp, Cannabis sativa
attatctaatttattagatttgactattttcttaatttttttaaaaagtggacatttactaacttagttaccaaattgaaggcgactttgcatttcaatccaaaaaaaaataattcttttttggtagagcatgggccaccaccagcaatccataagaattaattatgttatcatttatcattttccacaatctcatctcagcccatctcttctcttcactttctttcttcattttcgaactagtagggaaccagcagagcaaaccaacggctgagatcaaatttcagcccagccagggccagctatacttgtaagccatctctaatctccagagtaattttattatttcttctatatatgtaaacttttcctttgtttgttaatttcaagatcactgtaaatgatttacatatctttaattttgtttgattgtagtcttcatgaatcagaccattaattatctttctctcttttttctacctccttctctaaattatttaattatattattaattactttattttctttcttattttttttttaaaactaaacattaatttataatgacagaagatcatcttatcttctggtacatatattaattaattagatcatattataatat

SEQ ID NO: 102647 - DNA, 618 bp, Cannabis sativa
ggccttaatgtaagccagctcctgttccctcttgaagaggtacttctggtacttgttctccaccatggcaatgatgtcatcccggaacaccttctccgcggccgaagccttcacgttcgggcagatgactttggaaagattgtagtcgtccaccgactgatgccccaggatcagcttggccttccgacagtgttccgtcgtgaccaactccccgacatcaagggccttcttgtcgtttgtggcgagggtcttggttcgttgaagaaatatttgagtgggttcagtccgcatgtaaggggggatcctaacccactctgtgagaagctctggatgatccacagcctggaaaccggaggagaagaagaagcggtgacgatactccttcacaagcttctgctagttgtgagggaccggggactcattcaaaggatgggcccggagaccgtaaaagttgtccttaagtttatctccctttttagggatggaaacaagttcataaaaatataaaatttctgccggactaggcgaacccaagctccgggcagcataaaaaatgaacaagcctgaaagcaggcggtaagcttgaggaataagttgatatggcgcaaggccgacaaa

SEQ ID NO: 102648 - DNA, 645 bp, Cannabis sativa
tttattttgaaattaaacattatcatcaactatataaatgacatagtttaagtaatttaatttagcctcccctaatcattattcttttttcaactctttatgtttctatatctttatatgaatgctgtgtttgtctaggaggaaaaaggtcaaacaattgactttatagaagttgttatatttaaacataaaaaccacatatgttggacaaatgcataaattattaacaaatggaattgcaaccattgattgctctatacttttgcttaattaaatacattcatatttccctttttacgttttaataacattttgttctctcatgagtaggtggcgtgtaatcaaaaactaaaaaataaaatgcctattattcattttttattttcgaaagggtaaaaaaaacagaggcctattagtgccgtcctacaaatactaccaaaatgcaatttcatttttatgtcatatcgtcatttaatataatttgtatttataagtttttttttttcttttcaaaatcacatcaaacataatattacaagccatttgaaagtgacaatctgtcaagcaaaactaaataaataataattacttcttagtgacatcaaacatgtaaaatcgaaattaaaatttattacaagatcgatt

SEQ ID NO: 102649 - DNA, 668 bp, Cannabis sativa
attcattcttaatacgctgaaaggtttgggtttccatctcaatttggtgaagtgggttgagaagtgtatttccattcatcaaatgggactgcttatcaatggatctgttcaaggtaccatcaaaccttcctgtggactcagacagggagaccccctatccccggcccttttcatcattgctgcggatgttctatctagactaataactacaagaatggtcgaggggcacgttcaaggtttcaaggtatccagagatggcccggcagttacacatctgatgttcgctgacgatgtaatattattcgggaaagcttcggttaaggaagcaacaagtttccttcggtgtcttgaagattattgctcttggtcgggacaagcggttaactaccataagtcaacagtgtttttctctaaaggagtctcctcggggcttgcgggggagatttcggggattcttaacatgaaaagaatgaagaatgatgcaacctacctaggccttcctctcttcagatccctcaaccgttcaaaagatcttcgattcctggtagacagagccttgcaaagggtaaagagttggaagacaaggcttctctcaaaagcgggaaaaacctgcttgatccaatcggttggatccgcgttggccacttatgttgcggctaatgaaacaa

SEQ ID NO: 102650 - DNA, 601 bp, Cannabis sativa
attattttttctttttcctccgaatctaggctctttcccagccggagtactttggtggagtcgaggtcgcacactgatatttcctcgtctccagttctatgttgaagagacgggactaggaattggcaagcctactattggtgagccccgtgtagatttgggagaagatcttgaattatccaaacttagagaggccatctaccaagccgaccagactgaagaaccacgcactgctaattgcaatgtattcgcttagtaaagatgcaattccttagatggatggatgaccatgagtacatccttcaatctcaccaggcagagctggattgccataaacgagaagctagtgacctgataaggtagttcaattaaagaacggttggaagaagccaggatctcatcagagatccactccaaggaagactagttggcagattggggagattatatcgataagatatcccaccaggctcttcaagaactagtacaaaccttcctctaaccaaatgaagacaggccttgccacaaaggtctaatggcgagaacagatggatcggcaaccagtgctctggcagcgagctagggatctcaggcttagcaa

SEQ ID NO: 102651 - DNA, 711 bp, Cannabis sativa
ttgattacaaggttttggagcttcctgtcacagaaatcgattaggtaagctcgattctctcttttacactttctgatttttgttctttcacttgatttattctcgatctaactctatttctgtttccttgtgcatatatgtacttctttcttctacttcctcaccatgagaacttggtttctcatctctggatcttggagcagaatccttcaatctagggtttatttcttataactcttctctctgtatttctgatatgttttctgtgtaaatcactatctttgtttgctttgatctgttgtttatattcatgtaaagagtcggtttgatcagaggttcaggagttagttacaataacagttgtaactaactcctgaatcttgatccagtagaggcgaagccacctaggattgagtccttgttgttttgtttctgctgtaaatgctgatgtggatatttgtgtgtaagtggactggttataagtggaatttactcaacaatttccacctgaattcctcttataaccagttctgctatctgtttgtttatctctgagagtcttagcttgataggtcatacttttagtctcctgagtcaattcttaacaagttcatacaatgtgtgaacttgttaagagtcacaattttagttcccatgtctgctgggttatcctcagtaggcaccttctcaatgtcaatttcaccttgagtc

SEQ ID NO: 102652 - DNA, 881 bp, Cannabis sativa
accatttgttgtgcactcaagcaccaacaagaacacaatgcaagaataaaatggcttagaatgataaaccagaaacgcatcaaactagaaaaataaaagacagtaagaaagtaatgaggttcagtcacaagtttttgataaaacttggacctaatccccgggtagaaacaacactattgcctttgataactttttttattaatggcaaagattacaacttacaataacttgagaatcaagtacacaaagaactcaaatggtgcttcacaccagtaactaaaagagcttacaaaactgtcaataactcgaacaagaacaactttgaaaatcactcaatcttgaagagaattcatctcacattagctctcaatcatctttgtgtatcacccttactttgacttgatttctctctcttttgtttttgttgttgaatgcctttttatataggagttagttaatgtccatttaactgaaataactgtcaaccgaaaaggcagttaagttggttatttaagtgttctaaacctcacaatttccacctggtttagtacactttaacagcatagtaatcaatgccgtaaaagtaaccaatagagctgtatctaaaatccaatgaatgcaaatctcaatgtcagactctagtttgagttgatgttgagcaactcaagataaagcctaaacttgtctctcgtcaagctctttgtgaaagcatcaacagggttgtcatgagtgtcaatcttccttactgagactattttgattgaatcacatctctaataaaatgcatcttgatgtcaatgtttttagttctctcgtgaaacatgggatttttcatgagatgcaatgcacttttattatcacagtgcactgttacatcttct

SEQ ID NO: 102653 - DNA, 535 bp, Cannabis sativa
tttggttactctctaaaaacttatacatcttagtaactaattagttatttttaagttatattatggtagattataatttaaaatacattttggtaaccttaaaaatatttttgaaactattaatattaaaaaaaaattatttcaaattaaaaaaaaaaaaacatttaggttcgaagtcaaaccaaagtatatcaataatttatattgttcatatattagtgtataattaatatagggaaatttgattttctatacttacatatacctaatattttatccctaaactaatacatatcaccattgaaaagatatgaccactttatctaaaacctaaaaatacccctctcataactcaatcccatctctctcgcatttcagtacacgcatcggacccatcggacccacaattttttttagtgcaaaaacataaaatgaaaaaaaaaaaaaaaaattggtagtccgatgggatctgatggtgattcgatggtcacttgatattactttttttatgtacaaaaaaataaaaaaaaaaaaa

SEQ ID NO: 102654 - DNA, 931 bp, Cannabis sativa
ttcaactttttgaaatctgcattttacggatctaaaaattacagtgaggacattagttttatgcgaattaaactggatttctaattgaattttagtttcatagtgatttttcaacacttttttttttttttttttatgaattcgaaacaattcttgttttgattgattctagtcgtcttctggggtgaagttgttggttctctctttctggttaaattttcgtttcggttacgttgagttgctgcgtagttgttcaagaagcatggatcatgggttgaagatatgtgtaagaggtatttgtgtaatttttttttatttaggcagtatatttatttattttaccagctgaaaatatttttgtaatattattattatttttttggttaaaactaaaaaaacccctaaaattaataatttgtatagagtagttttattatgaatttatatatacatatagcaaagtagatgtcaaaattgataaagtagcaaaagtaatcttttattaccatatattttccctatatttcttgggtgttaggtcatttattttttctttgaaagggtgtttaaggtcatttgagatggtgtaacactaatactaattaaacatcactttccagtgacttctcacaaaaaaatgcaatcaatcaaccactatgtataattatcaaaaaaaaaaaataatcaaccagtatgtatattttcctccaaacaagaaaccaaggatgttctccattccactaagtattcttttcttttcacttaaaaagaccaaaaagccccaaagtcccattccattacattattatcccatctcattccatctaatccactcatctttctcttatatttttttagtgctaaaatctttctaagtttacttttctttataaatataaagtgtcactgttaaataccaattaaattatta

SEQ ID NO: 102655 - DNA, 669 bp, Cannabis sativa
tgtgccacgtgtttattgtgtccacgtggacaatccaacctggcagttaacagctaaatttggacggaagtgttaaattgctaacagtttcctggttttaggagtttaccgtagaaatttgggttgtgagggtttaatgaaaccaaaacaaaagtattgggggttttcccgccatttaccctacaaactaaaataaattatttgttatgtattaaataatataattcacattgtattaaaatttatagtcataataattaatacaataaaataattatttataaaaaatacttaataataattatttagaaaaaaaacacttaaattgacttataagccaaatatatattatttttttgattaaaaataatttttataaaattatataaattaaatttaaattggcctaataaataatataatttcaataatttttcttaacttagttttatatttttataatataaattttcaaataatttgttctaatgaaaaatatttatttatttataatttttaaattatttcttaaaatatttagtaacttaaatttaagacaaaataattatagttgctcatatattaaattatagtgaatagcataaatttggggtaaaatcaatttttttccacataaaatattattttgtaaattgtttcaaactattt

SEQ ID NO: 102656 - DNA, 812 bp, Cannabis sativa
  modified_base (27)..(31): a, c, t, g, unknown or other
aaaatagattacattgaaatggagttnnnnntagggcataaaacctaacaaccatacccaaaggttcagataagattatcaagtactcatgtcggatcaccacttttgaaagtacgatttttattttctactatttgttttgtttatgctaagctaaagatcagatcagatcagatcaacatgatagctttgatgtaagttactacggtaacagacacattttcgaccaataaatgaataaagatgtttatttaaattcaaattgagtcaaattaatgagcatgttaccaatttaccatcgagtgcgtacaaaaggtttggtcgtacccaaaaccctgaacagacaaaaaagcatacttgtgaaaaaaaacaagtgtccaagagtcataagtctgctcagtcacttgggggcagctatacgtgtacaaagcatttggtgaaaaacaaaacaaacataattgcacgatcattataaacaaaggatgaaattcattgagaataacaaaagcattcaaacccaagattaaaggctgcccggtctgccagttattcaaaaaatgaaaaatatattcaaagtttaaagaccgcttggccggtcactttctctcaaaagaaggcctactggtcgagcacacataaaaagagatagtaaaaagaaagtaattaaacggcaagagtcagaggctctttgtataggtcagctggatttgaaggggcctgagaaccatcattctgggcgaaaggagccttatcattttgatcggtaggaaaggtggtagtggtcgcctcgggctccccgtaggccgcctgag

SEQ ID NO: 102657 - DNA, 677 bp, Cannabis sativa
ccaagaatgtggaggctaaatggttagggataagaagaggacgacgaagaataaaataaagaaaactaaaaaaaaataataaaaaaaaattatttttaaataatttatttatttatttttaaaaactaaataataatttagaccaataatattttgacacatagtaattttaaaaaagtaaacggctcaattataattaaaactaacagacaaataaaaagcacgaccttaaagactattactgtcaaattaaactttttagaacttttgcctcaaatttcacaattattaaacagcctttaaaatagaaaacatgtattttaagtgtaaattttaaatattaacttcaatattcaaatataattaaaattatcaactataaaatttaaatttttagttaaacactataaaatacaaattatacatgtaaaataagttagccactaaccgtaatttatgtattatattatagttttagtacaagtacataaattagtttattcaacccacctcatgtatttattaagcgttttagatttttagttagattattcaagttgtatttttttgtcaatttattcgatttaatttagacattttatttaagttgacattttgtcaaattttttggacacccctacttgggcgttttggatatttgaatgaattttcatctc

SEQ ID NO: 102658 - DNA, 713 bp, Cannabis sativa
gtaaaataaatttccaacagacccatccacaggtggtttccaagtcggcttttcttcaatgttactcgactgaggtatttgtattagctcagggttgccttcctgtgtgctttattctttgcctgtgcactctaccacaaagtcttctagggcctggcctttaattgatgttcggggtcggaaattaatctcgtactgacctagctccacttcccacttgattaaccgtctagaagcatctggtttttgtagtatttggcataatggttggtcagtgtacacccgaacaagatgagcttaaaaataaggccttaactttcttgttgctagaattagggagtaagcgaggccttcggcctcaattagtcttttactaatgtaatagacctggtgttgtatgttgttttcctctctgatacggcttttacaacatgctctttaacagctaagtatatcccaagttcttctctgtctagaggtttcgagagtacgggaggctttgtgagttgcatttttagctcttgaaaaggtttttcacattcctctgtccactcgaatttcttatttcctcttaggatgttgaaaaacggaacacatttgtctgttgactttgaaaataatctgctgagtgcggctattcgacaagtcaaacttttgacttccttggttcttgttggcgatttcatatccaagagggcttgaatcttctctgg

SEQ ID NO: 102659 - DNA, 821 bp, Cannabis sativa
  modified_base (433)..(445): a, c, t, g, unknown or other
gacctgggacctgaaccagaaccagaccgagattagtgacagtgatccagatcttgactctagattcgggtaatagcgcctggaatagaccagtagtcggtgtttagtcctgggactcacactaggaccagaacccagacgaagaacctaacccggacacagaacaagaccaggaccaggaccaagacctagaaccgaacacagacctagccccagatccaaactgagactagcactcgggcccggacacgtaattgcacccaaaacgaaactgagacccggacctggacctaaatttggaccaggtccgaaacacagacttggacctagatagggatccggatacgaacttggactcggaccaagacccagactgggattgaaatgctggacctagatctggactgtgatcttgacccagacccaaacttgnnnnnnnnnnnnngacccgaacttggaccttgacccgaacctagacaaagatcgaggtccggacctagacacacacccggacacagactcggacccgaactcaaacccacacctaaaataagacccaaagctagaaacggacccggacccaaactcgaacccagaccaggatcagaaccaaggacttatacccaaaactaaatccaaatttagatcgggattggaactttggactcggacccaacataaaccaagacccaggtcgcgaatccacaccctgagcctgatctggacctagactgaaatccaaaactgaacccaaactcagactaggactctaactctgaccctaactcaaacacaaactcgaactcagaatcgcaaatgga

SEQ ID NO: 102660 - DNA, 755 bp, Cannabis sativa
gtttactatgaacaggtacaacctgatccacacgttctgaacgggtgttttccaattttcgagtttcatgggttgggaccagatgggttggtttggtttgaaccaaatccggtcctaatgtttagccctaattttttagagaaaagttacaaattagataaaaataattaattacaaatatataacacttaatcttttgtaatagatatttacaaacttgtgaaaattgtttagtaatttgtatttttgtaatatacattatttttaaaattgttttggatatttttgaaaattccctcacgattataaggggaagcattaacttaagggattacttcataaatatacaaaaacaacaaaaaaaattacaaaaatacggtttcatagaattttaaatatttttacaatttttttatattttatttaagaaaatacgatctttttatgttgtactattgtcaatttgctgttgattttttattatctgtatgtttttttttttgttgttgttgttttgatgtatttttatattatttttatgtaattttcttgttgttttcgtattatttttataaaaaaactgtaaaaatgaaaacaaaaattctttaattgtaaaaatatatttttttaaatagtaccttaccgtaattatctcttgtcctaccctaccctagctattttggaacaatgccgtgaatttatcttgggccaaagaaaaagttgaggcccagtattgtaactctgagttgcctgtg

SEQ ID NO: 102661 - DNA, 822 bp, Cannabis sativa
taatccttatgaattattatgaaactacatttatagctctttgtcatgtgtaagaaattacaaaatcctaattatttgccttaaaaatttgtcatggtcttttttttgttcaaatatattagctactgttaaactttatttttattccatttgctatcttttgttataatgtttaaaggggaacatgaacatgacagatttggtcatccaagcgttacccttgactattcgttatctaaaacaatttagttttgaaaggttattttctcaaggagcttcttttaggcccttatccaacaacttcgagatgaccctatctgccaatgcaattcaacagttggaggtatatgctcttttattagttatgttataaacattgtttctattttgaagtttccacatgatgatagtttggactgtgaattgctaatatcggcaatcttcctacctactaactgcagcctctagtggtatgctttaaaattgtctttggtttacagtaaattgtttcaaataacaatgcatattatcttctctcattcacaacttatacaatcctgggatctaaaacaaattatgttaatcaattatttaacacttaacttgatgtcttatatttagctttcatcctttaattcctttccctttcagattttgcagaacaacaatgattggtccgaatcgggctctttgttgcagtccatggatcacacttttactatatttggttcaaggcttcttaggcactgggtaaggcttgtatcttactttagttttcaaaaatttaggaagggcacctgatatcaattaatttgtgagaat

SEQ ID NO: 102662 - DNA, 629 bp, Cannabis sativa
atattaggtaatgcacttgtaaaattgggtatatttcaatcaaatctaatgtagaggtatttttgattaattgatacaaaaaagaggcattcctcaatttatccctttttatttctcacgagatggtgattacagcaagtgtttaagtatcataagcttcgaattctagagagagaagctctaatcttaagggcggttttttgaatgcgaaagatgagctaagggagctttccttttataggtgaaggaggcccaaaaatataggagaaaaattataaataaagtacttcccaccattgatgatgatctaacggtaaaaattaacttttagtggtgattgctaattttttatgcctagcgggtcccgctgcgagttagagattatttttgtaactctcttggggtgaattttgatgaagatggcttcataatttggactaaggtgttagacatacttgataaagggcttaaattgttgggaatattttaccaggatctagattttttaacaagtatgttgattaacatcgtaaatatgaattctttaaaaacaatgaaataaatacataagggtttaagaaaaccttacattgattgtagcagaatataatgactccttctgttcaaga

SEQ ID NO: 102663 - DNA, 603 bp, Cannabis sativa
cctagataccttttttggccaaaacaaatctattctttgtttcactccagccttcagctctttacacaatcttgtgttgtaaggtgcttctttctcccaataataagagttcctcatcttccatatctgatatactaaactggcaacagcagcagctagcaccagttttctgaacttgccgatttttgcttttctcagccatcgaatcagcacagttaaagtattaccttaaacattccattgctgccagctcttgatgctttgtaaccaaagttgagtggttggacactcaaagaaaagatgagagtgtgtttcaggttgtgagctacatagcatacatacctgatctgcagcaatccccattttagccaatcgatctcttgtcttgagcctctgttgtatagctaaccagaacacaaagctatgttttcgggtattgagtatcccccaaatttgtttactccaatgcactttaattgggtctggacagtacgggtgaaaatcgatcggtttttacaattttataactgaccggttggttacgatttttattttacgaaaaccataaccaaccgtttagaaattataaccgtataaaactga

SEQ ID NO: 102664 - DNA, 611 bp, Cannabis sativa
aaaccatcacggatctgaaatatcgttataaatatgttgagttaaaaacaattgaatttagcattcttaagtccacaagtacaacctataaagattgcaactgtctccacagtaagtcttaaaacacgttgtcactcttaaagagttaataaaattaggaaaacacagtagagaagtttattcccaaacaaatgccaccatttataagtgacatgaatggatgaatactcggtaaggaacatacaatcaagacttcaaaaaatatacgtacccaactccaaaaataaataaataaaatactttctcttcagttattgttttgttctctccacataaaaattcacttcggattctccttatctttcaactaaagtagctagcacataacataggaaagagagtaagaagaaaaagtaccgaaacaccagcaggaggatcacggtatccggttaaaagagcaaacacataattctgaccattgtggcgagcctgaaatgtaaagttgagaaaatattataaaagtatatagacaaatggatagagaattgagaaatcattagcacaagagaatatctactttggtaatcagacttagatctggaggatatgcc

SEQ ID NO: 102665 - DNA, 550 bp, Cannabis sativa
cggtcggttctaattggatcggtcagttctcattggattggatcgatttatgcacacccctagttgcagctatctaaaatcactagtaaattagaaaatttcaaataatataccgtgtcaaaaataatatttaaatattttactcgcaatttttttatacgcgtagtaagtaactatttacacaaattaatgtagtcctaaatacttaccacatatacaataataaaaaaataaaaaaaaatttaaattaaagaaacaaattgaaaatttaccaaagcactcctatggaatatactaaaaaaatctccaattcttgtttttgctgtgaaaaatttccaatacttttactgtccaaaaacaactaaatacttttatttaaaggactaagtattttctttttgttttctctctttggaaaatagaaattgaaaaccgaaaaaaccaagagaacgcacactaagaccagtttgaaaagaaaaagtgtaggcacttcacttgtattgcctaatatgattaaataattattaatttaaaatattatagttttaga

SEQ ID NO: 102666 - DNA, 802 bp, Cannabis sativa
gggagaatatagaagccgtagtctcctctatatctggttgaagttcagtatttgctaaagtgttttgattatcatcaagtgtgggaatagtttctgggcttggtataactccaggtatcatataaaatccatccatagcctttcttttcctaggcccatgttccgattcatagcagttgaaatcatcaatgcaaagaattgggttgaaaatagtgggttctctatgatatttatcaactgtttttgacccagttagaggcccaaaggctgaagcccaacaagctcttgaaggccaatctaatggttgggcttgcggcccaagaagaggattaaatgattgtcctacttgaaacttggtcaacaatgtgaaattcccttcatctctaacggctactttgctaccattagaagaggaagcaatatcagagtcacagggattccctggtgatttcattccttttgtgggtaagtttcctttcccgccattctccaaagcattgagatttacatttgtcttgtctggttcttcagcatgggagcacgcctctgtagcagaacctggctgcccaggcttcgtactgctaatcgcaggatcgggattggttggaacaccaggcttcgatatccaacgtgtgatcaatggtagcccttggatatatgatagaatgcaattgattattgaaaggttgaaggttggtggagacccgaagctactaaccctgaatacgcttgacatttgggttcaacttcatgatgttgaacccgggtgtatgtcggaatcaacgatccgcaaagtggggaa

SEQ ID NO: 102667 - DNA, 514 bp, Cannabis sativa
atgttattttctttgcacatattttttcgtgtcgaatcgtgctcgtggactcgttctgatttcgtgtcgtgttaaaaaatttgactcatatttagactactattgtcaagtatgtaactactcaactctcccaccaaatgcaaagattttcttattctttagtgaaaaataataataagtaatttgcggcataaatacataagtttaactcttagttacagataaatgactaaatttaattttttacggtaataatatctatgttatattttttcaaaacttctataaatacataatcattaaatgctaagtcaatatctacgtgaatcaagactaccatattaacagtaaaatacttacgaaagttctaccaatataacttaagtattattattatcaaaaataaaatttaattatttatttgtaatcgatagttaaactttgatatttacgccacaaattactcaatatatatatattcataaatatgcttaaaattaaattttcattgcca

SEQ ID NO: 102668 - DNA, 511 bp, Cannabis sativa
caatccaacacaatatagaagccttattgggaagctactttacttgactatcacacggccagacatcagttttgccgttaataaacttagtcaatcccttcaatctccaagagttcctcatatgcatgctgcaaccagaattctccaatacctcaaaaactcaccaggacagggtctctttttttatgcttcaccaacatcatctctcaaactacaagcctttgccgatgctgattggggagcatgccttgacactagacgttcgataacaggttattgtatcttccttggcaattctctcatttcatggaaatccaaaaagcaacaaaccatttctcgatcctctgctgaagcagagtatcgagccatggctcacgcgacttgtgaactcacttggcttacctacatcctcaaagacttcaatatcaacattccattaccctctactttacactgcgacaacaatggtgcaattcacatatctgaaaatccggtataccacgaaaggacc

SEQ ID NO: 102669 - DNA, 888 bp, Cannabis sativa
aaacaatttttataaaaacatttttaaaaaaatattttcactttctaattaaaaaatagaaaactaattaaaaagtgttacctaacgcaccctaagtaaaaaaaaaatcgtaatacaaaaacatattgagcagttaatattattttacttattgtaattaggtcattattttgttatttttctattgctgtgtagttgtaatttttttcatgctaattgttaagttattttagagttgttttgtagttatttttagttgttttttttattttactaaaatacaatatttttgtaattttaaaaatttaaactcagcatttttgtaaaattaatagagtaaaaatgtaaaaaaattcatgtcacagtatttttgtaaacttttttcaattttaccatatttttataagttctccaaaaagaacctctattattggtattatttaataaattaaatacttaggtgtatttgataatatttttgttttaaaatttgttaagtacaacgataaaaagaaaaattttattttgaaaaacaaaatgtgttgtataaccacttttgttttttaattttaaaaacaaatatgtattttgtaaattttatttttattttcatatgttgattttatttaagtcaagtccgagatcaaaatcggggcaggtccgagtctagagtcgggtccaagtttaatttttaagaaaattttaaaagtgattttttgtttacttttaaaatttaaattcttaattaaaaaataaaaacagttatatattctttatagaacatgattttttaaaaaatgttaaaatattaccgaaagcacccgttaacatttctctttcatttttcattgttccttttcgttcctcgaacacaattaataataataa

SEQ ID NO: 102670 - DNA, 586 bp, Cannabis sativa
acagagcaatgcttgaagcagagtatatatatatatatatgaaccaaccagactaactaactaacccaaccaaacccacttaactaaacccaacttagactaggatataagtaccacactaactatggtaaagaaaccgttaaaacagttagagaaaagaggatagactctaactgtaacctgtaagtgtacaacaaccaattaacctttaacagaacacttaggaaaaataaggaaataacaatactcttaatatttacgatcttgaatttaataatttgcagttcaaatttttaagtaaagtattactcacatatataataagttaattagaatttttacctcccgaactttgacacgtaccaaatcatgccccctgagcttttaaggtcgttataaatgcttcatgaactattgagattgttgaatttaaagacttttatctaattttagtaaaaaaagtctaacatgtataaaaattcaggggcattatttagtacatgtcaaagttcaaggggtataatttggtagatatatcaaagtgtggggagcatggtttagtacataaacaatcactgaaatagta

SEQ ID NO: 102671 - DNA, 1102 bp, Cannabis sativa
aaattattaaaatggggtgtacttaggaatttttggggtgtaaataaaatttccctaaaataattaaattaacttgtattttgcaaaagttattaattgaaccatctattttagaaaatgacaaaataaattctgtattttttaaaattatataaataaaactctgaactaatttttttgtcaaaataacttaataataatctgatctagagatgttatgacaaaacttgttatattttttgtatctgttcgtgttagaaattatcttaaagttgattttattaaaaaataaaattattaaaattgagcttaaggtcctatggtcctatttttaccattttgaaaaatataagatctattttgtcatttaacaaaacagatggtctaattagtaacttaagtgaaaaatacaaactgaaaaacccgaccaaaatataacccgcccaatcaacttaaaataacccgaccaaccaattaagataattttttttaatatatatatatttatatatttttatgatatatatcatataagttatttggctattttaaaaatataaagttaaaactaatatattttttatggtggttaattgaaattttaaattcaatctatatatttgtctcattattacaatcaactaaaatataacaattgaatgtaaaaataaaaaaattgaaaaaaaatattagtagtcggtttggcagtgttgtgagcaaaagtggtacattttacatttatcaactcgtaagtgcacgaatcttaattgtagtatggagattgtgaagaacgaggtcgaacccatagaaattgcgtgatatcgaagaaaatacttatttaatctaagttattacaactctaacctagttcaaaaaatggttaggtttttggtaacaagataaaataagatattttaacgataaaaatgacaataacagatattttcagtgatatttggggatactattaagggttcagaatcaacttacgtgtatagaaaaatagttatgtttatattgattctcatactttaatcagtaatcaaactaattattttctaataaaaactagattttccttcgctttaaaattataacttct

SEQ ID NO: 102672 - DNA, 620 bp, Cannabis sativa
atttcgatccttattcatagtgtatatatgtttgatttaattccgcattttatacataaacatatatatttcagtttatacataataaatgtctaacagtcataacaattatccctccattaaaaagattttgtcctcaaaatctaacatgaataactctggatattgagtcctcatactagactctaggattccttcgtcctgctatttttctagagtactttaccaaagctatggtcttgtttcgaagaactttctctaacctatcgaggatttgcactagttgtcctcttaggataagttcgactgtagttatagggcttcataactcaagatattagttgggtctgacacatatttcctaaacattgaaatatggaatacattatgaacaactgacaatgctggtggtaaggctagccttatacgctacctgcctgaccttctcgcgtatcttgaacgaccctataaacctagggcttaacttcccctctttcgaaagcgcctgatacctttcatcaatgaaattgcaagaaaacatgttctcctatctgaaatgcaatgtctctaagcttcagattggcgtaacttttctgccatctttgcaatgtaagcatctg

SEQ ID NO: 102673 - DNA, 627 bp, Cannabis sativa
actattgagtttcgtcttcttcctttattctttttcttttggtattgctacatagaatatagtacacaacatttaatattacttattctctttttgtcattttcttataccaacagtaagtaattttactttatttctaattatatttttgttaaaaagaaatttatcatgacttgtttgtgtctcaatatatatatattatatatatatatgtatctattataagcaaattttgaagagggatgcacatttaataagaatacaaagaagaaattggtaagttctacttcccttttactttttcaaaaatatttccattattctgaagttttgattattaatttattaatgaaatatctttcattttaaaaaactttttacatgaacatatataactatctaaattgtttagaattatatgcacattatcttatttttaaaaataggttggtttgtaatgatgagtgaactacctattgatttttacagagcttgaaatgtcatcatccgaagaaaaaaaaaatgattcttttactgatgaagatattagtgaggaagttggaagtacaataaatttgaataaaatagtagaaacacctaagctaggaatgcattttgattcatttg

SEQ ID NO: 102674 - DNA, 559 bp, Cannabis sativa
ttggcaaaccagttattggtgagcctcacttggcactgggagatgatattgagctagccaggcccgtagaagctataggccaggtcactcaaataggacaagaagaaccacgcgctactggttgcaatgcttttgcctagctgatacgcaaattccttagaggataagaagaaccatgcattgttggatgcgatgctttcacctagtagagatgcaaattcttaaggtggatggatgaataggaggccatcctccgagctcgttaggcagagttgaacaaccttaagcgagaggccaatgacctgacaaggcagttcaatgagagagttgttagaaaaggtcaggatctcataagagagcctttgcaagggaggctcatagatagattaggtagggtctatagacatgtagacagtggacaaaaagtctaaccaggttcctcgaacaaaaggacacacccttccctgcctaatgacggtcaaatcttgtcagatagatcgtatggcacaaacactcagttcctggaaccaagaggtattgaatgacgaaaaagcaacca

SEQ ID NO: 102675 - DNA, 674 bp, Cannabis sativa
aagcttgatgtattctaccttctagttgaatcttgttgaaacttcaagtgctcgaacttcctttgatctccttgaagagtgcttgcttcctcccgagacaagacttgaaaagtaaacttccgaaagcttgtagaatcttctcctgaaggtagcactgttgttcttcttcttttaaagacttgaatacaaactcaagataatacaaaatacatataaacagagtaagagacgaacactctcttctctacaaaataaagacactctttacttaagaaatgaatacaattcaaagtgtatgaaagagatacaagacttagttgctataaaatatatttataatcaatatacaccttattgacaactcacacacggtctgaacaagactacaactcactagacaattccctaaaatagatcttcaataagccaaagaatttacatttctgtacctacagaatcgtaagcagtaagtgcgactttctttttataaaaaagaaagtcttgctttggttttcttcacaagaaatctgatcaaacatattagaaaactcacacaagatcaaatatacacgctggatagatagaataaggatgagtcataaacttaccctttataccttattttctataaatagaaaaactagacaatattccttcaatatataaatcaatca

SEQ ID NO: 102676 - DNA, 569 bp, Cannabis sativa
cttgataaaatttttgggattaaaagcattcgacagacagcacgccataagaaagaattttggggcagaattttcagtagagagatctgcttcagtgaaagagtgaactgctctttccttctcagacaagaccaattgagcattcatattgttgagaattgaatccataaagcaaaaggaggcagagtaatcaaacaaaaactggaggtataaagcatagatgatgtgctgagaaccatatatagcctcctggaccatgaaatactgttcagagaaagtgccatcatggagcacgacgccatggaaagaggacggagaggatgaattcagggccatgattggtaaccgccgtgaagaagtggagaaaaatggcagaaaaaacgggaactggtcgaagccagacacagagagaaacgaaaccccactcggccactaattgtgttctcttttccaattatatattgtttgtttttaagattttgtttttaaaagacaaaaaaaagtattgtataatcacttttaatttttaattttaaagataaaagataaaagtatattttataattttt

SEQ ID NO: 102677 - DNA, 857 bp, Cannabis sativa
ctctctcacacacacacacacacaaacacacacacacacacccaatgctttaccttcacttgagatttgccaactctagttttcacattgtaaccttaagagagctaattcagatgccattactatactatagtatagtgaagtgatctaagtagtgtagtgttatctctagtatcaataaaactaaaagaggagtatgtcattacctgctaactaagggggccgaacctttataaattcatgtgtctatttacttttctgttctaattgtgtaacaagtggaaagtattggcatttaattcgactctactgtcagttggaaaaatctgaagtcaataattcatgtgtcatacaattctcctttgatgtcttgtgacgtttgagttgtttttatgttagtgaaccttggcttgatgtacattctaataaattttgttgtagcctgtcgcttgtctacaaatcttatgttgagaccacaagtgtgtatcacctttttgtcatatctacgaattatgaaagaattggttggtccgtttcttgatgccattagtgtccacttgcattttgaatccaagcaacaaattttatgttttttcgcaagactttttgacattgtattggaagttatttctaattgcatagaaactaaccatgctttgtagtgtttctttgtccttgtaaatttgtgcttcttcaatttcaagatgttgaggatctgtgattagtaatttgtcataatcaatgatttcagcctctatgtgtgggttgtgtttcttgttcctcaactatttcctcagccaccagttttgcatagtccatgaagtcaaacattgttttaccatcttccaccattgtgc

SEQ ID NO: 102678 - DNA, 579 bp, Cannabis sativa
atgggggctgtagtccgactccgggggacatggtggagtggtgtggtagttatttagatgaattcagaggggatcggggtggcagtagttcgaaggagagaaggtctgttcagcggtggacacctcctggtgagagtcaagtgaaaattaatgtcgatgcgggggttaaaaaaggtggtcactgctcgggtttaggctgtgttgcccgagatttggctggggtggttcgacatgctgcagcaaccgtagtgcagcaggaacttcctccattgcagctggagctgatggcgatccgtaggggtcttcaactggggatacaacagaggtatgagcagtttagcattgagtccgattgtctccaagccgttaatttaatccaaaaaaaaggaagacggctgtagagacatagatggcttgctgcatcagattagatctctaatgtgtcatgttaatttttttggtatcatttgtatttcgcgaggccaactgagttgctcatgaattagccaattatgctttggttcacaaggttagtgccatatggattggggtcattcctccttgtgctcatcaagctgt

SEQ ID NO: 102679 - DNA, 503 bp, Cannabis sativa
ttaagcattttaatctatattttaatgggagaccaacgtgttaattgagattgaatacaatatttttgtaaaaattcatgatgacggctatatcttttagcaaaagcatatgcaaacgccctagcgttttgtagataaatagggccaattaatctgtaatggccacaagcaggccaaaactatagtttatgatctttctctatttataaatgttatataattaatatcatttgtttgattgggtttggttgggttcggttcggtttttctaacaactaccttaattattttgattgtttagaggtaccaagattaattatagatagttcgaaattttgtttaagggtgattatatttacactccagaaattataactacaccccattattaagtttaccccattaaatattactttttataactatatcccaccttatttacaaaagggtattatttgtacacttcaaaatttccttttaggttattaaaaaaaaaaaaaaaa

SEQ ID NO: 102680 - DNA, 512 bp, Cannabis sativa
  modified_base (443)..(443): a, c, t, g, unknown or other
tgttgcagagtatgattaagatctgaatctaaatctcgttcagttgacagtttttctacacaatctttctcactatgctaggtattactttaacatgtttgggcatattctcaatcactataggcttcaaaattagtgtgaagaagaagaatggattcaaaaatagaagaggctctctttttttctttttctatttttatctcacaaagtagtatgataataaattaagaaaacaagagtcatcttattctatttatagggtgacttcaagggctaggtttaaaattaaatagaataaacaaaaagataaaattggctttaatcaacccttgttggtcgaacccctagtgggccctacagggttttaatttcattttatttaaaacttatcttttctttgtacaaataccatattttaattccaactctataaatgccaaatntatcaatttaataattataacaaattatgaaatgaaattaccattttacaaagtctcttaatcaataaa

SEQ ID NO: 102681 - DNA, 869 bp, Cannabis sativa
ccacaaaaatagcagaaaattcctattttatcatacttcacttgtatccatttctttaccccagcagccatgtcaaagaagaaacccgaaactaagggattgttgatgtcgatatcaacctgcagcttcaagaaatcgtcccacagagcaggtttttcttcctccaaatcaacatttacaacctttccaaccaaacctcccagcaggttgccattaaagatagaaaaatattcatgggggaggttatgaagttggatccccacacgtaaaagataaaacactaccggcccatcagtagccggagcccaagctcggagaactaacgtataccctcggatgcaccagggaccatgatgaagagcccagttcctatcttccgcagagacaaagccgaacttgaatatgttagaagtcttcgaaccatcccccatggccaaaacagatacttgtttcttccacactttagccacaaaatccacaacagatggttcttcctcaaccataggagcaatcactttcccatataaacagcaagtagctagagcgcttagtgatgaagcactactcggagataagttgacaaaggtttcagtgcaagaaaagcacttgccttttaaaggagagttggtagcaataatggacgccataaatatccgacagaaagcagacaaaaagaagagaagaatctttaccaaccccaccaaacccacagaatctactaaacaaactggacacagcactaaacaccaaatcacctactctaccccacaacagtggaaagcaaacgagagtcaaacaagagaactccaaagcacaacacgtcaaagaaaaagacacacaaagcacacacaagctaactcaacacaaca

SEQ ID NO: 102682 - DNA, 694 bp, Cannabis sativa
tgatttcaaatgagaggggtagttcaggaaaattggtaaaatggtcatatattaccagttttaataattttgcatttaagggaaaaaattttgggtaatgtaagtatagaaattcaaatttcccgaatcaaattatgccttcttaatttttccttccaaactttgacataaatcaaatcatacttcctttactttttaggttgttaaaaattctttatgaactattgagattattaattagactaaaggaattctgtcaaattccgttcaattttatgaatccctaacagtgatcatccatgtaccaaatttgttcatgagacttaaactttcaaccacattaggagttcgttattaaaattgaacaaaagtctgtaaacttaacaatttcaatagttctaaaaaaaatttaacgacctacaaaatttatgagcacaatttgatacatatcagagaaaaaaacataattaacctaatatatcataattaacaattaatatatatttaaattttgcattcttgtattaagttttcatgatgggattgctttattttatattatgctaatgaacatttgtaaattatatgtgtctagtaacatttcttacaatagtcaagcctatctttccaacttccatattaatttatttattttttcatttatataagcagtttacgtatgtaaacaaatatc

SEQ ID NO: 102683 - DNA, 510 bp, Cannabis sativa
tataaataccctttgattttcatacaaaagggggacagaaaattcatagccgaggctctgtcaaatttcctctaagctcttcttcaagagaaactaagagggtagaattagggttttcttgttaccactattgtaaaataacatataagcctcttaaggtcaatatattgactcgtgaaccatggctcattaatgcttgaactacgtaaaaattcttgtcttctttctttatcactgtaattattatttcttaagctcttatttaattagtttctaaaagtcttgttaaacacagtagttttaaattatcaatttaattttatacttttatatgtaaaaatatattatatttatgaatttatgtattaataaataaaaaaaattgtgatattaagccaatctttttttttcggaaaaatcaaactaatttgaaatatgttgaactttactcatgcatagatattttggtgtttaaatttttttttagagttttttcataaaaattatcaa

SEQ ID NO: 102684 - DNA, 1056 bp, Cannabis sativa
  modified_base (41)..(54): a, c, t, g, unknown or other
aatggctataaataatttcatgattaaacataaacaactgnnnnnnnnnnnnnnaactaagcgggctttacaaattctatccaaaagatattcactgtcagatcgagtatatcctgttaactgaaaaagggggagtcggagaactactaggaagcattggctcataaagacaaagataagtggatagattccatggatgaggagatgaattcccttacgaagaaaaacacctatgagttggtgaaacttccaaaaggcaggaaggccttgagaaataaatgggtctttagattaaaggatgatggacatggaaacctagtaaagtacaaagcctatttagtcgtcaagggttttggtcaaaagaaagggatcactttcaatgaaatattttctccagtggtgaaaatgtcatcaatcagaataatctttggactagcagtgagtctagatcttgagattgagcaggtggatgtaaagactacatttcttcatggagacttagaaaaaaaaatacatgcagcaacctgaaggttttgaggtaaaaggaaaagagcatcttgtgtatagactgcgtaagagtttgtatggtctaaaataggctccacgacagtagtagaagaagtttgattcattcatggtggatcaaagctataagattagcttcagatttgtgtgtctacatcaagaaattctctaatgagaaattcgtcatcttattactatatgtcgatgacatgataatagtcgagcaggatggtaagatgataaatcagctaaagaaagaactatctgaagtcttcgatatgacagacttgagggaagccaccttctcgaagattatggtcgtcacaagagaactatgttgaacaaatacttgagaggttcaacatgaaagatgcaaagtcggtctcttcaccacttggtggccagtttagactcactaagaagtcatgtccttctttggaagatcaagaaaagaggaagatgttggctattctttactctttagcgtttggaagcttgatgtatgcaatagtttgtacgaaaccggatatt

SEQ ID NO: 102685 - DNA, 772 bp, Cannabis sativa
  modified_base (331)..(338): a, c, t, g, unknown or other
atatataccaagctaaatagagcctaaaaacatgactagtttaataattaaaccaatcaatcatcaatatatatatggcaagactatggtaggacctaacaaaagttctttactggtagagaagtttttttgaccattaattttagatcatatagttattatgatgtaaggtgtatactcttatgatactgcttatatacaatcaaaactttattcatattataataatatttaaaaatatatttattctaaaacataaaataatattagtaaattaaaaaaattatttattttaatttaaattattattatttttttaaaacttaatttnnnnnnnntttatataggtatttatttttaaaaaattattttaattatgaagtttgttatcaatttttttatactaataattaactataataaaattaattacttaagtatttttgccaccaatttatttacatacatagttctaccataattatcttttaagttaatttactttaatattttttataaaattttgtatttatatttttatttgaaatattttattattatttttatcaagaaagataatttctattaattaaatcgagccaattacatccacaaggagatttctcttcaaaagataaacttacaaatcttatacatttttaagaacaattttttatgatgctactatctatacaactcgaatttatacattttttcttatttatacacaaattttggtttagccaaatgccataaattgcacatgctaaca

SEQ ID NO: 102686 - DNA, 507 bp, Cannabis sativa
gggagatgagtcatttttatccactagcttttgtttttagttttacacttaagcattgctattaagtatcagtggtgtctgacaccttctatagctattacttaacgattggttagcgatattttctaaaacttattttcttaagttatatgacactccaaatctgctatcggtagggtcgaaacagtgggatgctgaagtggtgaacgatctttttaatgatagagataaagaactcatcttctctatccagctgagtgatagtgtggtgagcgattcttggttctagaataaatcttcaactagtttttattcagttaagactgcttacaatgcattgcagcagtccaacaacaccgtaacctttgaagctgacagagatgggtataagaggctgaggcagcttgatattcctcctaaagtacatcattttttatggcgtgctacttcaagatgtctcccaacaaaggttcagttgaacataaaacatgttaatgtagagattat

SEQ ID NO: 102687 - DNA, 732 bp, Cannabis sativa
aataatatttataatataataatgataagatttttcatgtaactaagaatattttataactacaaagtacatctaatataatcaaaagtaacgatcataaaaattatatacatgtcataataagaaattaatataactatgaagtatatcaataaaattaagtatcaccaaaagtaataatcatatagctaaaagttttatatcctacatgtatcataacaaaatatcaaaaaaattgcatactcattcattcaatacataagacttcacaaaactgccccattcatctcttatttcatttatctcctaattgctgtaaggcttgtcatctttgaactgtataaccaaagatagataatattaaatgtatttaaaataaaaagtaattatcaaataaaaatcatatatatttaattacctcattcttttataaagttgcaggattgtgctgagtcatgaagcttttaataatcttcatgcagtaatatccacactgtacatcgtccgcttgtcctcgacacttgtattgcttgatctttaccttaattctgttttgtatatatattttttagaaacttgtaggtttccaaagcactacactaaagagaagttacttagtgaccaaattagtaacaaaagttaaactaatgaaaaaatgatagaaattacgttgtgacacattttctaatttcattctgaatttgcatattcttgttgggctttgtgccctaa

SEQ ID NO: 102688 - DNA, 1008 bp, Cannabis sativa
cctcatcgaggcactcatcagtgatgttagcataaaattccttcacagtttgatccacatatccatcaaaaccgatcaaagtatccacccattgtctttctttcaacatgttatcaatcccaaatggcttatgagcaatgacattaaaattttctcaacagtaaaattctgattctcataaaatttcatgtctcgagcactatcattgtaacaaaaataatgagaatgaggcttgaagttttcaagagtaataccagagggcctctttcttttctgagaaagaatagggcttggagaaataatgggtcgttttcctttgtctttctttggaattgcagcaggaacagcgactggttctgcactgacaggttcagcttcagcctcttcccttttagacctagaattattagtagagggttgttctttgggcacaaactctttacttgaatcagacaaaccttctaattcgtgaccctcctcggtctcttcttcaggttcagattccgatgaagaaatggaagggggattttctttgagactttgggcctttgaagatgaagacaccacctttttcccttcggagacacttttgggtagagccactttgggtttttgaggtgtggataccttggacctggttcgagaactcacagtgggcaagggccctattgctttctcgacatttggagcacaattcgaataagaagacttcaacaatgagtgatcggatgaatgagatttatcatgatcaccaaacccaggagttagagtagcaatcagtgaagaaatgatcagaggagaagcgaggttgtaagtcgacttttgagcttgggtctttgactttctggcagtgatcgtcggagcaaatgacgaaccagggactccggtcactggagcagatggcgcaggtgggaagatcagagatgcagaagcagagccacgagaaggcttcttggacggttgagcattttttgttttctccatttttctttgaaaccctagaaagca

SEQ ID NO: 102689 - DNA, 654 bp, Cannabis sativa
attgaacgtttaattattttttttagttgttgaatatgagtttataaatataaataagtttgatttttttcttgaaaaaatcataatttatttaaattatttattagattcttaataattttggcttgattttttaagatacctgattataaataatataaagtttgaaaatagattttttaggaataatttaagtttttttaaaataaaattaatattttttagttaatttaatgtttttttttcagttttttaataatttttttcttttttgcaaaattaatagaatactataattacttttaaaaaaataaaatattataatttttaaaattaatttttcttaaaaaaaaaatgggtaaattttgtattgatcaaagtttagagggcaaaaatactaatttttaacggtaaaataaacaaaacttaacaaaaggagcatagttatgtaactgttatattttagggaaaatttttaataagtcgtatattttatggggcaaaatcaagtagtgccagaaatttagagggtaaaaatgctaattattcttaaaattatgtgagtatatgaggataatttaaatacaatactcataaataaaagtatatttgaattgaattttattttaaggtaaatttagttaatgtattttt

SEQ ID NO: 102690 - DNA, 523 bp, Cannabis sativa
cgtatttattaaattattatatgtggatggatcaaaagatgaaaatgaatgaatatgtacgtacttggtgtctttataataataataatataaatatatttacttagtcaaaggaaattatataacactaaggaacaaatcatcttaattatttgaaaaaaaaaatatagatatattattatataattatttaacttatatataataatctaaatttttagtcacgtggtgtaatttaaaatattttgggatctagaatcatctttgatgaacctaaatttaaattacgtcaaaaaaagatttaaatttaaatatgtagttgagaggaaaataagataataataataataatatgaataaattaggaaataaattatattaatactataagtacgacatttgggttgttaggctaggaaaacaattaggcttttaaaataaaattaaatatctttaaaaatgatatatttttataaaattaaataaaacaatttaccgctttttttttttgacacaaagtaat

SEQ ID NO: 102691 - DNA, 651 bp, Cannabis sativa
  modified_base (39)..(43): a, c, t, g, unknown or other
agttcgcaagatctttaaagttttacccaattggttttnnnnnaatgctagaaattcctgaaacttttcaaaatatgaccatgtctagagtaatcgtcgaagaatgtgacaaattactcataaccacatctagctttgacattcagtggtccataaagatctgaatatactatgcctagtggttccttggcacgctctccctttgtagagaaggaacgtttcatcattttacactactacaaaatcgacttttcccaacagtttataactgtctgttatactatttcccaacggttcctaaaaccgttgcctatgtgggaaaaatcaatttaaaggacagtctacaaccgttgagaaaaatcacattaaatgactatttttaactgttagcaaaagtattatctaaattaaatttaattactttttaatatatattttgtaaatattaaatatatataatagtattaattttcataaaaaaatattaactaaaatatataaaattaatatatttcaaaatttaaatatcccaattcatttatttcaaaaaaaaaatatatcataattcattaaaactgtaaaaaatcaaagattattacacaaaattaatatgatacaattctgaagaaaaaaaaaataaaggaagataaa

SEQ ID NO: 102692 - DNA, 569 bp, Cannabis sativa
tagcctagagtaagaaagaaatttattgaggggacgaggagtaaaagattgatcttgaatggaagagtagcattcaaaatctttgaggtagtgttgtctagtggttctgcttgttacgatggtcgtatataagattctcgctcctttaaaacccatgtacgagtattctccttcaaatggttttaggtcggttctttttcttatgagatcgaagatcttctctttttcttcttttgcaaagatttgtcaatcttgtcctcttctcttcttaatttttattgtttttaatgacaaatttgtttgtatcgtcacgttcgcaagtggttgggttgcatcagttcacaaatgtggtggatatctagcggttggagatcgtcggagctggatttgtttatattttttagtttttatttttattttagtaatatttatatttgtcttttatttttcgtttctggtacgtgctttggatttgttattgtacataatgttgatgtttatgtttattttctttaatttaaattaatgttaatgcttattgcctgccatttatatgtttggtattttga

SEQ ID NO: 102693 - DNA, 1079 bp, Cannabis sativa
ctgccatcggcttacaatatattgttgggtcgcccaacattgattggactagggacagtcagttcgatcaagcacttatccctgaagttccaaacaccgggtggtgtgggggtggtgcgaggcggtcagctgttagcttgcgatttctatcgtatagaactacagcatagaaaagccggtcatcagttaatggcgatcttagcaaaagaaagcgaaaagaagaagaaggatcttaacccccgggttcaagatgaaagaaacttattaaaaccaattgaagaattggaagaagttattctcgacctaggaaatcccacaaagtgtgtttacattgggaagaacctggacgagcagctaaaatagcatataataagtttcttaagggcgaacaaggatcagttcacctggagccatggagatatgatagggattgatcctaatattatctgccatcatttaaatgtcgatcctaactacccaacgaagaggcaaaaaaggagacccttggattccgagagacaaggggcattaaaacaggaagtggacaagttattggtcaatgactttatatgcgaggtgttttatccctcgtggatagccaatcctgttcttgtcccaaagcccaacagaacttggagaacttatattgatttttctaaattaaataaggcgtgcccaaaagactatttctcactacccaggatcgaccaattagtggatgcaactgctgggcacgagcttatgtcatttatggatgcctattctggatataaccagataaaaatgcatgtcccagattaggaacatacgagcttcgtaaccaacataggactctactgctacaaagtcatgtcgtttgggttgaagaatactgaggcaacatatcagagattggtgaacgagatgtttgcagatgtttgcaaattaggtagggcagaatagggcagaacgggcagaacatggaggtttacgtcgatgatatgttagtaaagtcaataagaagcgcaaatcataccacatacctcgcggaatgcttcaaaatattaaagaagtataatatgaagttgaacctgaaaaaa

SEQ ID NO: 102694 - DNA, 801 bp, Cannabis sativa
aaaaaaaaaagaagaaaataaaaaaaaaccaagcctacattgtaggagacttggatggatcttcttctaccactacctcggcctcttcctcctccttcctggcctttttttataataagccaaaatctcctcctcgtcatcctccaaaaagcttgtgtccaagttgggattcgccatcaaggcttgataaaaggtacgaagaccaaccttgttgcattgctctttggttttggcctctttcccttcgagctcggcctctttccccacgagcaccttcttaagttcattgcattcattagtcttgatctttatggccttctcggcttattcaaggcttttcttcaacctctcagcttcttgtttgagacaggtgatttcctactgagtgtcgttccattatttaatcacgaccttgcgttgggctagtgacttttgggccttgctctccaggattcgccgatgggaggaaaatagaggaaagaagtctggaaaattacgagcaaatgaatataagaaacagggaggaaaaagaaagaagaaatatatggattaatacagtaaacttaccatagcgcatcatgcaagctcctcaaaagcatttcttctggattcccacaattgattagatcccaatcgtgggggaggagagccttgagttggcgccaacaggcagtcccaaacacctggcgaaattcctaaccagtcttccccactgcggcaaataatgtttcaatggcctagctcaaggaagcagaggcatgagttgtgttaggaggaggcgctttggtgttgggatcgacc

SEQ ID NO: 102695 - DNA, 1516 bp, Cannabis sativa
  modified_base (935)..(937): a, c, t, g, unknown or other
  modified_base (1293)..(1302): a, c, t, g, unknown or other
ctcgagagccttctctacttttgtacctcagcattaaagcgtttaaaatagtcctgtaaagactcaccaggttcttgtttgatgttagccagagtggtataggatggcctataggtcatcgtggcttggaaatgcttgaggaacatgtcgacaaaggtcttccatgtcgagatagatgcctcgggcaattggctgaaccaatcgtcgacattctcttccaatgttgccgcgagaatgcgacattttgcgagttgaggtacctgatccacttccataacagtattaaatttttctaaatagtctatgggattagaggtacctttgtattttagggattcggataacagaaccccttggggagtcgagcttgtcgcacttctacggtgaaaagagaggtcccttgcagcttgtatatgggctttctctgctgctcgagcatttttaaggcttgcagaagcgtaccttggtcgatattcccagctaagagagcagtgactggtgttgccgcaggcattgttaccatcgcggtgatgtttgctgggatattaaccccagtagtcgcagctagtgcggtaggcggattgacgcgattatttatgccttgatcgcccattcggggatcacggggctattcaaaatcacgaggcgtctgggagtgcgccctgaagacagcgtgaaggtgatcacgtagatcacccatgtgaacttgatatcgtcctccttgcagtgtttccaccgaacctgatctagtgtacctgctgggtgtgcgaccatgcgaggatgaggaggcgaattcgatgtcgttgtctcacgactcaggcctgctgcgaggattacgtcattcagggtcttcctcagtctgtgcctcctgattgggatgtctcgtggattggtctctcgatgttggttcattcaagtcgagtccttctgggttnnnccttcgttccctgcgagtacggttattacgccgtctagagttacttacctgaggattttccgtgcgagcagtgggtgctcgaggaggacgtcgagccctgttcggtccatccactttggcctgcagggcgcgaagctactccgccgttgatgacatctacgggaggtactctaccttctgacagtggaacgttcatcattccaatgttaatggattcgttgttaagacccccgttcgcttggtttccagccattatgattctttttctaaattagcaagaaagtatttctcggttcccacagacggcgccaaatgttgtcgagcgaattttgcaacaccaataataataataatannnnnnnnnntaataataataataatatgaagaacaagtgcgagtattcaacctagaacggcgagtactcgaactgggatcgtaaatgcttgatgaaaactggaaatataaagaagataaagggatatagtggttctgtcagatcacggtctgcttagtccattattgcaaggatttcgtaggtccattttcacgggggatcactcctctatatacaaagcaag

SEQ ID NO: 102696 - DNA, 541 bp, Cannabis sativa
aattcatctaagagagttagagataacttggaaacttgaatactcgcactaactaagttttgttttctttgtgttgtttctgttatctacaaaaaataaacagtgtcgtctccttgtttgttaggaaagaaaaatgggaggaaagaaattttgaagagaaaattagggagaagcaaaaaaaaaaaagatagttatttagtattagagaaaatgagaacgaaaagaaaaatgaaaggaaaaaaaaaaaaaaaaaggttgaccgacaaacaaattttcctctccaaaactagagagaagatacttaacattttatttcactaacataattagagtaaatactattttggatcatgtgttttgcaaaaaatacagattagattttctattttgtcaaatgataaaatgaaccatgtatttttttaaatggtacaaataggattctgagctcaattttcgacaaattttttttatataactaacttgaagacaattcctaacacgaatagatgaagaaatataccaattttgtcataactaggga

SEQ ID NO: 102697 - DNA, 521 bp, Cannabis sativa
ggaaaattagaaaaaccgcatgtgtgggttggtttgaaaaaatggataaaaaccgtaccacccgcaccgcgaacacccctagtttgtagcatgattatctttgttcgtgctcagatcaggagtatctcagattcttattgacttcataatttatggtgcgattgtttattatgattgttatcactatgcatgatttgtcctttgattatttccttttattttagtttgaataataaaattgtttggatatctagtatttttcgattattattctttaacatgcctattaatagaaatttctattctcctctctccctaaaaaaatgtggtaaagaatataacaaacgaattaaatccctatttcacctagcataagctttactactaacctgatattcttttctccaaattttccgtcaaatcaattcttacttttcgtttttagctattatcccaattcccaacatcaagcaatgcatagaatatcctaaatgttcgtaatttagaaaaagaaaaagaaa

SEQ ID NO: 102698 - DNA, 783 bp, Cannabis sativa
attactaaacatgtgtcatgctgaaaaaataaataaatgctaaggttaatgtatacaaatatgtttgaattggaaacataatcttaattttctttcaaaaagagaaaagaaatgtctttttgtcaaaatttgaggacatgtaaacgtgtaattttgtgtattctcagagataataaaggcataccaaggaagttaaaatgatgagattactgctttgtttgctatcatatacatatatataataatgtatatatctgtatgaatattgcagggcagggtcagttttgatagttgggggactttatgctgttctatgggataagaataaggagatgaaattactacaagatgtgaaagcaacaaaggtagttttactaatagaagagaaggatgatcaatatgatgatgatatcagtagtgacttggaattacaaaccacgccctatgttcattttcccaagtgcaaacataataaccaagatcatcatcttgacactaatataattatataattatttagtgattattaattaagaagaagaagcaatactagctagctagctatatagctagatcggattgttaattagtactggtccctcatcagtaaactttttataatttagtttgagatgtatctgctaagggcccagcctcaagaattaaaacataagattttccattcccaccaacagagagaacgagaccttcatacctataaatcaaagacactttatatacttaacacctaatagctaagccaaatgggttcaatagataggt

SEQ ID NO: 102699 - DNA, 546 bp, Cannabis sativa
acataaataaaatatggttgagaaaatatttttttagtgcaaaatataaatcatgcatcaaccaaattaacagtaattatctctaggtccaacaatatttagttcttcgtatctcctttcaataatagttctaataaccatagagtacgacaggtataatttgcttcccctcgcttgtccccgaaccacactaaactaaagaggatataaaataaaattacatagattatagaagcgatcacaagtaaatactttgtcaatggaagattgtattttgggtcatttcttgggtttatgggattgtaattctggagaaagaattaccaaaatcttttcagattcttctgagttggagggtgacctgatcctggcaaacaattcctgaataaatgtactatcatcctttaataaagaaacaacctacaaacaaacaagattaaaggttaaaataaacaaaacgcgtagataaatgagtggtgtaatcttggcatttatatgtaagtagcaaaatcttacaacagcattgtttgaatgaattatggagtt

SEQ ID NO: 102700 - DNA, 683 bp, Cannabis sativa
cctaaattacaacaaaaaatcttatagaaacctctattgcaactagcgttgcaactactttgaaaactcaaatcgtaaatttaaaaaatatataaataagagtactgtgtgcagacaacttttcaaaatgggttcattaaaaatttataatattactcaacaaaaattaattataataataataataattatttttgaaaattattaccatcaactttctatgttaatctcacagttaattttaacagcccaaaacacatgccataatcaaaatgactgaaaaattgtaataagagcatgttcggtttgataaaaagaattgtaatgaaatcattattaccattacattattttctttaacttttaatttttttttaataattttgtaattataataagaactaaagaaattagacattacggtcattacaaattaagtgaaccaatatagaggacgaatctacaataccagtgacatcataatatcattcctattacaatttttattctattacactaccattcatattactattactatcaccattctataaactggttcatcccaaatatcccgaccaaccacccaatcccgacctatcaaccaacctcatccgccacacaaatcgggtggtcgggatcctcaagatgaataacaagattcattcccattacatcaaaac

SEQ ID NO: 102701 - DNA, 1047 bp, Cannabis sativa
  modified_base (27)..(31): a, c, t, g, unknown or other
aaaatagattacattgaaatggagttnnnnntagggcataaaacctaacaatgtcatcaccgacaaagtctaaagaagtacaagccctgacaggaagaatggctgcacttaaaaggttcatttcgaagtcaactgataagtgtgtgccattcttcaacatattgcgaggcaacaaaaagtttgagtggacaaaagagtgcgaagaggcctttcagaacataaaaaaggcatctagcaacgcctccagttttggtgaaaccaataactggagagacgttatttctctatttagccatctcgaaatatgcgattagtgcagctatagtgcgagaagagggcaagcaccagcaacttatttactatgtaagtaaaaggttactaggggaagaatccagatatccccctctagaaaaactcgcgttgtgcctagtccacgcgtctcgtaaactacggccatacttccaggctcacctcataaagatgttaaccgatcagcctttgagacaagttttatcaaaaccagatgcttctggaagattgataaaatgatcgattgaactggggaagttcgacataacataccatccttggacatccatcaagggtcaagctttggctgacttcttgatagaaggtataattccagaagaaatttcacctgatcagcgagacacagaaacctggaaattatatgttgatggtgcatctaacgaatagggttcgggtgcaggggtgatattaatatcgccaaaaggctttaagtttcactatgctctgaggttgcaatttgacgcatctaataacgaggctgagtaggaagccttgatcaccggcttaaagatagccgaggcgttgaaagtcaaaaatcttatttgtgatagtgattcatagattcaattactttaaaatcgaacaaattccgagagaacaaaactccaacgccgacgccttaataaagctggcctcgcaaaatgacctggatgaattgaatctagttctggtagagatgcttagcgagccaagtatatgtgaaactgaagacgtcga

SEQ ID NO: 102702 - DNA, 714 bp, Cannabis sativa
cttagtccccgagtcaatattactactttaaactagaaaagtcttaagatttaaaaaaatgtgtgaactctaaaccttgcttgagaaattgaggaatgatttctaacccctttgcatgaagggttctttttatatttatagtgtttagggttcttgcttattagcctttacccacagatgggtgattacaagtaacatattaacttggccttatctagtgaagcctggcccatggggcacatgatgtatgtcgatgtggatgccacatcacattgacagttgctgaaaattgtggtctatcttcgtggagaataaagacacattaaatgcttgaaatctaattactccctttccatattttggaagatatgatctttggacgagatcctcgagagttaattcctgatattgtgggatttggtaattaataaatagggaacgatgcttgacatcataatgctcgctaacttcttattctagatgcactgtctaatatcttctagatgtatgccatactggatgggtatctggcctagacgagtcttctactcatcattcgaaagaactaggggtgttcataaaaaccgaaaaatcaaaaccgaccatcaaattgaccagaccgtaaccgaattttcggttccacgtcatcaccgaatttggcggtcggtttcggtttttttgacatggcggtcggttttggtttttgaaataaaa

SEQ ID NO: 102703 - DNA, 769 bp, Cannabis sativa
cacagaaattacagtgaacaattagattatattatcgacaacatatcgacatctggtcgacatgctatcgatattccaacaatatgatcacacatattcagtaaaaaaaatagtccacacaatgtcgacattcggtcgatattatcacacttagcaatcacagaaagtaattacatcacattgtcaatagtacatatcaacataccgtcgacaaattatgaaaaatttaggtaaaaaaatttatgcttattgagttgacataccatcgacaaattatcaacaatttaggtaaaaaaaattatgctcattgagtcgacataccatcgatacacatacgacatcctatcaataaatcaattaaattatttcaaataataatcttaatcaactaaattattgtgttaacatcctatcgatacacctacgatatcctatcgatatacattaaaaacacaaacaattctaatgctcaaactactttcaattttggtcgacattatatcgataacctatcgatatctcatcgataacattgttaaaacaaacagacaccactgatgaacatgcggaaaaacatccaaattcgcatacacaatctaaaaaaatctattctgaagaacatacacaaattggcatctaaatctatgaaaattataatttttaataataaaaaatatcttacctttgactgagcttggtggtggtggtgacggttcgtggtggtttcgacgggtctggttgggtcccaatgtcggttgtggtggtttgg

SEQ ID NO: 102704 - DNA, 880 bp, Cannabis sativa
taactttcaagaagacataatcaataacatcaaactcaacttcctgtcgatggagatcgtcatagctttttaaaaaactctgaacaaccttaagtctttcttggattcccttaaatattttcggtggtactaataataattcggggcccaatagtgatatgctcatctggttctacctaacactatggcgatctgcatggtctcatataaggcctcataaggagccatgcctatactagcttggtagctattattgtatgtgaattccaccagtgacaagtgttctccccacctacctccaaaatcaaaaatgcaagagtgaagcatgtcttccaaagtctatatggtcctctcagactgtccatctgtctatggacactactacaaaaatagccttttgcttcagtttttaagtgacatataaaaaatttgcgtcggtttgtgtaaccaacgctataaccatagacgcaaatagtcatatttttttgctttacttagtaacatacgctaaaagatttttgcttcagtttataactgaagcaaatagtaaagccctgatgcaaattcgttttttgcttcagttatgaaccgaagcaaaagaataaaaaaaataataaaaaaaaacataaactttcagatcaccacaacccttcggaccaccacaataacaacaacaacaacaataagtatcgccaccacagtaacccatcgtaccaccaaaagcacatcgaaccaccaccatcccatcgaaccaccaccatcccatcagaccaccaccactacgtgcaaaaaaaattagagagaaagagaaagagaacacgagcgagaaagagagaaaccatagctagactaggcacgcgagacggggaacgagaaaaaa

SEQ ID NO: 102705 - DNA, 669 bp, Cannabis sativa
taatataaaatgttatgaatgaaaatcaaagtttaaaccctttctcttcaactatatatataaactaattatatattttttttccaggatttattaaatcgtcaaaaatgataatgattactatttatttaatgtttattattagttttataaagataaaatagtaatttcaacgaaataggttagtttctaaaaaaaacttctaattctttaataatatgagttggaattattgttcccaatttcataaaaaaaataatgtaattttaaaaattattattagttacctgctatagcaagttattagattgtcacatcataaatttttctagttaccattaagaagtattacccattatataaatcagtaaaaagtatttaaaaataaaagtgctgatgaataagtgtcatgaaagtcgaaaaaatgacaaaaaaattattttaataaaagatagtatactgccgtataaaagttataaaaaatatacagtgtaaatgtaaattataccgctggtaatataaaagtaaaaaaataaaaaattagtattctgtgtaatttttcctttgcaaaacaagacaaaatgaggaccaataaaatgagacaccaaattaagaaaagataatttttacttgagatatctaaattattaggcctcttgatggatctgt

SEQ ID NO: 102706 - DNA, 576 bp, Cannabis sativa
ccaacgacatagtcgttgggggtatgtcgttggggacaacactgtataaaaaaaaatgcagctgaaaccctcatttcatcagtcaacctctcttcccctaatcagccgaaaccctcatttcatcactgccctcttcccctaatcagtcagcctctccgcccatcgtcagccgccgtcgtcaccgatcgtcgttgtcgactggagtggagccggtcgtcgtcgtcgtcgtcaccacaaccttcgactggagtggtattttctttaatagtagttttgctattataaattcacactgtgtgaagataatggtttcatagtgtaaatttaatgtggtttttcttttactaatttaatgtattaatttggcaaatttcttaaaattaatatattatgtttttacaaaaaaaataaatatattatgttttttatttttttttaacagattatgttcttttttttaaatttattattgtgatatgtgtttgtttgtgaatgtggtggcagtccggccacctccctctgcctgaagccacgcgcgtcagcccagcaccattcgtcagaacacctccggcagcc

SEQ ID NO: 102707 - DNA, 617 bp, Cannabis sativa
aaactattggttgaggtgaagttaacactagtggagaaacaactcggttagtgagattgacacttcaacaatccgttgaggttgatagtccttggaagaaaactgttgtgagaggtttgggaaaaaccttggtgaaaaattccctagttgtaagggttagttaagctcgttaatttgactcgatagttgaactcaaagctagatatataactttgaagaccaaggacgtaggtggcttagttctaccaaaccttgtaaaaattaagagtttataatttctatccctaaactctttacatttcaagattgctattggtttatatttgtgtttatcaatgtgattatattaaatttgaatatttgcataaattttgtttgtgatttttaaatttctaaaattagcttaaatttccaattaatctcctcttagaaatatatcttgggttaacactttctcccgcatcactttctcatattattttatctctcctcattttctctctcaacactttttctttcatcagtttgtctctcaccacgtactttctctgtaacgtccattctttaagcctccattggcccttccaccacatatttatggctcttatacacgagta

SEQ ID NO: 102708 - DNA, 564 bp, Cannabis sativa
caaacattattaaaattttaaaatgacaaaaatattttttttatgctctcacttttaaaaatacaattcggaaaacaaaaaatacaatcaaacaacctctagatttgtcaaattttttctattttccaaaggaattgttttggaatccaatatttctgctactgctaatgtggcattggtataaataaatttgtcgaaggtattaacgtaaataaattaattttagaaataagattgagaaaaaaaaaataatactcaatattgacttttttttaagttgctaatcaatataagattgtgtgcaattttgtttaatttgtgttaataaacatgtttttcatctttcgacttaagatttaagttgagtgtgctaatttttttctaaggttaagtgatactttgtatttatataataaaataaaaaaattgtagttgcatagtattaaatattatttaaaattaacaatcaacatgaaaattggaagttggaggtaaattaataagttatttaatactataatgacaatcaaatctccacaaaaatattgaatatatatatatata

SEQ ID NO: 102709 - DNA, 542 bp, Cannabis sativa
gtttaatttatcttagaaatatgctttaatttgtggataaatctgtggttaaactgaaattgttatttagtatgtgttttttgtgataaattgtgcaagaaaaatctgggcaaattatgggtttcgtggtaaactctgttctcctgatttcgtatttatgcgacgttatgcgatttacatgcgattttgtgcgatgtttgcctaggttagtacttcttgtacgtttagcgactttaggcgatatttgtgcgattattgtgcgattattgcctaggttagtacttcttgtatgtttagcgactttaggcgacatttgtgcgattattgtgcgatgttgggcttatggtatatgttgtgcgattttaacaatattatgcgattaatgtgcgatttttgtgcgatgttaactgacaggatcttaatttgttagttgtggttgctctgttttttttggcgatcttatgcgattattgtgcgatctgtctgcgattcgttttgactgtcacctaatttatgcgagttttggcgatgtttgtgcgatt

SEQ ID NO: 102710 - DNA, 585 bp, Cannabis sativa
gggcggggttgccacctaatgctgtttgtaaactcaagatatccctttatggacttaagcaatcctcgagacaatggtttgaaaagttctccacaaccttggttgaagaagggttccaacattctgcatctgatcactctttgttcatccaacacaaaggctcaaccatcataatactcttggtgtatgtggatgatgtgatccttgctaggaatgacataacagctttggaaaaattaaaactcaacctgaataatagattcaagttgaaggatcttggtgagttaaagtacttccttgggattgaaattgctcagactaagcaaggcatttttatatctcaaaggcactatgctttacaattgttggaagatttcggctatttaggatgtaaacctgccaacaccccaatggaagttaacttgaaactcagtcaagatggagaagagaagttcgccgatccaaagttgtatagaaggatcattgggaaattgcaatacttgacaattactagacctgatttagcttacactgtaaataagctaagtcagtatctagttactcccaaaatcacacacatgaatg

SEQ ID NO: 102711 - DNA, 570 bp, Cannabis sativa
atcacaaatacaacaaagtttgaacaacacttgtcaaaaatactataaggcttgaaaataaatatgaaaaaaaaagtttcaataatacaattattaatgggctttgacttggacattcacatattggatctaactaaatataaaaattggtatttttataatgtgcggtgcggtgcggtttgaaccgcgtattaattattcaaaactgcaaaccgtaccgcaccgcgcggtttaggaaaaattcaaaccgcgaccgcaccgcaaaaaatttcaatcatattttttttgcagttagtgtgatgcgggcagtttgagcagtttaaatagtttgatgaagacccttaatttttgcaatgctttgtctgattattttttatttgatattataataccataacatatgatgagcactttgaaaaaaaaaatataatggattattttttttttctttttctaaaaaaaaaaggaatataatggatacatgtataatgtatttactaggtgaatgtacgtgccgagccacgtattgatagttttatttaagattttagtctttttaagattttgaat

SEQ ID NO: 102712 - DNA, 524 bp, Cannabis sativa
gatggttctcaggattcgactatggaactcacggaacatttcttttggaggaagaatgacactcataaatgtagtgttaattgcaattcattcgtattagggacaaataaagatcctatctaagagtgtcttgaagagaattattgccatttgcagattcttcctttggagaggcacgacagaatataatgggccaacctacattgcttggtctaatctttgcaaggatcgcaaggaaggaggattggggtttcggaatttactactttggaacaaggctgcactcagtaaatatgtttggacagtggcaactaagcaagataatatgtgggttaaatgggtacatagtgtgtacttaaaaggaagcaattggtgggactataagagttctacccaaagcagctggtactggcgacaaattgtgcatgtcaaagaggagctcaagcgacatatcaatgtacaacaatttctccaaaccaggtatacaatcaagcaaggatactctttgcttgctctggaacatg

SEQ ID NO: 102713 - DNA, 564 bp, Cannabis sativa
cctggtaaaataatttcctacagcttatgcatactctcgagcaaagtcggccgctgtcaagaatcttaccacctctaacacaatgcgaaggggagtggacttgtccaaaaaggaagttgaggatgcacggacccagcttgaggtcgtgagaacgaaacttggagaggtaaataagaaactccttgctactgagactagggttaccgagttgaccaaggagctgtaggacatgtcatcgatcgagcaacatgaggaagataatgtttctttgtctcaggaaattgccagtctctaagacgagagagagggtctcccgactcgtctttgaaggttggaggatgaggtcaaggacacgaagatcagggaggaggaactcaaaacagaggttaagagccaaatatccaaggtggaggagctcgggaagagggtggacactttagagatgactattctcgagatcttttatgacttttggaaggacaatcccaaagcgaacttcgattaccttggcacttccaaagacattgtaacaccctaactagcataggcatattacgtgatttt

SEQ ID NO: 102714 - DNA, 886 bp, Cannabis sativa
  modified_base (808)..(815): a, c, t, g, unknown or other
ctgaggcaaccacttccacctctcgccagactgttgacgtgccccctgcttagacaaaggatcctccagctccaactgacccgaaagacccgtacaaagagcctgggactccagccgtttgactactttctttttctatctttttttatctatccagccataatgccttttttaagactaaatgaccgaccaagcggtcattaaacttagaattatttttcattttttagacaacgggcggaccggcagcctttaatcccagttttacatgcttttgttatctttaatgaatttccttctgtatttataatcatcgtgatactgtgtttgttttatttttaccaaatactttgtacatgtataggtgccccccaagtgaccgagcagacttatgactcttagtcacttttacttttttgcaagtgtgctcttccgtctgtttgggattttaggttccaccaaaccttttgtacgcacttgatggtaaattaacaacatgctagtaaattcgaatcaattttatttttgaaataaatatctttattcatttattgatcgaaaatatgtctgttgccgtagtaacttacatcaaagctattaatttgatctaatatgatctttagcttaacatgaaataaaacaaattgcaggaattaacagttgtaatttagaaggtggtcatccatcctgagtacttcgtaattttatccgaacctttggcgtggtccgcccagaaggccattcacttaagagtaatagttcttttctttagtacatgatatggtcatccgacctggtacttctattnnnnnnnntttcttaaatgttccccattcaaataccttggtaccagaacaagtttaattttttcatcatacttacccaa

SEQ ID NO: 102715 - DNA, 534 bp, Cannabis sativa
ttgatgagaaataacaaagctataatttatgattttaattcatttttaatattttatttttgagtaatacggattctgtatcccattcttgtgtttagttgcctatctacaaataggcttactatatcaaattatcaattattgctaagactaagatgaacgaatgtaatgtctcttatttgaagctatcataaaagtaatttgtaaacattaatataatgtctcttctattttattattttttttatatttcactaactgattgagtttaatgtttattacacaaagaaataaaaaagttaaacaaaaaggtatctcaatttgcatcagaaaagatttctaagttcaagggaaaacaaaaaaaatatttagtgtacttacaggatgatactttaacagattattgatgacagtaagtcgaatcatctctaacatatcaaaatcctcaacttgaagttcatttgtgacctcaccatgtcgtgagaatccacaagagcctttacgaacccaaaaaaaaaaagtcaacaaggatta

SEQ ID NO: 102716 - DNA, 543 bp, Cannabis sativa
aaatatttatatattatatgttttatttatttttatatgtatatatatcaattttaattttttcggggcctctaaaattgtggggcctggggccgaggccccggctgccctaccctttggccggccctgttcactgggctctaactctggatattttgggttcattgatgttaattcaatcacataaattgtaatttgtaatgatcactaggtctcttttgatcaatactactagatagttggtagaatgaggaagcaattctacattgattaagcatccaatatgcagacttgattgagaacccactattcttggaagctttccaaatgagcttatcatgaagagggaaatatggaattagagcttaaatcacctcaataacaactaataacacaccacattttaaagaggtactggatttgagtatgagcaaactcaattgtaaatattatatttatgtataaatgtggacaaatattttttcttataaatgatcatattggttctccaagtggggtattggtgtgtttatgttcatccat

SEQ ID NO: 102717 - DNA, 868 bp, Cannabis sativa
  modified_base (579)..(581): a, c, t, g, unknown or other
attgtagtaacatcatgagttagggacaccatgtcccaccatactagagcatcttcttggaattggaatgtggcacaggtcactctatcattggcggtgaagcccataaagttcaaaattctggtaatcactgttagccactgttcggctttcataaaatcgggacctcccaggaaaactggaggtgcttgctcacggaacctttcatacaggggttccattcggttcactgcagctacaggtcctgcctgcatagtaagggcacgagctattggtatttctggagcagggattgcaggagcaccctgttgtctcaaacgccagatctcttcatcttgttcattaattctagcttgcaattttgcaaacctgttctcccaatcttgggcagcttaggcagcctgtggacggttatcatcatcctggccacgtgccctgcccctaggacctgtacctcggcaacaaatatttaggggaatttgaactccctgaccaccactggatccaaccgagttgccttggctcctagtgtttcacctggcgtccatactataagaacagcctgcgtaaccaagagcnnntctggtcagatcgtgatcaagtaaaacttactaattgttgcttatttgaaaattaaaaacatgcgcctattctactatcatgctactaacatgcttcctaacaggcttgtcttaaattatactattaattaaactactaaagcaataaaagcttactgagccatgaaacaagttgattgctgatgatgattgtacatgtcgtgacgatcttcgaaagacaacctagaagatctgataccaaattgtaacaccctaactaggttagacatgttagcgtgatttttaac

SEQ ID NO: 102718 - DNA, 671 bp, Cannabis sativa
actgcaagtttcaaggggaataagaaacacggacatggcataactaggaagggcttgggccaccatttttaacaatatttctcgaccagcctttgagagaaatttaccctcccaactcaaaattcttttctctattttctccttaagaaagcctaagatcgctgtctttttcgccccataatgcaaggtaatccgagatagaaactgttttcatcagcaaccatcatacccaatcgagtacacagtctgccatgcaagtccaaaggggtattgacattaaaaaaatattgatgatttggagaaattcaccctttgtccggaagcagcttcaaaaatatgtagtaatctaagaacattatcagcctcctcctcagtagcacgacagtatactatatcagcaaatagcatgtgtgagatagtatgagctccatttgccactttgcatttaactcactgtttctttcgaattgcttgatcaacgaagagaaaccttcatcacaaagtagaaaatgataaggtgacaacgagtctccttgtcttataccgcgtcctagaacaataaggcccatactcctaccaccatgcactaccttgtattcaacattcatcaccgtagccaacataagatccacccaacaaacatgaaaacccctccggagcttcatagcttt

SEQ ID NO: 102719 - DNA, 974 bp, Cannabis sativa
cattatgacactgttctagaatcggttttatcttaattataactggtggagttattttttgttatttgtttttatttattatgttacagaacattttatatttcaattataatcagattcagttattttgtgttatttatttttattcattatgttataaaaacccgttctatttttatttatattcgagacatttacttctggtgacttttccagcgacggtgacttttttggagacgatgactttttcggcaacagtaattttcttaatgacttttctggtgacttttccggcgccggtaacttttctggcaaaagttattattacaaattttatcaaatttatttattatttatttcctatattttaaactttaattatttttttaatttcatatttttttcattttttgcattatttatttatgttatataaaagtaaattctactatattttctcatatatttatatataaattgtttcaaagtttattctataggttttgtggcggagtattctttctaacgcgctacctatcaggacagttctaaatgaaagatgtcatatcgaaactcctctttgcactatttgcggaattgagaatgaaactatagagcacctgttcctccagtacaacttggcttatcacttatggcggtcttctccttggggcatctttcctattgttgattctggtattcgtatgtggtactgagttaagtttatttggagccttaaggataggggtattgatgttaatgaggtgtttatctggcgggctagaaatgacaaagttcacaatgataatttgggtaacatcaaatactttattgattttatcctttcttgttacatagaccacaaagctactctcattcgcactctcactccgactcaaacaaatgttaggcagccccctccgcaggactggatcaaatttataaactgcgatgttagagtggagttgaagttt

SEQ ID NO: 102720 - DNA, 750 bp, Cannabis sativa
  modified_base (121)..(131): a, c, t, g, unknown or other
aattgtaatcggtttgagttactgtgtgttacttgtttgtcttcattatgttatataaccggctctattttaattataactagtttaagttattttgtgttatttgcttttatttattatnnnnnnnnnnnggttatatttcaattataatctgtttcagatatttgtttttattcattatgttatagaaccaattctatttttatttatatttgataaatctacttcaattctggtgacttttctagtgattttttcggtaacttttctggtgactttccagcgacaataactttcccgacgacttttctagtaattttttcggtgactttatttataatttttttttcacattttaaactttaattattttttaatcctatattttttttttttgcattatttagttatgacatataaaaaataaattcaaccacattttcctatatttaagaaaaaactccaataaaaaatgataattttcaatttagccctggactaaaagcctgaaggattgggcagcggcctgcagcatgacatatctttgtgaaaattacattaaatatgagattttgtaaaaaagttacaaaaatatgacatttataggtttgtcacttttctatgacattttttcacatttaagattttttatggtatttgatagggaattttacacccattattgttttttcccaatttctttcttttatactgttacacgcctaaattaacttttatactgtttttttt

SEQ ID NO: 102721 - DNA, 824 bp, Cannabis sativa
ccaaagtgtttgcttactgggaatgatgtgttgaagagtagaggattggaagatgaccctcgatggattaatgtggggattatggttggattctttgtcttttaccgtttacttggttggattatcctatctcgaaggtcttccaaaaccacactttaatataatttattagttagtaaaacaatttagattagaaagagccaggttcgttttcattattagatctttgggttgtgatgtgtgatgttttgttgagtatgtgttatgatgttgaatttcgtaatgtctctgtttctgtaacttagaagaatcttcttctctcatctaacattggatttatcgttgaagacatcagaagtacaacatttttttggtaaatagtccatttctattagttctgcaaattaattgtttgtatcatttattaaagagaaatgctaaaaagtatcatttctactacattgttaatattgttattgatctattagttcaatattgggtttcatataatttaatataataacttttagagagtattgtaagaggatatttcaaaagatgttagacaccacttatttttaatattaatttaaaaacatgaagaaaaattcatataaactaaatatcatccattcattttagttaaatactaaggaaaaatgcttaaatagagtcatgaaaaacgtttgtacatacagatttttttttttaattatgtgtcactcttacatttaacaccaatatttcattaattccttttaaattatttttttttaataattttgtgatatcaatataaagaaagttacttgttctaaaaaaaa

SEQ ID NO: 102722 - DNA, 999 bp, Cannabis sativa
  modified_base (603)..(603): a, c, t, g, unknown or other
gattgctgtttgtggttggaaagttatttcgtactgacccaactctactgcccacctgagtaaccgtctagaagcatctggcctcaatgagtcttttactaatgtaatagactggctgttgcatgtcgttctcttctcagatcagcacgacactcacgtcatgtttcgtgacagctaggtatgttcccaattcctaaccgtccagaggttttgaaagtacaggaggtttcgcaagttgtgcctttagctcttggaaaattctttcacattcttctgtccactcgaactgtttgtttcctcgcaggatgtttaagaatgggacacatttgtccattgattttgacaaaaatctgctcagtgcggcgatccgaccagttaagctttgtacttctttggtttttgttggcgagttcatatccaagagggcttgaatcttttttgtattggcttgaattacttaggcattgacgatgaagcatagaaactttcctgagctgactcttctgaatttagtttcatgttgtattttctgaggacattgaagcattcgtccaggtcatctatgtgcccccagcctttctggatttgacgagcatgtcatcnacgtacacttccatatttcgcccgatctgatctttaaacatttactttaccaatcttaggtacatagctctagcattttttagaccaaacggcatgactttgtagcaataaagacccatatctgttcggaaacttgtatgttcttggtctggtggatgcagattgtggcctgagtaagcgtccatgaagcttaatattccatgccctgctgttgcgtctacgagttgatcgattcttggaagtggaaaacagtctttagggcatgctctgttgaggtttgcaaaatcaatacagacttgcaatttcttgttcggcttgggcactagtacgggattcgcgacccaagtcgggtaaaaagcttcaattatgaagttgttgtttcgcagcttttcaact

SEQ ID NO: 102723 - DNA, 897 bp, Cannabis sativa
ttaattctttaaattattttttagagtaattttaattgttttgaatattttaaagactaatcatgcatttagatttttttggtgagattttagcatattttggtggaaagtagtggaagtcagcaagtttggtttgataaaactcaacgtaaatgagatttttgatgaccttagaagcgaaattggacttgaagctcaacatcatagttatagatctcgctctaagctttccagaacatcttgaatcatctaattctgagttgtattgaaaaagttatgaccaaaatactaattaggtaatcgaaatttttttggtaggaaatcatggccgcaacgagcaacctcgtgggcgcgatgaggctgctcgtggcttcgacgaggaggtgatttctgggcaattttgaattttttttttatcttttttttagtaagatattttcaagcactataaataagagcttttaggctacgaattttaaaatccttaagctacaaaattgagatagagagagctaggaagagacggagtgaagtgttcttcatcatagttcttttcttctccaactcttactatttattatgattttcattataatgtctagttccgagtagtttccttttagttaagagttatttcaaaactcaagacatgaatttttaattttattgatgagtattaatttctagtttccattatatcaaattgtttctattcttttatatttaatgtcatgattattattttaatcttgtttagatggttactaaagtagactttactttaatctactgtcatcttaggattactattcacctaatagtctaagactctaagtgtttgttataaatagcaatttctaatattgtcaaagatattttaattgtgatgaagaataa

SEQ ID NO: 102724 - DNA, 794 bp, Cannabis sativa
ttataaataaatttaaaattaattaaaatttatatatttaggaaatataattaaattttatttggtttactttttattattattacttaaattaataattaagttactgatacctgtaagggcatttttcaaattttgatttttaatctgatggtaatgatttgttgtagtttattttgttattattaggtaacacttatagaattattatttatttatttttaactctcttatttttttagccatgatctggtttttttttaaatctctaaaatgatacacgatattatcattattttttgctaactttaatgagatgatgatgaacgaggcaagttgggactggtgtagctagatttatgcgaagatggtgatgagatcaccgtgattcatgcggggtaagttgaggaatatttttttttattttcattaataaaaaatactcttatattatatttcattaaaaaagtacccacttttatgagtgggttgcctaatatactgttatcttccacttaagtctagcatataatttatattaacttaaagagtgtaataggaacattatttataaaagtgagtatatttaaagaatataaaaataaagataaaaattaaaataaataaaataaagtgagaatataatataatttactctagtagtgctggctcaaggacgagagggaaattgcccaagcccattattaaacaaaggcccattatatgtatatgtatacattaatgtagcctacatccttaacaaaaggaaaaaaatatgaggaaattagattgta

SEQ ID NO: 102725 - DNA, 580 bp, Cannabis sativa
acactcctcattaaccaagtgtaccaagatttagattacaagtgttggtggttgaatcaataagataaagaggtagatacaccagtaaagcatacaccagaaactggttttggaagtaccataatctacaattaaccttttactcttctctctctctctttgatttacaaattgtaaaatgaaccacaccacatgaagagtaaggagtgactatttatagacaccaactaccataactgttttaactgaaagttagttaaaacagttaggtaattaccaaaacagtaagtgtccacctaagacttagtttctaggccataatacaaaaattccaccttggcatagacacttagacttaggagattaagaggatgacagactttgatgaaagatggaaactcaaccagtttccttgaagttgaccaagtttagacaatgtctaaacttggttacagtgacacattttgtaaaaatatcagctgggttgtgttcagtgctgatcttcttcacttttatctctccattagcaatgatctctctgataaagtgtagtttcatgtcaatgtgttttgacctatca

SEQ ID NO: 102726 - DNA, 594 bp, Cannabis sativa
tcatgtctgatcaacatgagtggaagtagattatcgtatgtgaggacaatgtgcgataagatactgtgtgctatgtgtgtgagtatagcatgcattaagatcacactgtgacatgaggttatatcgtatgtgaaaataatatgtgatatgatatgttgatatatggacgaaagtatggtatgaattgatttgatgttgtgatattgttatgtttatggctatgttatctagttgggtggttatgtcctacatagctcttcttactgggcgttagctcatgggtactctgtgtgcaggtaaagacaaaactgaacagtgaggatggcgagctcgaggtgtggattacatgttaggggataaacaacaatccatagtacaaaatctcataaacacatgaacatcaaacccacaataaagttgtatgtttcaacatacaccctgtgcatagatgtccactcttcttacctcagttgttaagaacaccttcttgctactccaagcaccaaaatgagtttccttgttgagaacaagatcctaaacattcattaacacaacaatacactcaaaatacattcaagtatgaatctttatact

SEQ ID NO: 102727 - DNA, 584 bp, Cannabis sativa
tatactacattatttatattacttattgagttaatttatgcatattgtatcatagttttatattatctttcttgtttttttaacacttttagttacaaattttgtgtattaattacatatgaaattttattgtaatatttaagtattagcaattattgtaatccaccccacaaaaatgcaaaccacccacactgtatttttgtagggtggtttgtgcaatttttaaaggtctatgtagtgagggaacaatttggaaaattgctcaaactgtatatacagtacgatttgaaaaattagttaaatatcatactacccgcaccgcaaacacccctaaccactaaggaagcatgaccaccaagttttagcatgattaataaacaaaacaaacttagcaagggaatgaactagctcattcacagttttagaacaatgcacaaaataaatacaagagaaatcttttttgactataaatgtcctataacaccataccaaaagacgaaactaccgttattagcaatagaatcccatgctcgccaaccagcgacagtcaatttcaactacaacatatttgcacaccaacctta

SEQ ID NO: 102728 - DNA, 501 bp, Cannabis sativa
gtgtcccattaacttgatacgacatacgactaagtaagtaatcagtttttcagttttaattaaacacgtttcttaattaaattaaaaataaataattattattttattaaataatttttctgtaaaaaataatatagtgtcacactaaccaacccaacccggctcagacggtgtgcgcgcgtgtgtggtgggtcaagtgtgtgagtcctcacccattcgcacaaaactgggtaccccttggggcccaaacccaaatgccaaggttgcactctttatacccttataaataagggttcatatcctatgtgggactctttccactttacacacactagaacatttatatattttgttaaaagattcatcaaagttccaacagttctctatcgttaattgcttcaaaaatcctctaaaatttgacctaattaactctaaagttgtaattaaattaggcccaactcacacagacccacatttgcgtttaaaagacctgcactctca

SEQ ID NO: 102729 - DNA, 630 bp, Cannabis sativa
  modified_base (26)..(28): a, c, t, g, unknown or other
taaactcaataattaaacccaaaaannnaaacaatctttttttaaattaaataatatttatttattgtactgttccacttaaaaaattaaaataaataatatttatctactgaactgttcacttagatagatatttctgttatatttttttttatttaaatatgaatttgaattagaatttatttaaataacaaatatatatttaatatttgataaaattaaaataagcgaagattccccatcacagtaaccacatcttcctctgaaacccctaaaatccttcttagataaactctaattaccaatcctcccaaaactatcttcatgtaaacgaaccccaccattcattgaaacccttctacatctcatcgtccaaacaaaaacgcttcaatgaaatgccttttcattggaatcattgaaggaaattaacaattatcatcttgtcaatggtaaagtgagctttgtgattcgattaccacaaatccctgcgattgtcatctaaatcaaattcatttgtgtgtgctctttattattgttagaaattgtatacctgcattttaaacaggtgccaaatgtttctgatattgggctttggggtcaatatctttgattttctttatatttctttat

SEQ ID NO: 102730 - DNA, 1317 bp, Cannabis sativa
gcttttcaatcttctatagccttgacctattggccatatcttgtccaaactgttgtatacttaatcaatcgaacacccaccaccttattacaaaatttaacaccttatcaattgttacataataaaccccctgcttatgaacacttaaggtattattgagagtaaaaaagcattatgttttattaatgaataatgaaagtatttatacagcaaaagctaaaggaaatcagcaacaaactaacaaccagttagttaaacaattaactaactctaacaacctacttaacagtctaattataactaacataactaatattatttaagactccccctcaagatggagtgtaaatgttggagacactcatcttggacaacaatgtttggaattgagtagggaaaagagcttttgtcattatgtcagcaatgttgtgtcgagaaggaacataggagagcttgatgcaatttttgttgacctgttctcgaactatatggcagtctatgtcaacatgcttggtgcgctcgtggaagactgcattctcagaaatatggatggcagcttgattgtcacaatgaatggttgtcggttgagatgtgtagatgctgaaatcagtaagaatgttgtgaagccacatgatctcacaagttgtattggcaagggacctgtactcagcttcggcagatgatttggacactgtagattgcttcttggacttccaagagatgagagattggccgatgaatatgcagaaaccagttatagaacgtcgtgtattagggcaggtgccccaatctgcatcagaaaaggcttgaatttggagaagtcgttgtgcaggaagctgtgaggcatagttggagtgaaacatgagtccttggccagaagtgcctttgagatattgtacaattcgataagcagctttgagatgtggttgtcgaggatcactattgtattggctgagtctattcacggcataagcaattcgataagagtttaccaattagacttcggtaagaggtaggatcattgacaggaagtccaatatctttgcttaaggaaaggttggcatccatgagagtagaaacaaccttagagccgaggagagcggtttcatttaaaagttgcagagtgaaatttctttgagaaacagaaatgcctcttttggatcttacaatttcaaggccaaggaagaatcttaagtggtcgaggtctttgagtttaaattttgaatttaagaatgccttaaaggaagttgcttcagaagcattggtgcttgcaattactatgtcatcgacacagactaaaagtgcaaggaaacttgt

SEQ ID NO: 102731 - DNA, 650 bp, Cannabis sativa
ttttgcatgttttgtacccggcaacattggaacgcggtgtttctctattagaatcacatcttagtatttttagtatagcgggacagtaaagttagacactcagaatgtcaagaatagtcgggattttagattttagtgtggaaagagcaaaatggtcattttgcttttatgtgttttgtcttttactgaaggttaattaatttatataatctgaatttaagttatgtttttaattaataaattaattgaataaaacttaagttattcttctttttacaaaaacatagaaaattatcaaaaatctcatatctctctctttcaactttctctcttttcgaaccccctagaccagctagggtttgtttttgttctttattaattcaaggagtttcagctggtttttaaggtgatcttagccaaggtaaaggttttgactctcctctttatgttttcttgagctttaagtttgagatttttgcatgaaattgagatattagttgctggtgttgtttgacaatgttttcagaagttaaaatatgtttagataggttgatttaagcttgtccggatggctattagtagatttaaccaagttttgagttttagaatttaaacttggagctttaatggtgaaacttgtttctgagctt

SEQ ID NO: 102732 - DNA, 928 bp, Cannabis sativa
ggtgaaatgggccaatattgtatattacaacagttttgcaagccaaaatccaaattatacgagaaagatagagagtgagatgggccaattatttgagaagattgaaagagcaaaatccaagattatatcatgtatttgcacatggatctctttgggctaagttgaaatatacccacttttttcatcagttagttaaaagtatccttattttaaattcaattgaaatgcatcccttttataagtccattactgattatacccttacataaggtactattcagggaaaggaggaagatatttttcattatataagggtataatcggatataacaaataaaggaaggtataaattaaatatatagaaaagaaaggtaaaaatgaaatgggttaacaaaaaaaagtatagggtgcaattttcacgatctcttttagggtcggcccaaatagtttgaaccattgtcccaacctcctatttttaaggtgtttgaggaaattaaattgtatatctattttactttatttgttttaattttaacttttgtttttatattctttaagatatatcattatcttcaaaaatttatatacatatatatcctattttatagatgatgtctttattatattcttagattaatgtaaaaatatatactaaacttaagtagagtgtgagggtataattggacaatccactcacaaggtatattataatgaaatataatatgagagtatttttaattaataaatacaaaaaaatgtatttcctcaatttatcccaatattaattaagaaataacaaatttattaagataaatattagggatacgttgatgtaatttaatattagatttttaatgagaaaatgttctattttaagcaaatgtacttgaatgtgtgatacataaaaatatgagattattttataaag

SEQ ID NO: 102733 - DNA, 575 bp, Cannabis sativa
agtttttgatttgctttggatcttattgtttcaaattcaaggttcactttcatccaaatattttagtactaagatataaaatcttaattaattggaacagatattcctcttaatttcatcacgaaaagagcctataaaatcttgggttctctactcaagtttggtagcccaaaagatgtttcaggggtgtggttacgggaggttcattctaggccgtatttagttcaaagtcgtcaatttcaatcttgggtttactcttgattttatagcaaatcagttgtagtagacaaatgttttggagtttagttgtttaaagtcatagcttgcagtttcatagtagcaagtttgatttttgttgagtgatcttaatctatgtgctgcattagagatgtgggttttttattggaatattccccattcaatgcttatcttactttaatctcccttcccaacccctagcttgtttagattgttacaagttttgtgtcaactttgttgttttatatgtgtcaaataagttaatattaatataagctttaggcaaaaagggcgtgtaatcctaatttgtttatatg

SEQ ID NO: 102734 - DNA, 777 bp, Cannabis sativa
gagagagagagagagaagaaaaaataaatcaaaaatatatttttttttatttttataatttttaaattatttttatattgtaaactaattttaatattacgtggattcataaaaatgggtcacgtgtacacttgtgtacacatcgtcaatccattgtggcatttaacagagatttttagatatgagtgtaaagagtaaaatagaatgtgagtttaatagtcaaaaaatcgatttatgcagttaattgttaaaaattataaagtttagatggttttaccgccaatatttctaaaagaaactattaaaaaagtaaaggattattttggtcatattaatatatattttgatacaaattggttataaggtcgtaattggtactattttgaaaacaaggttcaaaaattactttataaaagtctaaggtccaaactggtaattggtgaaaacaaacacaaggttgattttggtataaacccccccaaaaaaaaaagaaaaaaaaaactaatcttttaagacttaaaaatgtgtggctgaaactcaacgatcttccaaatctttaaaatgtttggagctgaaacttgaaattccaaatcaacatatcaatcacaccatttttttccgcttccactccattgtcaccctcaccatctatacctgtcataatatatatatatatatatagaggggaggggggtagagatagtgatgggtagaactacaggccaagatgagagaatcacaagggtgtttttcatggctactctgatactatggttg

SEQ ID NO: 102735 - DNA, 559 bp, Cannabis sativa
atacgactttaaaataatacttctcgaaacataaattttaaagtccttccattacattcttttaattcaattttattgtgaaatgagcgatgcggtagatatataatacttgataaatagatgcaaattaaatactttataacttttatgttaatgattgaaaaactaaaaaatataaattattatatatataaagtcatttattctattattcaataattttaaaaaataaaaaaatatttaatttgcatttatttattaactagctactattcaccttgtcattgatttttattaaaattaaatagaatgtgatgaaataatcatgttactataaaaattatattttaataggtattatttacaagttgtatctcataacgaatataatttgatagtgtaaaaaatttagtaacaaacatgttaatattattcatatatttataacatcatatcaatatcatcatgatgcatatatacatattatatggtgcatgtgatgtgaccagagtcattgtatatgcatgtaaattaaaaagagccaaaggcatatatatat

SEQ ID NO: 102736 - DNA, 546 bp, Cannabis sativa
ttccaacattttcttcttcagctagagcaacattagcatattttggatttgtcttttgcgctcttgttgatctttaaagttctggttggctatcatcatgtcttactctttggtgcacccctatttgccatggattctaaggtgcctcatcctcagtgtttacttctccatctgtatcttgagttggaggtaactcaataactttctccctcatttcttgctaaaaattgtcttccatttctttagaatctggtaatgcttctttttgcgatgaccaccatgatgatgcctcatcaaagaccacattccatgatgtataacactttctagttgtagggccgcagcatctccaccctttctgttggttgtcgtatcccacaaagatacatcatattgcctttttgtcaaatttactacatagatggcttggcacgaataagtagcacagacaaccaaatactcagaagtggcttactgcaggtttatagccccacaatttctcaaagagtgaaatgaaccctaacttttcttgaggaagtctattga

SEQ ID NO: 102737 - DNA, 834 bp, Cannabis sativa
  modified_base (148)..(149): a, c, t, g, unknown or other
  modified_base (378)..(392): a, c, t, g, unknown or other
gctatttaccctatcatttttatcatgcatgtttagttttttttattatatataaaagtaatatataattttgtaagtatgatgtaattattttatggttgtatataattttgttaatatgatatatacaattttttttaataatatnntattattttattttattttttatacatgttttgttttgctgtacagtatatatgatttttattgcatagtatattatttattttagtttctactttattacatataaggattataaaaaaattttggtatgcatatatatattttaatagtggtgtataaaaatttgttagcatgatatatatatttttcagtattaatatagtattgttataatttctttatggtatnnnnnnnnnnnnnnncggtatattaatttttagtgatacaatatatcatatatcaaatattgatatatttattcaataatataatatatttatttatttttgttataatatattatgcaatacgaaaaaaattatataacttaatttaattattatatatttttttaaaaaaaataaattaatatgtaataaaatgtatatttataatttttattaattaatttattttatttgaccataaatttctaaatttaagattattttatatctagatccaatctaaaatgtcatttattcttatctaaataggtgtcatgagttcaaatataatttacgcactctttatcgtatcaaattaaatgtgaaacttaatggcacgtttcagaatcagaataaattaatggagaaatgtaacagaataaatgaaaaataatcggaatcaatatttgtaatatgt

SEQ ID NO: 102738 - DNA, 530 bp, Cannabis sativa
  modified_base (456)..(457): a, c, t, g, unknown or other
agttggaaatggcgagtttgtatcggtcaaagctagaggaacagcccatatcaagtttcaacaaaaaattttacttttagaaaatgttttgtttattccaaatttttctagaaacttgatcagtgtttcatgtttacaaacacaatcttgtatattgaaattttcgagttcttattgttcaatttctcgtaatggatttcaagtatgtgttgcttacatggaacaagggctttatgttttaagaccgaatacacagacctcactaagtactgaactttctaatgtagctaaacctagaagccttaagagaaaagagattgataattatgatcaaacttatctatggcatttacgcttaggtcatataggcttcgatagacttaataggcttcgaatacgcttaggtgaactgccagtatgcgagtcatgcttagaaggaaaaatgaccaaacgttnnttctctgcaaagggagagcgtgccgaaaaagcctagggttagtgcattcagatgtttgcggacctctgaatgt

SEQ ID NO: 102739 - DNA, 502 bp, Cannabis sativa
aaaatacatctcattttaatcatctctaaagtgctgcagtgaggacttctaacgttgggctcgtgagggctcgatgatggtctgtgctggtgaaagacgggagagaggaggtggccagaatttgggtgcttcagatttggttatgtatttttgaaaaatattttgaatgagttgttttattgtttttgtcagatctaattgctttaatatctaaaatatattttttatcttttgtagctttatctcgcatttgaactcgtcccctaaattagatctagtgctacgaagagagcacctgaaacttctttaaagatccaacggcagtcgggatcactcctccgagggcatttcgaaacttcagcacacgatatgagctgacagtgtaccaacggtcagaactctaatatgaactaattttttggatttatttgacagtgtacccagtttcttatgtgtgttgcattatgcacatgaactgctaggtatggatttgagtaatgtt

SEQ ID NO: 102740 - DNA, 935 bp, Cannabis sativa
  modified_base (95)..(120): a, c, t, g, unknown or other
aatatgcatttggcccaaggtgcctgtgagtctagtgtctttctcaacaaaatatgtgtacatgtactactacttgataataataataataatannnnnnnnnnnnnnnnnnnnnnnnnnaataataataataataaaataattgtaaaattggaaatagttttgtaaattaatattttaaaaatatatatgtaaattatttcatattatttatttaaattattgataatttatatttttttttaaaaatatatatatataaattaatgtccagcaaagttggactacaaaagagtttctattatgggctccattattatgtctattaatgttggactagaattattttggactagaaaaataccttttttatgtccctggatattatgtccaacacaaaagggactcaaaagacctatctagtccaactttgatagacttaaaatgaggtttttgtagtagtgactaaactcatatcccatacattaacataaaatttgacagaaaatggatattaataacttatgaaaatcatactgtattgtccaatgtatttgtaacgctctaatctataggaacgccacgtgtgtgaatttataaaactagtttaatactaatatattaattaattattaaaaactgtgaggataattaaaacttgactaaaataaaacactaaaaacggacattataacggcagtaaaaaggaattctgggaatccatgttataaaagatatatcaaaaagacaacatacaaagacaattcaaaacacaattcaaaatacacagacacagccagtccaaaacaactcctggtaactcaagacgtaggctggtggggtcaatatgtacattgctggagaagaccgccatctcatggctgttctaactttgccttgcccttacctgcaccaaaaagcacccgtgagtcaca

SEQ ID NO: 102741 - DNA, 500 bp, Cannabis sativa
tataatacaatacaatataatatggtctaatacggcgttctaaacgagccctaactaaattttttagtggcaaaattttatatatagttcacaagtctcaccagttactcatttgatacaatattaattaattcttgctaacaataaaggaactaatattataacaaaataattatataaggatttttactagggcttttttattagtgtataataaaaataattttattacaaaaaatatgaaaaaaaaattaaaatatatacatttgaaaatatatttacataaaatcatacaaattattaattaaattatatttagtgtattaatgagtaaattaaccataaatagatttttataaatatttttattattatcattaacattaacattctatatattaaaatggatttttttcagttttaaccaaaaataagtaataatattacaaaaatacttttagctggccaaataaacaaatatacagcctaactaaaaaaaa

SEQ ID NO: 102742 - DNA, 736 bp, Cannabis sativa
taggaaacaagatctattatttccatcaatgtttttttaagaaatatattactttatacctaataattatggaacaagttcatgatgtggtgtgtattaaaataaaaggcaacatatataaaatataaatatatatatattcccatgtgttatgttcattatttatatataaaaatacacccatgtgggtagtagtatgaaacaaagggagaaacaaggataggataatatagcatgatattgacatagagcactattaatattggaagatgcttaggtgcaggctctaaaaatgactgcatgcacctaaagcctctcattttcattataggttgtctactgtatatttggtttacggaatgttattgttagggatgtaaatcatttaatctaatttgttctacacatgtaatgtaaagccttatatccttaataatgataatgtttaagtttgatgtagacaagacaaccactacagtctcttaattagaaaaaaaaattggagtctcttaattattttattatttatttaattttaagtttttttttttttagtaaaaatcataaatttattaattaataaattcgttcaaaacaataaaatgcacttcagattaacaatcttccaattaaagcacataacctgtagagaaacaagaatctcttgccaagcaatgagccaacttgtttgcagatcgttttacaaaacacaaattaacaaaagataaagccaaaa

SEQ ID NO: 102743 - DNA, 516 bp, Cannabis sativa
  modified_base (456)..(456): a, c, t, g, unknown or other
tattatattattcaatttttttttgtaaatataattagtaaatctaatttttattttataattatatgaaatatgtatatttattttttgaatgatattatgtaaaaaagtttaactaaaaaataaatgattaaaataatttttagaaataacagtaataattagtaactttaattaataaataaccttttatattgtgcacatatcttcaaatactacataatagaatacttgtatctaaaaaaatacaataaaatactaccgatcaatgacaataaattaaagaaagcaattgacttaactactattgttgaagcggtaattgatgttgtttctctgaatatttggatagaccatcaaactgtcaaattagaaaattaaaattaattaaaacagaagtacttttatatatttgtatttaaagcgaagatgagtatactgttgggttttatgccntaaataaaactctgtttcaatgtaatccagattattctatatcaataaagtaacagaagt

SEQ ID NO: 102744 - DNA, 1163 bp, Cannabis sativa
atgttcagtccgagttgaaagatcataatattcatcttcccgactcttacaccattcttcaagttcttcatgaacttcctacctcttttagctttatcaaaacagcataaatacttataataaagcatggagttttagtgacctaatttctcagtgtgtagctgaaacaagcaagctaacaaaatgagaagaatggatcttctcactttatttctcaactcaagcccaacaaaggataaagaaaatatgaaaagaagcaatcacaaccaggggctaagggatctcaagaagacaagggagagggagtcaaagcttaaagtggtcacttatattggagttgacgttatcttattggaacatttattcttgaattacagtgtagtgttcagattgttttgaacaatactttcttgattcctaatttaaagagtaatttagttttgcttccgcttttagtttagtaataattttcttttccatttgccaatcataatgttgacattatgtttgactccgaataattggaaactgtttttactctggtgatcctttcaaattatcattgacttccttaacttcctctttcaatgttgtgaatattgtgggtaagacatcttatattaagataacatccttattattatggcacgatagattgagtcatatttctaaagaaagagttgatcgattacttctagctaaaattcttcctcatcttgatacttctggttgggatacttgtgttaattgtacttgtggaaaattgactaaaacaagaaagaagactacaaaccgcagtcaatctttattagaaattattcacactgacatcagtggaccttattccaccacgttgtccagaaacaagtattttataacttttatcgatgttttttcttcttatggcctcacctacctgatcaaagacaatccaacgcttttgataaagtcaaaatcttttgaaatgttcttaagaaataattagaaagagtcttcaaagttattcttttagattgtggaggagaatattatggtcattattcagaatatggactacacatggggcgttttgctgaatattttcaagaaaatagtgtagtttctcaatacactatgtcaggttcactgagcaaaatggtgttgctgaaaggagaaatcgcact

SEQ ID NO: 102745 - DNA, 588 bp, Cannabis sativa
ctattttctatattaactattaaacaatattattattttgtataattattactaattattttgtcaaagaaaatattatcaattcatatataattacattctcatattctatattattttaaattatagtgtaattatttaactgtgtaattactattttaattattatattactacatagttcttctaaacactaattttttttttacaaataaaacaaacagttaaattctatattatgtgtgattgtttttattagtttactccaaatgattaattatcatgacataaataattaattattatggtaccaaaagtccaaaatttaaagtttgaagctacaaacaattgtcatacagctttgcattagacccaagatagagtcattatttactatctaactgagtaataaatcgtaaaagcaaaactttgatgatggttttgttggtttctatacgatccgttggagatgtattaagttagactatttaattattctgtcaaatattgttatacttgggaaataaaataataatatgtttacttagttaagtaagtgtcatgtacataatttaacattaaaaaaat

SEQ ID NO: 102746 - DNA, 649 bp, Cannabis sativa
ttatcgggtgtgcctggaagtatgtccttagctttctggaggccaagagcaagttgtagatcagcttttccatgagtgggtactaactttcaacgttgattagtcttttgctaatgtagtatatagggtgttgtacaccgtcttcttctcttgttaggacaacactcacagcatgctccgtgaatgataggtacacgtctagctcttcattgtcaacgggttttgacaacataggtggttgaaccaattgttttttagctcttggaatgctttttcacattgctctatccactcaaattttttattgactctgagaatgttgaagaagggtacacacttgtctgtagacttggacacaaatctgctttgtgcagcaatgcatcttgtcaggctttttacttctttgatggttgtgagcgacttcatgtccaaaagggcttggatcttgtttgggtttgcttctattcccttggcattgactatgaagccaaggaatttacctgagccgaccctaaaagaatatttgagggggttgagcttcatgttgtagttgtgtaggatcttgaagcatttgtctaggtcctctacatgcccccagcctttttggacttgataagtatgtcggccacatacacctccctattgcggc

SEQ ID NO: 102747 - DNA, 1555 bp, Cannabis sativa
aggtttagatgagatgggcttaaataaagacttaggatgaatctttcttttaggcccaaaattacacatgggctttagagttagatttttgccactttatatcaacaaatgaaactgaagtgtcttttctaatttcatcacttatcttatctaattatttaaatactaattttacttataattatcaaataaaatacaattcaaatatttttattaattagacctacaaatagtactaattaacaaacaaatccctatttttcttttcttctcaaaattgcccaaacttggtgaaaattatcaaataagacatagtcttttttgaattttaattaatttattaaatcaattagttgagcctacaagatgatattatcttaaaaaatttagggaccatgggcctatgtaaccaagctcctaataagcaaattttgaaatttaccgaggaaatttcgtaccttattaattcttcctgattttactataaatttacgctatgaattatctattatttcaatcacaataatcattgatcctctatagacggtttacattgaatagggaaatttatttacccttcagtgtattttatccttaaatcacttagctacttgtaaataatttttagaaaactaatataattactgaaatgagcgctctatcatttactgcattaagtcaagctctaaggaaaatatcatttcaattctaaatagttatagaagctatagattccatatatatgattagcgctcccactcaattgcactccgtgttcccaagatataagtattgggcaaatcttactggtaaactgtaacaaacaagtcaaataacacgtgtaatacaattgagctagaacctatccatctcaagattgaaataaaatgatctatgatctactaagtgatattgacttagaaaagatatgatgataagtttataatatatttgttattgttaatatcggtcaagtctggtgtatagtcgatgcatctgatcctagtttactttactaataccttggaaaagatattctacttatccaagtgtaagtaaaccccatcaatgattattatcacatcagtataaattcagtgcacttataaatcgtgggacttaataatttgaagcatataatcacaattactttcaactgtgatgacatcattataattgtgaataattatatgttcagaatttaaaataacttataaataaataatcatgtaaaaaaaatatgaaaaaggcatatgacaaggtcaataaatgatttttgatctttactgaaagtaaataagattataatgaaattagattttatttaatagggcataaaattccaacaatgacaactcctctagttgggttcgcttcgggtacacaggaaactagaaccactagtactcataatggagagactggcccaggtattggagatccatctgatagaaaatctcgagtggtgatcaatgatgatactgagttgcaaaacctgacagattccttagggtagatgtaagaccatactaacactctttaccatgattaggag

SEQ ID NO: 102748 - DNA, 833 bp, Cannabis sativa
tttgttaggctattttgaagactattcatgcatttagagtcttttggagggattttagcatattttggtggaaaatagtggaagtcggcgagctcgattatagaaggcggaactttattgcaaattcaaacgaacttataggcagaactggactttgagctcaacatgaaagttttatatctcgttcttagatttccagaacatcttgaatcatccgattccgagtaatatcgagagagttatagccaaaatactatcagtcatcgcagcaggaaatttctaaaaaaaaaaaatagcgaaaataaagatagcttttcaagtagagttgcgatttttttatcttttttcaaaagatgagttatcttttcttttagtgagatatttcttaatactattataaatcgaatcctaattataaggggatttatttatctactataaatagaatcctaattctaataggattcatataactttcccattactataaataagacctcttagactacaaatggagagaattcgaaagctacaaattagagagagagagagagagaaattcagagagagagagcaaggaagagacggagagcggcttcgaagtgttcttcgttctagttcttttcttctcctaatactcttattaaatattatgatttttattataatgtctagttctgagtagttttcttttagttaagggttattttaaaactcgaaacatgaattcttatttttttattgaatgttaatttctagtttccattatatcaaattgcttctatttttctatgtcaatgttatgattattgttttaatcttgtttagatggc

SEQ ID NO: 102749 - DNA, 662 bp, Cannabis sativa
ttaaatatctacaataatgagtctgactgatgtaatttccaaaccatttaatttgcatattgttctttttgtaatataatcattacctacctcttttgggctcctttcagttggcaaacttcgaatcatattacatcttgattcgaaaatattgttctatcagacaaacttgtgaaaaataaattattttttgaaaaatatatttcaaaaacaaatgtttcaactttgacattgataaaaaagttaattttgttagttataaacaaatcaagaaaaaaaaaaacaaaaaaacttatgaggaactaaaaaggatgaataaactaagaaaagataaaaaaaattatgaagaatatgatcttgtggtccttggagcttgagatccacaaaggtgtcaaagaaagggaagaacatatgaaatggttacggttttggttgacttagtgagtttaattattattattattattattattttgaaaataagcatatattagacctcatggtcattacacaaaatgttctccggtaaagagttgatcggaatagatccgtacatctggtgggtaaaagtctatttagccacattatgggccacaaagttacaagtcctactaatattcgaaaaattacaacatatgaaataaggagaagacttagtacaa

SEQ ID NO: 102750 - DNA, 558 bp, Cannabis sativa
atgaaccaagtaagaaaaaaaaaaagaaaagtgaaaaaaacagcattcttgaaggacttttttaatcctagaagctaaaaaagagcttaaataagctaagccaaacaggttgaacattgagccaataatagattcacaaaggaaaggttgaacattgagtcatagccaaaccatgaacttacatataactaaggttccctatcctgcttagatcaggaacagttccttgcaagccgcaattcctaagacttctgcaacaagcaaaagaaaagcaaagagttgaaaaacttgtaaccgaagtagtttttagaacattattcagaacgatgtcaggacagattttcttcataaaaactatgaaatcataaaaagaatgaaatatttaggatgagataaaacctgtaaacaattttcatatgaaaacaaaaggtttcaaaatcaaagactactattttactgaagcgaaattggaaattcaccaaagtgtatttacatgtggatggcattctggattcaactagaaatgttctcttcatgtgtgcctatgctcttattatt

SEQ ID NO: 102751 - DNA, 501 bp, Cannabis sativa
atatataccaataacatattagcaataagaaagtttaggttatagctaattcatatagttttaatatcactcatattatgtatgaataggctctcgaaagaaagtaatgtgacataattttgattagattatattttattttttttccttacttaatagtatttaaatggattcattttcgaagcattgacttgattttattatattatttagacttttgaagtgagatcttgatgaaaagttatattttattaaataattattaatagaaatatgtatagtcttaataaaatatgtatattgaaaaattatttataagttgtgaatatatgattcatataccaatgacataactatataactatatacatattatattagtctatcttcttaaattttgagatgggatcttgatgaaacgtaacgtttcattaagtttttttgtgatacatttttagttctcttttttctttttcctttttctaaactaaatatcgattt

SEQ ID NO: 102752 - DNA, 572 bp, Cannabis sativa
acattaggtacttatgccgctaaaaaaattattagatttatgcggcttacaaactcaaaactttgagtacttataccactatttactgtatcattcatataataagtaagaaagatatatcttctaaaaattatactaagataatttggctcccaagagggcatctacatctactttcagtctctaactctcattataacacgaaaagttacacaaaattaatcaacaaaaaatacaataaaagtttttgaaaatttttacaatacaccctttaaaaatgtaccttttaaaatagaagctctgatcatgtactcctatttatttggtacccgaaataattttttgatcaaattttttctcatttgtcatgtacgttataattttttaaaatatcctgcaaaaattttagaaatttgaaaaaatttaacacgtgaaaaaataaggttcaaacaatgtgttctactcctgactattttattttatactcgtgtgaaatagattttttttcactgcttttaattaatattgtaaattattctaaatttctcaaaattatgtaagatattttaaat

SEQ ID NO: 102753 - DNA, 520 bp, Cannabis sativa
tactctgctaaaagccttcaaaagaactggtacactagtaagtttatcatcatcatcatcatcattattttatatcaaattaatgataatatgaattaattatatgattgaattaataatgtattttggtgtagtattgggaaatcatgactacaggggagatgtagaggcacaattaagccctcttcttcgaaatattgacactcgctggttttgcctaacatcttttcttcttaatacaggtactgattattacattatcaacgctacttaagtgatatttagttagagataataaaaatgaaatagaatgaaatggaaataaataatttttattctattaatttattttgttacatttaaaaatattaaaataatcttttttatcattttggtataatagttactatttcattttgaaagagaatgaaaaatctttctaattcaagataaaaagaaaatagtaatttttttatgcatttaaattgattcaatgatattcttattcttattcacattt

SEQ ID NO: 102754 - DNA, 603 bp, Cannabis sativa
acctacaagctaaaaactaaaaagaatggactgaaccacgaaccacaatccacaatgcacaatgcctctagggccagggcctggagcctggaattggaatgctgaatgctgaatgctgatcacctccgaaagtattaccaatagatgaaaagcagaaatatgttctataaagaaatttgtaccgaactaatatatgcagcctcttattaattatttgtaagactaagtgacttaaaaactacttttcatgtcacttagggggtactaaggaatatcatacgggcaaatataaatagattaaacataagaaatataaaaattaaatatattcgaacataaagtagattgcttaaacaagaaaatcttaaaaagaaaaggcctcgggacgggccataaaagtctccctttaagtaaaagaagaaattgtcttaaaaatgaggggaaggacaggatatgtgaaaaaaaaaaaagagataataataatcacagagataaacaaatgatttagtcgaaccgaaaaggaagacgaggacccctgcgctcctccagcactgcatccagcctcttcttcttctcccagaagcgagccagaacctcttcagg

SEQ ID NO: 102755 - DNA, 642 bp, Cannabis sativa
tattattggaatagagttgttggtaatttcaagttcttatgtaaagagtatagtacaacatatactatttaatatatagttgatttgttttaattgaaatttcagattaaatattttattgttagatttttaatttcattgtttattttgcagataatatgctcttaatctaattgagaacatcacactcaaatgagatcttacgagttgaactctgaatttctatgttgtaagtattattaaccaaaagcttttagtgagataaattatgagctaaatatgaaagattttggtatttggtaataaattagtgctattatattatgtattagatgttttggccttccctaattcctatagtgcactaaaaagattacaaaatggaaaaaacaattttgaatgtatagagttactttttcatgtggattaacaaattatgtgattcaaaatttctcatgcagtaaatttggatcagtaaatgagccacttgctaatattttccaatgttcgtgttctaagtccatcaaaatatcttcaaaaaaaagtctatcaaagtaaattgagaaacttttagttaaagaccaagtaataagttatctgataactcttgagtaaagagttatttgatatcactttaagcat

SEQ ID NO: 102756 - DNA, 635 bp, Cannabis sativa
aaataatttccagattgcaaaagaggggaaatcggccacattaaaattaccttctggggaggtccgtttgatacccgaaaactgctcagcaacagtcggagaagtggggaatgttggggtgaaccagaaaagtttgggtagagccggatctaaacgttggctaggtaagcgtcttgtagtaagaggtggaactaaactaaggcacatccaaatccggttccaagtgaccagtttatccactcacaattttctactggatatttatttattatagatagggttccccaatggcagaggtgccctccggtctcggtgagttcacgaatcagatggagagccacccatcctatgtatgagtcacgtcaactctgcggagcatctgcttaggacagagtggggattttataataagtcacgcttttcatttttataggagtaggtgcttgctggggcagggcactcttcattcttcatttgaaactaatgaatgtcgggtcgacaataatgagccaaacttgtatttgaagtgaatcctcctgttaagtaatcatgcattacgataggaactcccaattctctggcaaatacagcccttttcatcatttcttcaccccatagtaggcgtaggcaaccgg

SEQ ID NO: 102757 - DNA, 526 bp, Cannabis sativa
aaaaaaaaaaaaagaaaggatataaggtgcatagcgtttggttaggaggaatgaaaatataggaataggaataaaaatgggaatttgtagaaatggatgagctaaacagagagaaaaagatcaatgaaagaaaacaagccttactcaaacagagtaggcaaagcctttatttatatcaattgaatattacaaaagagttccaagaagggaacaacagaactaattgaaaaactacttaacagaattagttaataacagaaaatgtaactaactaacaggaggatcaaaaaggttgttaacatcccccctcaaacgaaatggtgtaggggacatcttgagtttggctttcaagtagttaaaccggtcagttgacaacggctttgttaaagcatcagcaatttgatctagtgctggaacataacgaacagacagctcttttgctagtataaggtctcgcacaaagtgtaggtcgatttcaatgtgctttgatctagcatgaaatacagggtttgcagccatagcagtc

SEQ ID NO: 102758 - DNA, 912 bp, Cannabis sativa
cattattacacttgtttttaatatcaagaagattttaaatttgagaatatatttctaaaatacagaaatcacatgatatgatcggtgattggaataaggtagatgaagaagagaatatccgtttgttacatttaaaacatttaaaagtacgtgtttcgcgcgcggttgtattttatttaataataatttaattataaaactatatcaaattttaaattttaacatttttgtataacttttttaatagtgagtacttattcaaaattttattttttaactctcaataacacagaaaacataaattaatattttagagtcttgattttttttaattattttaaactcaataaattataattattaattaatttattgtagacattatatttctataaggtccgttttaaaatatatatttttggcataaattaaattagaatcagaacataatagaattttagtaatttgataaatattattttaatgtgattaagtttatatataaaaaaatagaattggaaaaaaaaatataacgattcataaatctatagaaaactcatcaattttaaaattattatcatcatcgtatctcactcgtcactacatttaaagtcgttcttattaccgtatctcatttgtaatcgtcactatcttaaaaataaaaaataaaaattgataaatttataataaaaaaaataatgataccaaataaagagaataaagagtattaataaatgataatgtaagcaaattaatttaaattgtaagctaatatcatgcaattaaaaaattcttttgaaagaacttctcaaaaacctggaaaaacaaacaaacaaacatcagaggtcaagatgataaatagaaaatcgcgatgatcccagctagaggggatgtcacaccttggcccacagt

SEQ ID NO: 102759 - DNA, 552 bp, Cannabis sativa
accattttagtggaatggctattccattttaaaaagaaaggaatgactattccaatgtaacaagaaaaaaaaattaatgatttttttatgaattttttttaatgcattttagattatattccattctattcctattcttattcccattcccattcttattcctatatttttattcttctcaaccaaacgcctcctaagtgttaatggcatacctagtccaatgtatccctacctatatacatgtttatttatactatttcagaatctctcttttcttttaatactatatagtttggactctattttaaataattgtaaataaaactctatgtgaattgagatataaaaaaaaatagtacctttagctaatagtttagactcttccttctcttccttctctttttcttacgtactttttccactcacaaaatagtatcatttttttttggcaatttacaaaagtgtgttaattgtagataaacttatttgtaattatttgaaactgagtatccaaaactgatttttttttttataataaaaataaataaataa

SEQ ID NO: 102760 - DNA, 678 bp, Cannabis sativa
acatgaaggattttgtaaagaccacgtgagtatgcaaagcatgtctaaaaggtaattaatcccacaatcgtattattggtcaataataaacaaaggcacacctgaaaacgtgaaaaagtgtgacaaatattaaaggttctcaaatataccatgaacattcctacagagctacacatgatgacttcctcttattatttgcaatataggaaattaacctcatcggttctttagccgttgtacgaggaggagccaaatatatgtaatagtggttgtcaatttcttcacaaagtggatcgaatatgagcctctcgcttcaatcatatgaaaaaggtcctaaactttattgtgaaaaatatcatttgtcgcttcaacattcccatgaaaatagtcttcgacaatgggactcaatttgatagtgatttgttcattgagttttgtgagaggaataatattataaaaagcttctcgtcagtagctcgttcgcaagctaatgaccaagtacaagcagtgaataaaactttgaaggattccattaagaagaaacttgatgcagcaaaagggaggtgaaaaaaatggtaatgggacataccttatttttgttagcattcaacttagaagaaatgttaccagtagaggttgacataatgactcattggcgtgaattttacgtctagatga

SEQ ID NO: 102761 - DNA, 504 bp, Cannabis sativa
aactaagcggtctttacaggaaatgttgctccccaatccactgggacgaaattggagaaaggaagtacttgggtccagaatttgtttaaaagaccaatgaagatatagacaagatcaaggctcggatgcttgcttcgcaaagtaggcagaaaagttatgctgatccaaagcgtatagacattacatttcaagaaggggaacatattttcctgcgggtttctctacctggtcactgcgaccccctttgtgaggaggcaccccttctcccgaagttacggggctattttgcagagtttattagagagagttgtctcgcgcccctaggtattctctacgtacctacctgtgttggtttcgggtacaggtacccttttgttgaaggtcgttcgagcttttcttgggagtgtggaagggatgagatcaatttagaagtactatttttttttgaagttaatagaaataattattaaatcaaattaaacagaattcaattggtctaatttg

SEQ ID NO: 102762 - DNA, 559 bp, Cannabis sativa
attgagctgccaaggaagatacaaaacccacttgtagatcttctagtatctacacaagcagcccaatctgcattagtgaaggcccttagttgaatttctgatgcagcagacagaaaaattccttgtccaggagtgaacttcacatattttagaactctttgggcagcttgaagatgcttggctttaggcatggctagaaattgactcagtttattaactgagtatgctaagtcaagccttgtaattgtaagatactgtaccttcccaatcattctcctgtataatgtagggatcagcaagtatgtcattttcatcttgtgacaattttaaatttggctccataggtgtactaactagtttgcttccaagataactaaggtcctcaagttgttgaagagcataagccctttgagacacaaaaatcccgttgttagaccttgccacctccaaaccaagaaagtactctaaatctccaaagccttttagcttaaacttgttatgtaacctggttttcaaaactgccagctctgcgatgttgttacttgctagtataatatca

SEQ ID NO: 102763 - DNA, 836 bp, Cannabis sativa
  modified_base (399)..(400): a, c, t, g, unknown or other
tattttcccaatagagtaagacttgagcgtagacgttagaccttgaatcccaaacctagacatcgacacagacctagactcatacctagatcctgaccctacttcgatgttggaacttattttactaaaatctagatttactaacatgtatgtttgattataatctataatataacatcctgaacaagaatttcctaaaacaacaaaattaacacatataaagttgtagaaaatcttacattggtggcagcaaaatataatggctcattctgttcagatttctaacccttgtccctttttgtcgcacagtattactaagatctgaacctggatctctttagatgatagaattcttcataatcttccacactattattgagtattgacttgaattgtgtnngcaagtactcttcactatagggtttgaaaattttgaagtagaaagagagaagaattcaaaatttaagagaggctcttatttttctcagttgtctgacaaaatagtctgatgaaggttatgttatcagcttaaaattagagcctatcattatctatttataggatttcctctagggttataacttaaattatagagaattaaaaaagataaaataatagctaattattaaacccttaagtggctagccctatatgtgggtcctacagttttgtaatatctgcttttttgaagggtaattaattttttttagacttttattttattgtttgtaatggaaataatttattatttcgaatatttatgagtttagtggagtgtgagaatttttttttattatttttttagtgacaataaaattacttttatttttttaatt

SEQ ID NO: 102764 - DNA, 1245 bp, Cannabis sativa
tgctgatccaaagcgtagagatgtcacatttcaagcaggggaacatgttttcctgcgggtttcaccaatgaagggtattaggcgcttcgggaagaagggttagctgagccctaggtccattgggccatttcagatacttgaaaaggttgagatggtagcgtatgggctagccctaccaccagcattgtcggctgttcatgatgtattccatatttctatgttgaggaaatatgtttcggaccagactcatatcttgagttatgaagcccttgaactgcaatcagacttatcctgtgaagagcaacctgatcagatccttgatagaaaggagaaagttcttcgggataagaccattgctttggttaaagtgctctggaggaacagtaaggtggaggaagccacctaggagttggagtctgatatgaggactcaacatccagagctattcatgttagattttgaggacaaaatccttttaacagggggataattataatgaccgctttagtaatttggattagtaaaggtaattagcactaatttctgttatttttaaaattattaatgaatttaattatttgtggaccccattattagaaatgagcattagagttgtaatttctcaattccagagattttattaaactctaggggtattatttgtcttatatgtgaattatgcaatttttgtaattttcgctcggcgacaacggaaaatgcaatggatggctagtttgatcgcatgggtaagtttagaacattatttcttagtgggaaatattttagataaaataaaatatcggggttacgcggggttatggaatttgacaattttacccctagttttgagaaatacctaagttatgacctaaaaggcattttagtcatttaaagtggtggtttggtggctgtcttggtgggtgacacatggccattttcattcaacaaaggattttttaggaaatcctttttcatttagaagaaaataaaggaaattaaagaaaaaaccaaaatagaactctctctctctctttctctctttcgactgaggcaaaaaccagggggaattcaacttcaagctggtgttttctgagtatgaagcaaggttttcgtatatctaaagcaaaggtaaaaccctagaacccatgtatatgtattttgaagcgttttctttagtttgagtatgtgattttgtgaattgatggctgttagggttagaaatgtttagggttagaattttaaggt

SEQ ID NO: 102765 - DNA, 601 bp, Cannabis sativa
tcgacgagcccccaatccgcgagccgcaatcctatctccggtaagactctctctctctctctctctctccattttttctttcttttttctcccgagcctatctccggtaagaatctatctctggtttccctctcaatttgttgccgctgctccacccacacaggccagctccggtctcaaatttctgttgtctgcctgagattgaaggccttgtacaagatcagaacaacccatacccatcgggttcagaggcctaatctgctccttccttccaggtatgttcttcatctccttgcctcaggccttgagcatggcggaggagggaaattatagctgggttttttatttgatagaatgggctagactgcattgatggcattttgtataattatatcagtatttgtttgaaattgacaaaaaaaattatatgatgatgatcaattatatatggggaattggattataataaacagacagatatatatatatatatatatatgtgtgtgtgttattgtaattgagctgtttgaggaatgggagagataataaaagaaattcgagaaagaaagggagtggtgaacatcgacttctcacctataga

SEQ ID NO: 102766 - DNA, 578 bp, Cannabis sativa
cttaagataaaagtatagagaaaaggaaaagaaatcgcagacctatgtctttatttatttcgaaataaccaaagacatagatctccactatcctaccctattagatacatgtggaggcctatacgtctttgattatttcataataattgaagatataagtctataaaaccctaatttcacatcttaaactctcatttcttctttcttcttcatctttctctcaacgaaaaactgttgccacaccatcacccttaaagctctattttctccatatatagaccatcattttttttaaatcttctagttttcttacctaaaacacatatgcactatataaatttatttattttaggatattagggtagatgtgagagtttaggccgacagatatttagggcttttggagaatgacaatcgactaatggcagtgattttgagaattttgatgttgtcttttagcttgcattaaggtatacgatcattttaatataagggtcaaaaagtccactgcagttgttggaaaattatgcacggtgctaaaaaatttgatggtattaaatggtggtgattgaaaagta

SEQ ID NO: 102767 - DNA, 681 bp, Cannabis sativa
cttaatttcaaattttgacacgggcccttaccatgtgaggggcttgttccatgcattacacccaaggagtgcgtgcaccatcaaaggaaaactatctttttgttaacaaaactcatatattaatttacctaatgactatttataattttcaatcaattatttttcttacttatttacttgatgaatatttataaatgttaattaattattttttactttcgaatttatatattaacttttaattaattttattttccactcaacaataattgtagcgagaaaagtataaaatattcaaattatttaatactacaataaataatacaaccaacaatataatcatggtgtaaggccatcatcaacggaagcaacataaattgctattgggagacccacgtaaaaaaagcaatcaatcaatacatttcttttattagaaaaaaaaaaattgttgggcaccgtaaatagacagtagctacgatccaatattaactcactaaaattttaagtctctctcctccaccttatcctaaccctaagcccaaacctgacaagcaaccaataacactcccatcaaacttgcataagtggtaaagatcaagtacaatgacatgagttcaatcatttaaaaatgcatgatttttttattttatttatttttaatttaagcttttaaattaattt

SEQ ID NO: 102768 - DNA, 639 bp, Cannabis sativa
  modified_base (60)..(61): a, c, t, g, unknown or other
ataaattattatatcttcttattacgtccactcatttttaagtgaataattattaatacnnataattaataattaaaataaaggcataagtaaaataacttaattttaaaaaatcacaaacaaaaaaaagagaaaaataacaatcctaaaaagataaaatgtcttcccacctcttaattgtgtctataaatataattatatcacatattaaaataaatgagccaacttaattagttaaaatatacatatatacatataatattatggatatttaaagtaccatgaaatagagaataatcaaacaaaaataaaaattaaaaaataaataatttagagatatgattgtatatgaaaaaaaaaattatagagatagctttttaatataaattcaaaaataactatatatgtaattttattattaatatatttattatattttattttgggatattttattaaaaaatataaaagtttgtctacagaacaaaattaaattataaacagaataaaatataataatataataataaagtgggtagtcagtgaaaggaaaaataagagtgtatatattagaattagtatgacatgcataacatatcatatttgtaaaagagaagaatagtgagaagaaaaataaga

SEQ ID NO: 102769 - DNA, 708 bp, Cannabis sativa
cacgagagagaggcttgatagagctatagtttcgggagattggatcactgcgtttcctgaagcaatggtgacaaacgcaccgatctcggtctctgatcatggttacattctaatggactctaatggactctaatgggaagaaaaacaggggcttcaagccttttcgcttctttgaagcttgggcaagggagagttcctgtgaagaaacgattcggtgggcgtggggtgagaaatgcagaccgtgtggcattattagtggtagactaaacgacactcgaatagcccttcggaaatggaagaatggagcttttggggactgtgagtctctgattaaggaagcagagactagattaggatggatacaagaacaaccggtgtcaagcaatcttctgcaagaggaatcttccctcctatcgaaaattacagaattatggattagaaaggagtctatgtggaggcagaaatcaagggaaatttggttaaaggtgagagataggaactcaaagttttttcatgcctccacagtcattcgaagaagaagaaatggtattactgcgattaagaatacagtgggaggctgggaaacaaaaactcataggatggggacggtttttaatgatttttttggggagttatacaaggcggaagggacgaccttagacgatgatttctacgatctgttttcacctctggttacggttgaggaga

SEQ ID NO: 102770 - DNA, 519 bp, Cannabis sativa
gggcacgtacaaaccccagcaaggagaaggacgagacataaagaggcgagtgttacctcggggtgcacgagaacccatagtcgatcaacacgaggaggagagagtactcattgcaataatgattgagagagtacaggcacaagtaaaactgaaagttactcaaggacgagatccatgagcagtatgaggtccatgagtaggaaaaattccatgagtagaatgcggtccgctagcaactataaccaaccagatctacgcgatcacttaaaccagaaaaaatcagatctttgccaacaactcggtccaaagtaagaggatcctatccaattgcgaatagatgagttggaggataatttcaggatacattaaactgccttatcaagtcacgagattctttattacgatagtatagttctgcctgatgagatcagaggatgtactcttggtcatccatccatcttctttgttgtgtgagtgcattgtaaccaacatcgtgtggttcttcaatttggctgactt

SEQ ID NO: 102771 - DNA, 741 bp, Cannabis sativa
gtttgggggtggggattttaatgagattcttttctcctatgagaaaagtggtggttcggtccgtgctcagagttttatgaatggtttttgtaacgctttggcaaaatgtggtcttcctgatatgggttatgaaggagctcgtttcacgtggtgtaataagcacacgaatggctctttcttgcaagaacgtctggatcgcatggtgtgttctagtagctagcattcaatgtttctgaattcttatgtgtcacacctgaagcgctgggggtcggaccatagacctctcttgacttgtatcctccgtgcttgtgaatctaggagacggcctaagcaaaaaggtcggtttcactttgaaatggcttgagcgaatgatcctggttgccgggaaattattgcttatctctgggggtcatctgagtcgactgatattggtggtgtgcaacagaagattaagggtgtttcaggggttcatggtatggtttttaagaggacacgcgaggctatccgcaagaagaagaaggagttagaggtgcttgaatctaacttaaatgatagtaattggttgtattgcaagaaactggaaaaagagcttgacgttctgctctacaaagacgaaaagtactggttctctcatgctaagaactcttggttgaaattgggtgacaaaaactcacctttctttcatcaaagtgctactcatcgtaaaaagaaaaatgttattggtggcatttttgataagaa

SEQ ID NO: 102772 - DNA, 574 bp, Cannabis sativa
tctaattcaattaatcaaagagagttccatccaatccaaatctcactctacattctttatgtggtattagatttcagtcatccatggcgactaatgctcccttttcttcaactctagttcttgcctccttctacgcctcccctagtgattctcgtgtctctgcttctctatttgcctccactctcaattatgtggtatcggtgaagtttaacagagtcaaatatattttcttggagagctcaactggttcctgcgattcggggctgcgatcttgaaggatacgtgtttggtactactcctccacaacctcaaaattttcagatcactaatgaaaatggaagacacgttctcatccctaatccaaagcacatggtgtggcatcatgaggatcaacttctactcaactggattatctcatcgttgactcttcctatttccagtcaggtggttgactgtcgtactaatcatgaagtttagaaagctcttgtaactcttttctcctctcgtagcatggcacgcatcatgcatccgaagaatcaacttcagacatccaagaaaggaggtttgacgattt

SEQ ID NO: 102773 - DNA, 684 bp, Cannabis sativa
agagtgcaacataattcttgcaaaataaaccaaattaaagtcaaactaaatattttcaattgtaaaaatatatttcattatttacttgaaaatattaattaaagtttaatttattttaacgtttgagaccaataaatatgcatttttcaccaccaatcacaactcccaaccggcttattgctagtccctagcaattcaagcggagaagaaaattatcaagctgaataatcaagtcgaaccaaccaaaactagccaagcataaaaaaaaatatcatcaagaaattcgaaatcgctatgcaaactactcaattgtaaccccaaagttgtgtgtgtgtacaccaaaccatatccataacacaaatagtatcgaaaaatctcaaaagcgtaaaggtctcaactccaatttcctcacaggcattgaaagtatttttttaatgggagagatgactctcttggagttggaattgtaacaattaacgctcaaataagagaagacaattattttaggacaaacaatttgaacaaatattgatcacaagatagaaaaattaaataattagaatttaaatgacaaacaacgtttgggatttacacaagagtctcgaagaataaatagccaacaaaaagaaagttataaatatagaaaagaacactttttttttaagaaacatatgaagtgatgtt

SEQ ID NO: 102774 - DNA, 655 bp, Cannabis sativa
ctcaggcctctatttacctagacatattagttaagttagtgacaaagttttttttactttgtaactaaccctcctaactctgcactcctctacatcagaatatatatagccagaaaatcaaaacacatggcagaaaaataacaacagatccaaatcagagagattcaacacaacagatcagtacaaacattaacaatagaaaatcagagcaagaacaacaaaaggaaaaatagatccggtttttataagagaaaaaaccgactgtttttgggggcttcttggaagaggcttacaatggtgtaagctttggaaccaaggtggtggttcggagatccaatagtcaggggtgtgttcatgcatcaaagaagagaaaacacaaagtcagtactgtgattggagaggacaacagagaggaaaaataagagaaaatcattgtaatatatatatatatatattcggattatcgctcttaccattgtgagttggaatccaaactttgtaactcttgaacattgaagattcatagtggaacgaggcgagctcgaagaggacgtacccgcacaatttcggggaacctctataaaattttggtgtgttctctccattttattttctgcatttaatgttgtgtgtatactgtttttggcttgatttt

SEQ ID NO: 102775 - DNA, 960 bp, Cannabis sativa
aagagagggttcgcatacttaccagagggttcctgttatagtgctctatttgttaatctgagttttatagtatttccaaccactctttttgttttttagttaatatactaattgggtcacgtgagctcgtactttaaatattttttcaataaatttgtaacatgttgattctttgttttggtcttcaatgttttttttgtaaattaataagagccaaaattatatattgattttgtgtctcttaacaatatttagaatattttacactttctatttgagaaatttgattttttccatgcatattttaaggtaaaattagttagaaaaactaaaagtataggtaattggtaaagtgttcaacatttagttataccccataatatccctcacatttaaaaaaaatatcaacctcaaactatctgcattctctcttttcctctcgctcatcgtcttctcagaccccatcgacccacggcatacccacggcggatcccaatcgacccacgacaaatcccattctcgaccctacactacccatgaccctcgacgcaccgaccaccaaagtgagaccctacccacgacccacgacacacaaaccaccaaagtgagaccctacccacgacccacgacgcacggaccaccactgtgaaaaatgtcaaaggtgagttcgtgttatgtttttttagttttttattaattttgtttttgattttaccgttaaagattgaatgttgctttgtctaaagtggaatctaagttttgttagattgaactgtcggatcgtgatttgggcaagaacttggtttcaagccaggtctaatgcacgcccgatgcacatccaatgtaggtctaatgcgctctacgaatttaagaggtttcgaggttgaagatgtaggtcctatagaggtcgatggtggtctgataggtgtacgattgttcttttagttttatgattttgtt

SEQ ID NO: 102776 - DNA, 532 bp, Cannabis sativa
acttatttttaccgtttggataactattaatgattcttttcttaatgaaaaataattttcaaaatatttgaatattattaaaaaaaaaaagagactattttttattcaaacactcctaaaatgattttttttaattataaaagctaaaaaagagttataagagttaaaccaatctgaattaagatcatcggttaaaaagtggtgtcttatactgtgttaaaccaatctaaatttgacacgtcaattaattttttatttattaaaaaattaaacctttaactaagtgaacaaaagtagtttgtatatttaatataaactaaattaattgagttattaaaattaaattaatattatatgaaacaccattttttaacccacaatcttaattcaaccaactcgggcctatatagaattatttctcacggagtttctgacctatgttctcacaattctctattttctttcaaatttcaatctccatttattcatttttttttcagaaaaaaaagaaataataatagggaaatttgat

SEQ ID NO: 102777 - DNA, 717 bp, Cannabis sativa
  modified_base (290)..(297): a, c, t, g, unknown or other
atatatatatgaaaaaaattattaatttttttatgtgacaaaagacaatataaataaataatagtataaaatagtcatttttctataaattttaaaataaagacatttacttacatatgctatgatttgcgatcatttgttataatttacttaaatggataattatataaggcactattttcaataaaaaaaaattatatttttacgtttaaagaattttttgtttttacaattttactgtttttcatagaaataacacaaaaataataaaaaaactacataaaagtaannnnnnnntaacatctaaataacatcaaaatatcaacaaaaaataacaaaaaatcaacagcaaattaacaagaatacaacataaaaagaaccgtattttctgtaaatgaaataaaaaaaatcgtaaaaatatttaaaattccataaaaccgtatttttataatttttctgttgcttttatgtatttgtgaaataatccctttcttaaattaaaatataattaaaatcatgtagatattacacaatataagagaaaattataagactttacttttttatggcataaataaataaggaattattacatagaaaatataaattgacattttatttacaaaaatacctccctaaggcaaagacaacatttataccttttatgtgattttaattactaaaataccacttacactatcatcacttacacaatca

SEQ ID NO: 102778 - DNA, 637 bp, Cannabis sativa
cgtacaaaataatatcacctctttccttttcattttcttataagtccgcgcttatcactttgtttcctttctctttctttattgcatttgcatggcagctttttgtttgttttttttttctttattatttattatttttgtctgcatctgtgtgtctttctctttataattgtaaaagaagaatttagctttgttttaactcaaaattggtataccaactcatcctactttttaaggtgattattttaatataatatatggtaaatatatattttttcacccttacaataagatacttaaaattaaaagtaatttttaagtttcttttatatattttattttatttttttcaaaaaaaaaaaacaacaattaactcaattttaaactcaaacaacatttaatatttcataataatcttttatttattttatatttaaaagttactatatgtagttaaaaagtaagacactaacatattaattagtgtttctaagtattactttatgataatattatctcatatatatttcattagctaaagaaactaaatagtatcttaaacatcacaaaattaattacattattaaaactttgttttaagtaacaatattttgttatttaagataattctatgtta

SEQ ID NO: 102779 - DNA, 636 bp, Cannabis sativa
cgctcaactctgtataagaacattgtataatcccaatcacacataaaaagtaacatgaatcttttagctcaacctcaaaagtatgataagtacaagatactgaactaaatattatctaaaagcataaaccggatttgtcaaataagaatgaaacaagatcagatgcaagcaaagaacaactcatcaatattgtacaaaaacaagagcaagaaaaattagactatgcaaactcccaaagattttctgagggagtcaaagcgacttgagtctagagccttggtgaaaatattagctgattgtttctcagtatcaacatattctaactgcaaagatttattttcaacaaaatccctgataaagtgatgccttatatcaatgtgttttgttctagaatgttgaacaggatttttggaaatatttattgcactagtgttatcacaaaaattagttaaaacacccaattcaaatccatattcaatcaacatttgtttcaaccataacaattgagtaaaataactaccagtatcaatgtattcaacctcagcagtggacaaggaaatagaattatgtttcttactatgccaagaaaccaaattgtttccaagaaagaaacaacctccacttgtactctttcga

SEQ ID NO: 102780 - DNA, 500 bp, Cannabis sativa
tcaaagtactcaaaccaggagaactgtacaatttctccaataaaatagtaagcaataataaataaatctacagaattcttaatcttaaatcacattgcttggttaataacatatagcataaaaaagttaaggtagatggattagactagcttaaagggggacacatggattttgagaattaaactgcaaaaacataattatacatcacagaattaaaataaccaagtcataaatacaagggtgaacctaaaatgaaactagttataagaaaagtcagtacaacagtacatttgtagctagagtcaccttaatattcaagtattcaacaatactatcatgaaaacctttcttttatttacaaaaaagaatgagactaagttttccaatgtaacactctactttgataataaaggactcttgttgttgaaggactgttaaataatgcaaagaattgaccattgctttctatattctacattcttgacatcaataattgtaaa

SEQ ID NO: 102781 - DNA, 525 bp, Cannabis sativa
ggccacatatgaaaggctggtgaacatgatgctaacagatctcatcgaccacaacatggaggtgtatgtggacgacatgcttgttaagtccaaaatggctggggacacgtggaggacttatgcaagtgctttaaaatccttcacatctacaacatgcagctcaacggcctcaaatgctcttttcgtgtaagatcaggaaaattcattggcttcatagtcaaggccaggggaatagaagaaaacctagacaagatccaagcgcttttagatatgaagtcgcccacaactattaaggaagtaaaaaacctagcatgacacattgctacgttaagcgaatttgtgtccaagtctacacacgaatgtgtatccttctcaacattcttagaggcaacaaaaaatttgagtagatagaggaatgtgatgtgagctccaagattgagcttcaaagctcaaagcttggctaacaccacaaccagccatcacaaccaactaaattcaacctaaaacaacatatgtaacatccag

SEQ ID NO: 102782 - DNA, 956 bp, Cannabis sativa
acaaaagacataccatttttttttattttaagttagatactgtataagataaactattactgacataatactactcatgttcatagcttttggctagactaaagctgaaacaagaaacttaaaaaaaaaagtcagattcatagagcttcaatctcaaccacgaaccggaaccacagatgagcttcaaacaccgccaactagggacgagcttcaatcgcgatcgaccacgaaccagacccgaaccacagatgaacttcaaacgccattgacgagggacgagcttcaaacgccgtcgacgagggacgagcttcaaagattgtcgacaccaagatcctgcacacacacgagagagagagagagagagagagagagagagaaacagataaaagaaaaataaagtagagatattgagcaaacaccttggactttcgtgggatcttcgatcgtcaacaagaaaggcggagaggcagcaatcgaggaggagagacgatgaccaatcgaggaggagagacgaccagttgacgattggggtttcaggtgatggagaactcaaatatgtggaggggcttggggttcatgattggagggggcggcttggggttctgttcgcaggaagcagagagggagatagagagttaggttagaatttttagggtttggttagaaaaagatgaatttatactcatctagtttattttttttaattaattttttagtataattatttatttatatttattttataattatatattttatttattttattaaaataaaaaaggtatatggtgacacgtcacgcgtgtgagcaaacgtatttacccacacgttatgcgcgtccctaaagccacgtaaatcacgtggctttagcgacgcgcataacgtgtgggtaaatacgtttgctcacacgcgtggcgtttcactataggccatagtttttttttttatttttataa

SEQ ID NO: 102783 - DNA, 1234 bp, Cannabis sativa
tatatatatatttgatttgtattgaggatgaaatcaaaagtgattttattgatatgaaattgaatgaattacaattaagaaaagaggccttatataagcaaccaagaaaagaaaaacaaatcccacaaaattagggattgtatcccataaaaatagggactccaataaccaacaacctaaactaaaatgcaaacagaacaaataaatgaaaagaagctgagaagcagcattcttgttacccccctcaagatggaccatagatatcatgaatggccatcttggacaagtgtgaagtaagtatggtggaggggagaggtttggtaaaggcatcagcaagctgaaggttgctgctgactggtataagtcgaatggctgaagttgcaatcttttcacgaacaaagcggcagtctaattcaatgtgcttggtgcgttcgtgaaaggttgtgttatttgcaatgtgaatggttgattgattatcgcagtaaatgaaggcaggagccggttgatcaatgcggagatcgtgaagtaaatattgtatccacgttattttgcttgtggtgggagctaaggcacggtactctgcttcagcagagcttttcgagatggttggttgtttcttagtcttccaagagatgaggcagtcaccaataaagatgcaaaatccaatagtggagcgacgtgtcattggacaagtagctcaatcagagtcggagaagtcgcggagatgaagagaggatgtggatgagtaaagtattccttgtcctggtgagccttttaggtagcgtagaaggtgatgcaaagctgtcaaatgaggtgttcgtggtgaggacatgaattggctgagagtgttgacagcgaatgtgatgtctggccgagacaaagttaagtacaggaggcatccaataacttgtctatagtgtgaggggtacttgtgaagaatgtcgtcatcttgatcattgagacgttgtcgagggtccattggtgctttggccggtttactgtcggtatacccggtgtcttgaagtaattgaagtgtatacttacgttgagagagaaagggatttgagttggctcttgtaatctcaaaaccgagaaagtacttgaggggggccgagagttttaagtttgaatcttgcttgtagagcatcttgtaaatggtgtagaagctgtaagtttggtccaacaagtataatatcgtcgacatagacaggtaacacaacaaaggtgttgtgtg

SEQ ID NO: 102784 - DNA, 651 bp, Cannabis sativa
aggtgccccccaagtgaccgagcagacttatgactcttggtcactttctatactttttttttacaagtatacgttcttgtctacctggggttttaggctcgaccaaaccttttgtatgcacttgatggtaaattaataacatgctaatagattccactcaatttgaattttggaataaacatctttattcatttattgatcgaaaatatgtatgttaccgtagtaacttacatcaaagctattatattgatctactctgatcttagcttaacatgaaataaaacaaattgctgaaattaaaaatcgtactttcaatagtggtcatccgacctgagtacttgaaaattttatctgaacctttgggcgtggtccgcccagaaggccattcacttaagagtaaatgttcttttgtttcgtacttaatatggtcatccgacctggtacttatattggtagtattttcttaaatgttccccattctaataccttggtacgagaacgagttaaattttttcatcatacttacccaatttgtatgcccctgattctagaacttcgacaacctgatatggtccttcctagttaggtccaagcacgcctgtcgtactgttggaagttattttaccaagaacttagatctactcacaagta

SEQ ID NO: 102785 - DNA, 673 bp, Cannabis sativa
aaatataccataaagtatatatatttacattaagtatataattacaatatcgtaatacaatcagaaattaaaaaaaatatatgaatacatatacttgttggtacatatttcatggactttaacaaaagaaatataaaatgaaattaatataccaattagtataaactttcagaaaaaaaaatatcttaaggcatttttacttcttattacataaaatttgaaaaaaaaaaaaaggagttagcttttacatatatatattattacggtaatttatatatttcctcattgcaatctatctatatataaatatatccataagatattgtatacattttaaactatttggttaaaataaaaatctttttctaatatatgctaataaaaaatacctaatacatatatattaatatatacaatgaaagataacacgtcataatataaattgatagtcatgtaataccaggttgtcatttaatacctcaaaatataaatatgtgatatatactcaagtggaatttatattaaaagactatgatgactaaaataattaaaaataataataataaatacctccaagtataaatgtcaaccaagccctaatgttgcacgctaatattcttcaaaagaaacaaatttggtaactttttttacttttaaaatgtttgttattctc

SEQ ID NO: 102786 - DNA, 622 bp, Cannabis sativa
ctagcccttgattcctttttgtaaataatttgataattatgtatattattgaaaaaatctaaaacataaaaaaataatagataattataaagaaaaacaaaggttttttaataaaagtgtgggtatgttgttaacatagcccaatatcagaagcccattatgaattatgatggcagaaccaaaactacaactggaatctatggttgagaaatgctttttttatcaattaattaattaaatttacttttaatttttatttaattgaaatatactcttttttatgtgtattgtattcaaaatatcctaaaatataaaagagtcgtaaaaagtaaagaggtaaaaataatagaatttaaagaagaaagtaaaaataaaagaatcagtataaaaaggtgatatagtctaatttcctcaatctctatatcaccctttttgttctttctcactaactcatctcatcgctgctaccctaaaaacatcatcaacccccttaagtactgctgatcggaggggaagaattccgattgcggggctgctgagtatagctcattcagctgtcgaattcggcttcattaccacctgcgcttcactcattggcgatagggaacaacgggtctttctt

SEQ ID NO: 102787 - DNA, 624 bp, Cannabis sativa
aagagagaaagctagttgtgcaagtgaatgaacattagtactatgaacccacttacaataaaataatgtaataaaaaaaacaaatttcacacacgaaaaatatcacgaagtacaatactaaattaagaaaaacatgttctttaccacccatactttgcacaagacgaagacaattcgaaaatatatcttcacatgacaatagcccatttaaagataaagttggagactatggagtaaagcagttgcttcgacaacaatgggttcaaaataggcaactaatggagtagccgttgagaacaaaacgaatccgacattatcagacaacacaaccccaagtttcaccgctcccacttctgtttgaacactaacatccacgaacagataaaattgccctaactgtaatactatccccgaagatacaatagccaatatcaaatcactaataaaatccataaaactaaatttaaaacctaaaatcttataattggtatataatttaatttaatcactatcataaattatcattacttatttgtaatgccaataccactaaaaatcaaataggagtaatttatttatttatttatttagcttttcttttagtgctttactataattgaatct

SEQ ID NO: 102788 - DNA, 572 bp, Cannabis sativa
tttttgttgtgttatgacagaaaaatatacccaccatatttagagttttcaccttttactgcatctaggaaggaaattatgtaatctactgcattaaatgattcaatacattgttgaagatcaaactaagaatcgttatgagcaacaaaatgtgaaaggctcagactctcagcaggctatttatcatcattaccttttgaaatagtttctcagtatggtaaaatcaagttagcataagaaagatttggaaaattactaagttgaagatccttaccacttttcaaccaagaaacatttgagtgaatatcaagattctggtcgctttcttcaactgtaagtgtttcaactgtaagaatcaatatgcttaaaattacatactcaactcatctaataaagtaaataagtatagaagttgaccaagtaactttttcatacaaacaactataaagcatgattaatctctcataagcataagtaatgattacttaagtttatgtcaaaaaaaaatgattacttaagttgagaacacaatattctatctaacaaaaaaagaaggaaagaaagagaaccag

SEQ ID NO: 102789 - DNA, 1048 bp, Cannabis sativa
  modified_base (505)..(521): a, c, t, g, unknown or other
aatcccaccaaatatgtgtacattgggaagaacctggacgagcagctcaaatagcaattaataagctttttgaaggtgaaccaggatcaattcgcttagagtcacggggataggatagggattgaccctaagattatctgccatcactcaaatgttgacccaactacctagcgaagagacaaaaaaggaggcccttggattccgagaggcaaggggcactaaaacaagaagttgtcaagttgcaagtaaacgattttatacgcgaggtatttctccctcatggatagccaatcctgttctcgtccggaaaccaaactaaatttgaagaacttgtattgatttctccgatctgaataaggtgtgcccgaaagactgttttccacttcccaagatcgacaagttagtggatgcaactgctgggcacaaacttatgtctttcatggacgcatattgtagatataaccagataaaaatgtatgtcccagatcaagaacatacaagcttnnnnnnnnnnnnnnnnntctattgttataaagtcatgccgttcggactgaagaacgccaaggcaacctatcaacgactagtaaatgaaatgttcgtaaatcaaatagggcaaaacatggaagtttatgtcgacaatatgtttttgaaatcaataaggagtaaggatcataccttagacctcgcggaatgctttaaaatattaaaaaagtataacatgaagctaaaccaaaaaaaatgttcctttggagtctcctcgggaaaatttttgggattcattgttaacgcgaggggcattgagggaaatcctgaaaaaatcaaggcattaatagacttgtcatccccaacaaaccctaaggaagtacatgccatgacaggaagaatggcggcacttaacagattcatttcaaagtcaattgataagtgtgtaccggtcttcaacatattgcgaggcaagaaaaagtttgagtggacaaaagaatgcaaagaggcctttcaaaacataaaaattcatctcgcgacacccccagttttggcaaaaccaata

SEQ ID NO: 102790 - DNA, 685 bp, Cannabis sativa
tattgtggatttaagtgggctggtgatcttagagcatatctaaagacacattaaatttagtgttacactattattaaattttgtcttaaaaaatatttttactccaatcacaatattaaaaattaaactaaaaaaatatttcttattattatattaattttctaataaaataaaaaaattaatattacattaattaacaaaaataaccacaattgttatatttaattaataattttcgggaagttaaatttttttaaaatttttcgaagttttgtaggatgtcttaaataactataatgtacacgaccatgaaaaaaaagaccaaaaagtctcttgaattctgaaatatgtaggagtatatcagtgcgccacttttaaagaagtttgtttctggcgtgttaatattttataaatttctcaaaattttataggatgtcttaaataactataatatacactatatataaaaaaatgactaaaaaaatatgttagataccgaaacaaaagtttctcttttgaagaagaataccttgtagacgtaattaactcagtttgattgataaaaattatttttttcagaaaaaaaaaattatcaaaatatcttaaataaaaatattaatacataattttataataatattaaagcaaattaatttaaaagataattatggtagaattatgtatg

SEQ ID NO: 102791 - DNA, 610 bp, Cannabis sativa
caatattaggttgttaaatcaacatacttgcaaatagatctaagattctggataaatataataccaacaggctatacaaggcatcaacagcattctacaattaccatcggcttttggtttactagtctgggattgtaagaaactcatttctgagttgggtaatatttcaataaagtttgtcaagcgttctgctaacaaggtagcgcattatcttgcgcgtagtgcttgttactctccagttcgcattttttctcataatagctcacctttagagctattaagcattgtaatggctgattcaagttaataaaattgtcatattttccattcaaaaaaaagaaaggtattctatatatttatgtttttcatacttataataatatgtaataggtttatttatagcattaaatcatgatattatatatttaatgagtaataaagaatttttaacaatatgtaaaaattcctattattattgtatgtattttacaatgaaactttttattttttttttatgaatggatacaaaatacagcatttaataaagtcatgatttttcttttcaaaaaaaaaaaatgaagttatgatttttatttttacttttattttt

SEQ ID NO: 102792 - DNA, 581 bp, Cannabis sativa
agttagttcatttgttttctttttctttgtttaaagtcaatgacatgccacactataaacaatgtaaaaaaattaagacagtagtgtgtgacatatttatatatttaaataaatcaaaaaattatattaattataatcaacttaaataataatatgtaatattcatttttatgttagagagacaggattaaaatagaaaaatgagttaaataatcatatgcctaattcaagattgtttgacaaattaaaataaaatcatatgaaaaagattgcagcatcataattaacattaaaaacacattttgtttcatccatcacccaaaagacataacagtagaaactattgcagcaggttcattcaaactcgtagcttgagcacttaactattgtgtaaggtgtgtaactgcaatactaacaaccccttcagtcgcaaagagcttgctatttgcaaccactaataacaacgatttgatgacgaaccatcgaagaacaaagaagaactaacaacaaaataaaactatgtcacacagacaagactaagatactcaaaatcatgacacagagacaagactaatcatagt

SEQ ID NO: 102793 - DNA, 848 bp, Cannabis sativa
ctttataatgacacctagtcctagtcccaaaaaaagactctccatccacaatcaatgactatcggcctatcgcgctctgcaatgtggcgtacaaaataatctccaagattattgctacaagattgagaaacatactaccgaggatcatatctccaaaccaagcgacatttgttcgaggaagacacattgctgaaaatacaatgatcgcaagggaagtggtgcattctatgaacaaaagacgaggcaaacgaggatacatgcttttgaaactagatttggaaaaggcatacgacaaactggattgggattttctcatttcggtgctgcatcaaattggtttcgaaagtcctttcatagattggatcaaagcttgcatcaccgtagctgaaatcaaacttctgttaaatggctcagttgttggtaaattcagtccagagagaggactccggcaaggggacccgttatcgccatccctttacataatggcagctgaagccctctcccgcctgctcatcaaaaaggaaaatgaaggtgggctcaaaggcttcaaactcgctcgaaatggaaccccaataacacatttaatgtttgctgacgacatcattctttttggcgaggcgactgtacgtgaagctagatccctcctaaattgccttgaatcctattgtcatagctcggggcagaaaatcaacttcttgaagtcctctgtttgcttctccaaaggtgtctcggccagaatagctcagtcaatagcaacgattctgggtgtgaggagaatgaaccgatcggccacctacctgggactccctcttttccggtcaaccaagaggacagaggatactaaacat

SEQ ID NO: 102794 - DNA, 629 bp, Cannabis sativa
tgttgtttctttcattccccggttatagaatggtttggccgattctttagcttgttcggctagagagtcgagagtgaagactttaggtcttctaagggatgtagcccccctcttgtggctactagttttcttttgtttttcgaataaaaactttacttatccaaaacaaaaaaaaaaagagtattgtgtgcacttttaaataaataaattagggtttaatttcttattttagaaaattctaaaaagtaatctatataatatagtaaaaaaatggcaccataattttcaaataaaactaagaataccttatgaagttttgataattttaatttattatttatgtgtccactaaaaatcgatatctatatctacatatataaattgtctgataattttttatataattttttagagtttttttatgtaaaattattattttttaataaataatttttaaaagtatttatatttgaaattattttattatataattttgttgttaattaatatttatatatgtgatatatactagatgagagttacgtggcgaaccacgtaaatattagttttatataagttctaatggtttttgtttaagaattcagtaactaagcaacggcaacaacaat

SEQ ID NO: 102795 - DNA, 533 bp, Cannabis sativa
ttctcaaatgcattgtaggtatttattttggaagcaaaaagaatgttgataattttgtaataatttccaaataataataataatactagacatatacttaaatatgtattttgtagtaattgcacgaatcaaaggagattaaaggaaccctatccaatttcttaaaaaaatatcttttatacccactttaaaatgacaattaactaaatatttttatacccactttaaaatgacaattaactaaataacccataataaatttactatgacttttcctgaaaaaaacaaatcaggtttttacatgatctttacaaataaaaaaatgttaagggacgaagtgatatattgctattggttcaattcaatatcgagttctacacattttaatttaataaataatataaaaaactgttaatcactcacaacacactatatcggtatagtattaaaaccttaagatgctcaataacaatactttgagttttattagctgttgtttaatatgacctcctctattatttttatcatattct

SEQ ID NO: 102796 - DNA, 772 bp, Cannabis sativa
attatgtaatgttaggataggcagcagggttggtcgccctggactatgcttgcgcctaaagcccataaatatttattttgtccttaaattaaactcactaaatttcaggatcggtcttggtagtagggaagggtagtttgtaataaggttttgaccttatttgtttgtatttttatattttaattaataaagtttttctttttgataaaacaaaaaatattactctttaatatagtttaaatttaaatttattatctcatcatataaatatttaatttaaactttaataatacctaaatatttaaactttatctcctttttcccatcttatggggatcgatagcatatagaaccctaaacatatatcacattactatttttaaatattgaaagttaagtgctgttaaaaaattaacaaaaaattaataaaaaaattaataaagtaacaattttctttaaaacaataatttttggtttaactaattattaattttataattaataattaatatataatcatctgatccaaaatatttcaactatttcatggagtgaacaaaacacatatttaatcccaaaatatataatatatataatatagtttgtgacgtgatcaatatgcttaagtataattttcgataataaatcagaaaatttaaagggcagttgaaaggtatatatatactagatagatgttacgtgtcaattatgttaattttattttagttttttttaatatcataattttaaaattaataatactcaatgtagt

SEQ ID NO: 102797 - DNA, 665 bp, Cannabis sativa
gtagagccaacatcctacaaggaaactataaatagcatatatagatggtgccaagtggccccttataactcaagaatagatgacatcttttatcaagaacaagatctggtgataggctagttttaggtttattttattaagtatttagaggtgtgtttcaattgattatattcatttcatgcataattatgcttgttttctacttatttcaagtctaaaaggtaaaattcataatatgaattgaaaataagaaaaaacatgttaaatgagacgaatataattaatttatcatagaatttgaagttgtatgatataatggcgtgaaataagattctaagttttggatgttcaacacaattcgtttgtgatcaaaaattaagtctgatgattcaagccaatttttgactatgatgcgttcactttaaggaaaaatattataaataaaagttataaatctctctttcagattttaaaaacatcttgaatagtctaattatgagcaaaattgcacttgttaaaccattttctaagtttttagaggtattcaagaagcttcacatcaacatttcttttactgaagccttagaacaaatgtttagttatgtaaaatttataaaagatattttgtctaaggaaagaaagatagaagactatgaaattgtggc

SEQ ID NO: 102798 - DNA, 577 bp, Cannabis sativa
  modified_base (174)..(190): a, c, t, g, unknown or other
tttttttttttttttttaaaatgtattgatgtactatctacttcggcattcaaaataattttttagtctaatttttttttatattcatctagttgtaactatttaagatatcttacaaaattttgaaaaatttgaaataatttacaatataaaaataatattcaaacagtctannnnnnnnnnnnnnnnnataaaatagtcacgcgtacaacatactatttaaacacagttttcggcgtgttaaacttttacgaattttttaaaattttacaaaatattttaaataattataatttacatgagaaatttttttaactaaaaaattatttcaattactaaaacagataaaaatatatcagtgcatcccttttaaaattgtacattatagaatttttctatattatatgagcaacaactataagagtaaagactgaaattaattgttataattaatattaatggcagaaggtccaccattttcattttttttagatattccgttttttttttattatcataaagtctattacacaatgatgtcaattatagaaacgaatcaacaaaaatagccacctaa

SEQ ID NO: 102799 - DNA, 567 bp, Cannabis sativa
atttaaatacttatgtaaattttttgcgataaaaattcttatataatttatcttgttgcaattaatatatagattatttaaccgcaaaaatctttatatagttcatatttgatagtaaaaaatttaatccttatacatttgatgtaacaatagttaatttgtaacaacaaaaggacgaataatgattacataggaacttttatccctaaaaaatttacatagggatttaagagcatctccaatagtaatattttttaaagtagtcaaaagctaccacatcacctaaaaatataatattttatgttatcactctttcacattattttttatacttttatcttaaaatattttaataataagcacctctaaaattattaaaataatattgtattatgatttaggcatcaatatttgacattctttttcactctaatggtaagtatacatgcaaacaacgtattcatgtcatcaaacattctctaaagcatttccactgaagttgcttcaagtgcaacaaaatgaaatatataaagattttggccaccaaaaaatttatataaatattta

SEQ ID NO: 102800 - DNA, 514 bp, Cannabis sativa
agtatttataggggagatctattgactctaattacaagctgaaaccctacttgtcccaaagagacaggtaagatgttgtacgtctacaagtgacatcttgtaggaggtggtctggtgccgtagttgttgagtgtcaggtggtcccatcattcagaagcaatgtacctcttgttggagtgttagggcatgcaggcgagatgcctctactactcgtactatatgtacactactacaaactgtacttttgatattgattttaaactgactgatatttttactgaaccgacacctattccataatgacaaaaagtttaatttagaatcgacactatttatttttggtgttgttttacaaccgacacttaaagtatatatattttcttttagtgtcggttttaaattttggtatcattttatatgagaattatagagagagagagagaaaacagaggaagagaattattattgctctgattgtctaattgaatacaaatgagggactgagtttatatag

SEQ ID NO: 102801 - DNA, 1074 bp, Cannabis sativa
aaaaagaaaagcaaaagaaaaaaatatatatataaaaaaaaaacagaaattatatatatactataattagctctaaataattgtcatggtgaaatttagattgtgttcttttctgtgtgcagagaacctagtgaaaaaggctgtggaagtgaagaagttttgaattgggcaaaatcattaagtttggggtggcaggttgctgttcagttgctatagcaaaagcttagcaagaagtgttttggtactaggctgatcaaacgaactggggtttgaaaaaaaaaaaataaataaagtgaatggtctgtcagaaaaaaaaacatgtgattgccatgttgttcatgatgcaatcattggacaattctatttttgttcatataatcatttggggtgtacttagttttgaattgagtgagcccaattgattttggagatacaaaaaccccactttaatcagtttgggcctgatgttttttttggtcaactgggccccagccaatgttgacccgcccacttagcattcaaccctagactgcacccatcctcaccatcacattcacttccctcttctcagccgtttgccattctcctgagcccgtagccaccaaattgaaaccacccttcgatttcgcctgaacccctagcaactcgaaccaccactcgaactacccacaatctcacctgaatcagagcttccactcatcatttgaaccaccaaatcgcaccagctccaggctcttcgaaccgcaccatcgcactgcccgagcccagttccagtcgaccctcactcaaccgtgcttccatttcacctgagaccgcaccaccaccttccaccgtgaccacctgaaccagcaccatcatccaaatcaccagcaattccacttccaagttcgaacccagcatttcatctccattcaaccgaacttccaccctcactcgatactaatccagtagccaaccacgacctcaccatcacctcgcaccagcagctcaccattcgaacctaacccagttgaattccacttctgttcgcgcacacacagcacgcatcaaatctcacatacagccgagccttcc

SEQ ID NO: 102802 - DNA, 769 bp, Cannabis sativa
  modified_base (150)..(153): a, c, t, g, unknown or other
  modified_base (225)..(234): a, c, t, g, unknown or other
tctagttttgatatttcagttcagtttgttaaacgatctgggaaccaagcggctaactggttagctcgttcttctggttcatgtcctgatcgtatttccagtaggaggtctctcccttctggtttggaagctattttgttagctgatttnnnntaatgaaagttgcaatctttgtttcaaaaaaataatagtatgatatctgatagaggaaattacactctatannnnnnnnnnattgtcctcttttatttttactctcttttttaaagtctatcatttttacctccttttttaaacattataccaattttgcccttgtcacttcaagatactctccatgtggctctcttatatcaggatattttgggtacaatacatataaaaagagatatgtttcaattaagtataaaattagaggtaaatttgattaattgattaataaaagtagtaatttttaacttaaccctatctgatattgggtaccatgagtaatctttaataatattatgtatcatcttttttttttcttgaataaatatgatttttatcttttttttttttttttatgaaatatgatttttatcttttgaactatgacttttgtaaaaatgtcccttggatttttttttagttgcaaaaattccaccgaaccatgtaaatagttgcaaatatccatgttatactcatattttaggaagcaatatggtggaaaataaactagctcaaatattaaagaattaaatatgttgtatattgcctcaaaaaatat

SEQ ID NO: 102803 - DNA, 628 bp, Cannabis sativa
gtccgatggtgtccgtccgatggtccgattgtatggtccgatggtccgactaggggtccgatgcacactatcaatcggaccatcggaccaatgcagctcaagaccttgccttgttcattcactgtttctaatgtttagtattttttttattattgtattatagttttcttttgtattcatacaaaaaaatgtatcctttctcacaaacaaagaatgtattattctttcatttgttcctttctaccttcaaaaagatgtattctgtcatacaaagataaattgttgtaatactccctcaaatgaatgtgaattgttatttagacaaatgtgtactgagttatatatatatatatatatatatgtaaaaacatgtttcttttctttatttcgatttcttttggtattcatcagtatgaagtggattcgtggaaagtgatagagcaaggaggttttgccattgtctatagagcagtactcaaacatggtgatggtccgatgcacactatcaatcggaccaatgcatctgacccctagtcggaccatcggaccatacaatcgaaccatcggacggacaccatcggacccctaagtcggaccattggaccttcaccatcttcttccccagatc

SEQ ID NO: 102804 - DNA, 506 bp, Cannabis sativa
aattatactattttaattattattaaaataaaaaactaaaatattaaataaaactaacactacgtggcttggcacgtaacaatcacctagtatatatatatgtgggaaaaagtgtgttataatattatttcaaccaagttattaaaaattctagattaaattatttaaatttttattatctaatataaaatattaaaaaaaaattattattatcaattagtatttttttagctatataaaaatagtattttttagctatataaattaagttgtaaaaatactttttattatattaaaaagcgtgtgaagtcctccgcttcctctcatggcgaagaagaaacgggcgacttcgaagcttgccaaaatcgttgctgatgtcgagaacacctccgatctcccttcgatccaaactgaagagaatgtctctgaagatattccgtccccaatcgcgatagacgaacaacctgccccagtcgagaatgacgaactgcctgcccctgagattt

SEQ ID NO: 102805 - DNA, 576 bp, Cannabis sativa
aggctatttatttttagttagcctaactaagttccaggtcggtcgatttcataggtgttttctctattaatgtttccttttggaatggttttacgcttgattttctttgtatcaggtccccgagggattagagttcaaattttatcaattgttgacaagacggggtattctggagaaaaatctgcggaagctgtcaaaatagcttcagtagttgcgaccagctagacctatggtcgcgactaggaggctaggtagagacatggtatttttaactttgcctatggtggcgactaggctttatttagtcgcgactatgggcaaaacacgagatttttgacaagttttgaatttttgccattcagaggtagcaaccctaatttctttttaagggattcgcgttttataacaaaaatcatcagagatacccccgaaaagttaaagaaggaggagaggaagctattgtgatgatccggagcgcaatcaccaactagttctttcttaattcttgaattttatattaatttctattttagatttgattatgaatgttactatggattttatgaactaaactcc

SEQ ID NO: 102806 - DNA, 995 bp, Cannabis sativa
agcatcagaatgttggaaaaagctgagtggcagtgtcaagatacgatcaacatctaaaggagagaaccattgttgcagaagagggacattccaaacacattcttcagtgattaaatggctgaccattgcatcagcaggacccgaaaaaagagtgagagtgaaagtatcacagccaggaatccaaggatcagttgcaatcctaatctgtcttccttcaccgattttccaacgcaagcctttaaggagcaaatcacgtccccaaacgattccttgccaagttaaggaggggctatgaccatgaggagcgttgagaaaatcattattagagaaataacgacttttgagtaattttccaagaagggaatcaggtttctccaacagccgtcatgcttgctttgctaataatgcttggttaaatttgctcaaaagatcgaaaacccatcccaccatctattttcgatttacacagtaagttccaggccctccaatgtatttttgatccattttcattcgattcccaccagaaattagccatcatagattcaagctgattacccacataggctggaagtcgaaaacaactcatgatatatgttggaatagcctgaaccacagctttaagaagcacttctcgtcccccagctgaaaagattttccatatataatattaatatatacacatattctcattcacaaataattaagaaaatatgtttagagcactcacaatagctaatataatatagctacaaaaattaaaaaatagctaagagttaaacaaaagttcaaaaaagcacatccaatgaatgaactaaaatagctccaaagtatatcttatgaatagtgcttagctaaatgtagctaaaagttattttagttttctgcttagctataattttttattattttttataatgtattttatttaattgttagtgtaaaaataaataaataaatattatgtaatatgtaatatttattatattatttaaatg

SEQ ID NO: 102807 - DNA, 768 bp, Cannabis sativa
ttctattgtgcaagctttcatatttcttcctccaaatgacattaatttagaaaatgaaagaggataaagtggtgcgtctgttcgtgattcgatgtgagtttgaccaggcgtcccttcgattttcggctaattaatgctctgaattaattaattcctcaagacacgtttccctttgcacgcctttgaatcgaagcgtctggggattttgaattgattacttcttttcacaaataagcctataaatagagttaaaaacttccagaaattactttcaccattttctccacgaaacaaactcagagcaaaaaaggaatttccttcaagtctatcgtgggatttctagcagaggtatccgagcagcttcatctggactacgtttaggcttcaaacagtgagtaagttttcaatctttttctcttttaactttgtatctttaatttatgggtttccactgtaggaaatacaagtgttcttgacttattgtggaagatacatagaaaatctaagcttgaaaccttgtaatttcctctgtaatggttcatatggcttcattatttatgatatcttgactttaatctcgcaatgttcgattctcaccttgctcattcagagcttcgtggcacttagcctttgacccaaaaatttcaaactcctaggttatgacttaatatttatgcatttttcgcctttttaatcttttgagtagtcctggtcgggatatttgcctattttttgttcaatatctcggccaaacactcatcttgtgtg

SEQ ID NO: 102808 - DNA, 618 bp, Cannabis sativa
tttgaataactgctaagttcttacatgtattcatcagtttagtcctttgtccatgtttaccatggttgtcatcaaagtttgaatttatattcatgatatggccactgagtaatttcaaagagatactttatgattacttgtaacaaaataattttattaaaatgaattatattttaaatggaatggtagatgaaatacaacagaatcagctactggcaatagaggcttaagtactcattgtaccaagtgtttttatcagggagttgttaagatgccaatttataaacccttgttcctacaagaactttaaagatatacgaaccttcacagttcgggttaaatactcttactataggatcttgtatattagcaaacacgcatgaaaacactaaagttctcactttaaaaagtctttttcaaactcttttgttgaagtgtctcgttatttgatgttggtatgcatcatttataatttgtgaatcagtccatttttcattgagcaaatccaaggctactctgagtagttcttggttgtagaattcttgcctgtgtgtcacaatgttaacttatactgaaaacatggcttccaagtcaaatgctaatgaaaaaggagtatgt

SEQ ID NO: 102809 - DNA, 879 bp, Cannabis sativa
  modified_base (307)..(319): a, c, t, g, unknown or other
agactcttcatggcctcctccatgaccccaaactcgaacatgacgtacccatgatcgattaaagtctatgagatgcgactggtctctgcagcaatctgacaatacaagaaaaaggagtaagtacgggggaccgagtgtcataaagaaaaggccaagaacatttacagagacttacagcggtcatagcagcgctgatatcctgaatctcatagatggagttcgtggaagcgcatgctgcatatcttttggccgggagttgggtcaagttggtgatgaagtggctcgtcaactcggaggcaaagggagnnnnnnnnnnnnngacgaagcagttgaacaagtccgtcagggtgtccatgttcaggtctcaggcattcttataagcctcgtcatgcaaggaattctcctgggcctctcgtaagacctttttcaaagcctccacctcagcattcccctttgtatactcagccatagcataattttgcttgacgatctggagttgctgtctctcctcatctgcgggaacgggggtaaggacgatgctcggaggcagagtgtattcctccgcttcaagtggaatccccaaatcagagctgacggccgaagtatccaccctcctaggctttttagaagacttagcctccaccattttacccttgcgtttttggtccaagggggccaggatctcaccctcttcctcttccttctcgacctccccgtctccgtcaatcaggaagatttggcctaaggggatgctagaagaagacctccctagcgtcaccgtctggtcagacacaggaggaagggcagagtcaggactataggtctgggcaagagtcgccaaaagctcctccattggcttggctgcttcaaaaagacaaa

SEQ ID NO: 102810 - DNA, 741 bp, Cannabis sativa
  modified_base (151)..(155): a, c, t, g, unknown or other
tttgtctaatgtcattcaattttactaattctgtgtttgtttatatactaaatcatgctccccaaattttgatatctatgcccctcaaatttggcatgtactgaatcataccacctgaactatcattcatgttagacttttcttactaaannnnnacaaaaatccttaaattcaacaatctcaatagttcaagggagatttttaaagagcttaaaagttcaagaagcataaattaatacatgacaaagtttagagaacaaaaattctaattaattaattagataagttaacatttttagagcacttatattaggtgagttaaatttgagctattataatttattcactaaatataaagaaaaatgagtaaaaataatcttttattaaatgagctaaacttaagctataatatatctttttttggcttaaagaatatttttttacatggataaacattatttattgagctataaatattatattaattttttaattttttttaatatatgtgtatgtaatatcattatattaatttatttgatttttttaaaaaaaataatataatatattaaaagtttaatatttaaataataaagagaaaaaatagaaaaattgatcatatatggtgtattataaatggatgaggtaaaataaaaaagaagttaaaatgttggtaaaacattttaaataattgagtagaaaacctatccactaaaaatcatgtgatatcaactaacttca

SEQ ID NO: 102811 - DNA, 677 bp, Cannabis sativa
tataaatatggccttctgaaaatgaatttaagggggaaaaccgaatttttttgaaaccctttgaaagtatgttaaacttggggagcatatttgttgctgcctttaaatactttctttcaaagtctttggtgcactatacttatatacaacaagtattatcaatcacaagcagtccaatcaacttaaaataatattttattttacaatcaatgaaaagtttaaagtacaacaagtaaacatgtgtccccaaatgaataaccacacatagagtcagtttggtttcatgtaattatagttggaatggaatgaactttatttttttttttattttatgtccaaataaacatgtgggccgaaattaataaacaccctatacactagtttttctctcttcattgatttcttaatttgtatgtttatttcttttaatcatatcacagcagttattattaaaataataattattcatattaataattacgtgtcattatttttatgtattttagttaattattaattttgttaactaattatgtgttttaataatgaaaaaaattcaaaatcatgcagcacaacatactgagtgacacttacttgtacacactgtcggtgtttatgggtccaatgacacatagtatgtaatcaagttaggggtagtgtactggactcactattct

SEQ ID NO: 102812 - DNA, 765 bp, Cannabis sativa
  modified_base (46)..(47): a, c, t, g, unknown or other
taaataattgtcataattaaacatgattaactgctaatttctaaannaaactaagcggtctttacaactggtgcccttgagtaatgctacacaacttgacaaactatcaccaaatatttctagatgggagttattttaattttatggtttttatttttacactttattaaatcagacctttttttttttttgcatttttaccaaatttcacatagaaacccttatagaaactaacagagcaacttaaatcgcaaccaaaatctgtaagcaacccacataaaaaccacctgagaaactcaaacaataaatttaatttgaaaaaaaaaagttaaaaaataatatatgaaatagttttcatattttttaatcttcatgttaactaactaactgttttgacagttggttagtgttagttaagtttgttatttggtttgttagcttcttggttgttttgtttgtaacagtctttacttttcaatgtgtatataaactctcatttggtcattaataaagattagagtttttctgattttctctctggttttagaacatcctctgttcttctcttttctctctactgctttgttcgttcatggtattagagcccttgacttgcgtcaatggcttcctccggtgaccactcgtctcaagctggaggttctgatcctgtagtggtgccagctcagtcctcctcgacggcaccaccatggaatccgtttttgaactatctgacaacttctgttactttgaagcttgattgcacga

SEQ ID NO: 102813 - DNA, 654 bp, Cannabis sativa
gctctttgctccagcaagtgatacagttttgctttcatagatgcaccaatatgtcctcgtcccaaatgatactgaattcaaatgaaacagttaataacaggttaagtaaaagaattcaatcaatgggcaactgagtcaacaaatatccataagcatatgattaatctcaaatatgcatgcttgatggtctatacaaataaatggattctcttgtaaatattaccttccaccaaactacatttagatttgactggaaaacaggaaagtatggtcaaagttcacttagtaaatgggaaatttatattcttcataatgatactaattggtaatatttacttaaatgccataaacaacagacagactattttcatgaacagtcgagactcacaagtccccaaacaagaacattatttattacctattcactaccccatttcaggagaaccatggccaaaatttagccaaaactcaagcataatgaatgttgttaagtcagtgaaacaagattaaaggataaccaatgataatttgtatcagaatattgtctgaacaagcacagaatactccataaattgcttaacccatgatatgaattgatatgaacaaaccaaaaaaataacaataaaaaacaaaactaatggcttgttagttagg

SEQ ID NO: 102814 - DNA, 1140 bp, Cannabis sativa
ctcaagaagcttacattaatcgtgtgctcaaacagttcaccataaatttgtgtaaggctggttctgttcctattttgaaaggggacaagtttactaagcaacaatgtcctaagaataacttggaaagagaagcaatgaaaaatatcccatatacaactgtagtagggagtatgatgtatgctcaggtttgcactcaacctgacattgttttcgtagtcaatgttcttgggagatatttatctgatcctgaccatgatcattggattgtagccaagaaagtcatgagatatttgcaaagaacgaagagttttatgcttgtgtaaagcatgttgacaatcttcgagttgttggttatttatatttagattttggtggttgtgtaaatgatttaaaatcaaattatggctatattttttactttggttggtgcagctatttttagaaaagtattaaacagactttaatcacatcatctactatgtatgctgagtttgtcccatattatggggcatgtttacaagctttgtggttaaagaatttgattttagagatacgactagttgattctatttcctcttctatattaatatattgtgataataatactgttgttttcttttcaaagaataatgaaattagtagtgcttccaaacatatggaaataaagtatctcattgttacagacttggccaagaaaggagacattatgatagaattattgcaagaccaagttgatgttagcagatcctctaaccaaattattaagcgtcgtgttgtttaataagcatgttgttgatatggacattttataatcttttgtttctttgggttagtggaaatttcttgttatattatttgagattacatttatatgtaattttcttattaatgttatgaactacttggtttgttttgtgggctaataatttttctattattggatgtttatggtttcaattgtgtttttctttatattctcgagaataattgaattgaaagcatgtagttcatatcttgttgtgattattatcctttaagtttaattgcttaatgacggtgatattttgttgccttaattttttaagcatgtttagtggtactaacttatttattaaactgactcatttatttacagggtca

SEQ ID NO: 102815 - DNA, 564 bp, Cannabis sativa
gaaagacttttcagatgttctttgtggagaagctgcggcctgttgcttggcggtctccgtagccttagagattggctcgaaatttgtgattgtggagaacgactcgagtgtggtgatcaatgctctaaatgggaaggtttctcgctgggctcttgataattacatctcattttgtactaagaattctcccttttttattagttgtaattttgtttatgtgagtagaacttgtaacttcgccgctcacaatgtggctagatgggcgttcgctcatcaggtttatgggtctatcccggtgtcggatctaccaaacaatatattgtgtaacgaccatgaggtctaactatttcattttataatataaacgctttttctcaaaaaaaaaaaaaaagccttttttatttcttgaaacagatatgatgttgtcgtttatattgcacatcgtcgtcgtcgtcactatcgtttcgaaatatgtattatattaattattaattaaaaaaaaaaattagtgctcaaaagaattttgcctctccctcccaacccaaccacaacaacagaaaaacc

SEQ ID NO: 102816 - DNA, 566 bp, Cannabis sativa
tttgaaggtaaagtaacccttggatgcgatcttggggatatctacattttgaacatggataatgtgtccctcaaagcccgccaatcgttccctatttccctgagtaattgatcggatggggaggttcagaatgcgtccactgagtggaaatttggtgagcactttgtcccaatcttgtgggattccttcgaatttctccagaattaaggtgccattgttaagaaaccatggattcttggccaaaattcgattcaaatcttgagacgatttgaatgaaaataccaggaaacttggagatttttttgtatatttgatttcaactctccaatttctttcggagatcccccagactcgtcccaatatagtctataagagtgagcgactgatcgggcgatttgagcaccatcgtcccatcgcacaaagcgatgccacttccgaacctccagatccattgacttcccagccttggtcttccagcaccgacaggttcgttgttcgtgcacggaggtcttccatggtagtgtccggttgttccatgttcttaggcttttccagcattccaggga

SEQ ID NO: 102817 - DNA, 520 bp, Cannabis sativa
attgcttcatctttgtattttgcttctacttctgctgctgctctagcttcttctctcgcttgctctgctgctctcgcttcttctttggctttctctgctactctcgcttcttctctggctcttgcttctgctcttgctcttacttcttctctgattaacgctgctcgtcttgcttcttctttggcttgagctatcgctcttgctctcgcttcttctcttgctttaacttctgttcttgctctcaattcttctctggctttagcttctgctcttgctcttgctctcgcttcttctcttgctctcaattcttccctggctttagcttctgctctttctctcgttctcgcttcttcttttgctctagcttctctacttgctctcgcgtcttctttagctttagcttctgctcttgcttctctggctttagcttctgctgctcttgctctcgcttcttctctggcttttgcttcagctgctttggctctctcttcttcttccttctaagaattacaacattaga

SEQ ID NO: 102818 - DNA, 842 bp, Cannabis sativa
tacttaactaatctttagtggtaatttgcctccctgtggatacgacaaagcccgtttactaccgcgaccgcagtgtaactaattgggcgacatcagtagttcaacaaagcaaagttttttgtgtgttaatcatcttatgtttttatttgttgtctatgttgtgtttcaagtctaaattcgtgggaagctttttgttttgtttaattttaaagttttggaattatttaattaaaatgactttcacatcattttaatgtacttgaatgtgtaacatgtaataagcattaaaactaaatatatgagttttacactctctcttaatctgttatagggtgtgttgtttaagtaatataatttatttcaaaaagtattcttgttgtaaatattatttgaattaagttgtttttagtgactttaggtaatgataatatatgattttaaatgtgtagtagaatttctattgctctattatttttctatagtttatttgcgtgaaaattacataaaatatgagatttcataaaaaagttagaaaaatatggtatttataagtttgccactcttgtatgacattttttcacatttaaaattttttatggtatttgatatgccatatttttataaacctattatctaaacccttattttatatttttgtttttagcttaattagttctatttttttttaatttattttacatttacattttagggtttctttctatttaggaaatttgcaccaaatactacctttgtttcaaacattacatttttaatttgacaaggaaattttacttttatactttttttaattttttttttcttttttactgttttttact

SEQ ID NO: 102819 - DNA, 751 bp, Cannabis sativa
caaaggttcgtcttgtcttttctttatccctaaaagatcttcaaatcgtgaaggtatttatcttggagaagagaactagatatagaaatctcgggagaattcttcccaagaattaaatcttctttgggtctgcttgaaataccagtgtttagctatttcagtcagagttgctggaaagattcggcatcgcacatctacatataatttttggagatctatttggatctcaaagtatttcatatgtactatggaatcttctttccctgtatacatcttagttaacattcattttataattttgtttatattatattatacgataactaattagcttttaaaataaaaaaaaagtatataaataatttatatgtaaaaagtgtagcttgttctattacatgacaactaattagttttaaaaataattgttaaagttagctaaatatattttaaattataagttaccacaatataacttaaacattactaattaattactaagatgtatacagtagatctcaaaaagtggtcaatcgacaacgaagtcgtattaacactgatgcttgccacgtgttacacaattagaactataaagtaaaagaacaaaaggatttttatataggttcaacctccttggttagcgggtaatgacctactctcttttttattatattgataacgagagataatactatatagatcactatagatgggatctaatatggctctttttaagattataaagtgaatcagt

SEQ ID NO: 102820 - DNA, 710 bp, Cannabis sativa
aaatttaagatgtcatccagttaactacaaccgtgggctgtttatgtgtacactcgtgtacacatgacacgtttatattgatacacctaatattttaatgtcaaaaatatttcaaaattaaataaaattataaaaataaaaattaaaaataaaaaatattatgaattttgaaataattttttataattttacaataataatattgagtatatcaatataaatgtgtcatgtgtacaagagtgtacacataagcagtccctattggcagttaactgtaaaaaaattgataacacattaaatttgctaatagttcagtagtttggaaggttttaccaccaaaatttcaataaggtgcatcttgtttttcggtagcccaagaattccacggttaagcgtgcttggcttggggtaattttaggatgagtgatctcttgggaagttttctcaggaagcgtgtgcgagtgtggacaaagtacgctgaaaacactcgtgttggtctgtagggtcaatcgtcagtccataaagtagctatagtgacgtactcgtgtataagagccatcattgcgtgggtgtaagtgcccaatggaggcttgaagcggggacattacaaatggtattagagccttgaccaacctagaagtgtggtcgacgaggacgtcagaccccgtaagggggggtgattgtgacagtcagtagtctcgtgatccgta

SEQ ID NO: 102821 - DNA, 618 bp, Cannabis sativa
tagacatgttgctttgcgattggctagcgatactccttaaaagttattacattaaactatacaggacccaataattagttagactaatgaccatattaacacataagagggtactagacaccacttgtattttttagtatttctctaagaaaataatttttaagaaatattactaataaatcgtaaagcgcacctatagaaagtgttaggtaccccaatagcaatgctcttttaaaaaaaaaatattaaacatggttagaaaactgcttaagagcacatgtggtgtctagtgcaatatcattattagtacaattcaatatcaaatctcacttattttaatttaataaaaattctaaaaactcactaaacatcatgtcatcaagtactatgcaccttaatgcctcatatcaatgttctaacttaatccaaatgaactaagaataggatggatccacctaatcccctttttaattatcaagaaaaaaaattaaaaaaaaaaccctaaattataaagaaaagggtaaatattattttggaccctgtgttttgtaaaaattatcgataggaccctttgttttgttaaatgacaaaatggatcctgtattttctaaaatagta

SEQ ID NO: 102822 - DNA, 534 bp, Cannabis sativa
tcattaaaaagaaactaacaagtatattttattctaaaataattaacttaaaaataaaaagtaatacaacagtattacattgatcaattacaaacctagaaaaaatctacttaataaaaaactaatacaacaaaaactaattagtataccaacaaaaattataactaaaaatactactaaatcataaactgttaataacatacacattaaaaataaaaaacacactaaaaaacctaaaagaacaaatatatatatgattcagtataaacaaacaaaagatactaaccttcaatttttttggcaacacaataggggcttcatcacattctaaattaaaattatcatcatcttcaacaacactctttaacttcttagagcaccgatcgtcaggagaagcctcagatacaccactcctattagaaatgtatgccttcttatttttcttatccttatcagaatcaacaaccttcacaccagatccacccatttttttctaagcaatctcctctattttttctagtttttttttttttt

SEQ ID NO: 102823 - DNA, 717 bp, Cannabis sativa
  modified_base (668)..(692): a, c, t, g, unknown or other
taataatatcattaccttacaaaaaaaatgtaattaatatcattagatattatttgatgaaatagcaaatctttctagattgattcagaaccacaacaacacattgaaagagaaaaaaaaaaaagagattttgagtgatagcaaaaaaaattatatatttataaaaatgacaatttaattcgacatatcaataataaatagtggtaatttttggatctagcatctaaaataaacaaaaataaccactatcttatacaggtccgatcctgaaatttagtgggtcataagaaaaaaaaattatttttgggtccttatttagaaaaaaaaaaaaaaaaaaagtggtattaaaattagcaaaaaaaattatgtaattttaaaaggggaagaattttttttgggtccctgaactaggtgggccctagacacaggcctaacctgcttatgctcagggccggccctgatcttatacgatgttaaagagtcttctatttaaaatagataaagtaatttgtagtcaaaattcttgcattttgagatttggtacgatcaaccctagtacagaaaaaattaggattgaactctccaatcttgataatcgttttgctctgattctttccgtctatttagtctgttaagtgccaaagtaaattttgttgggttttatgccnnnnnnnnnnnnnnnnnnnnnnnnntcagatttacttattaataaaaatc

SEQ ID NO: 102824 - DNA, 564 bp, Cannabis sativa
ttgtataatttaatatgccatctcacttattttacttcgttaaagatatataaaaaatgtttaaccaattagtaattacatgagactacctcataaataatgttactagatatcttgtgcatatatgccaccttattataacaataaaaagtacgaccatgctacttcactatattataggcccacgcactttaactctacaacccatcgattcacaataaaaatgctcccatgggtgagggcaaaaaccatgcccttaacaaagaaaaatcctatatatatatgtatgtatagtgtacctataatattctaagagttaggttatacctactttcaacttctatatatgggtggaatatagtatatgaatctatgataatcgatggatttaaaccgaactgttgaaatgcaaataaaaggtacacataaattttcagagatgtaaaatattgacgccgtattttatgatgtatattaatattatataatgtgagtataattgatattatccaaaactataattttaattgattttattaaaagttagtatatatttaaaataag

SEQ ID NO: 102825 - DNA, 631 bp, Cannabis sativa
ctttcattgattagcaataatattatacatcattggcttcttaccttcatatgaattctacggtaataaccctagactgtattattaacaaactcaaggtactaatttaccgagtctaacttaattatgccttgagcgcataattctttattccaatatatttagcatggcataacactcaaaatcatttaattactagggtattaaccctagaccatataaccgctcattttagggtaataaccctaatcctggttcttaactaatcacaaccataacataaaacatgagtgccactatgcttaactctacgtgcaaactactgtcttacctgatgtcctgcaactatggagattctgattccctgggtgctcctgaccaagtaccaataatcctaatcacacaatttcaggattcacaaatagggttaatccttaaatccattctaacataattataaaattggcattcaaattccaaataagcatatagatctcagaatgagctttctgatgatatttagaacatcccaaacggagtcccgagtcaaaagttatgacgaaaacaaaatccaaaataaatataataaactgccaatcccaaaaaggggactctctctctctctctctct

SEQ ID NO: 102826 - DNA, 702 bp, Cannabis sativa
tgaccaactccccgacatcaagggccttcttgtcatacgtggcgaaggtcttggcccgttgaagaaaaatttgagtaggttcggttggcatgtaaggggggatcctaacccgctccgtgagaagctccggatgatccacggcctggaaaccggaggagaagaataagcggcgacggtattccttcatgtgcttctgataattgaaagggaccgggccctcattcaaaggatgggcccggagaccgtaaaaatcgtccctaagtttatctccctttttagggatggaaacaagttcataaaaatataaaatttccgccagactgggcgagccccagctctgcgcagagtaaaaaataaacaagcctgaaagtaggcggtaagcttgaggaataagttggtatggcgcaaggccgacaaatacaagaaagttaataaaataatcttatagaggaagcatggccccggccatcaggtgtgtctggctccaggctccgaagcccccgtagttatgattaggcgtcttctcgtcccggggtggccggtggtaggtcccggaggttgtaggtttgatacctgccaccaccacaatctgttccacctggtgagggcaggtcagggtagaatgaagctcagccgcttcccacccgttggcacgggacttgtgcccctcttgggccacaagacccttcatgacctcctcca

SEQ ID NO: 102827 - DNA, 527 bp, Cannabis sativa
accattctccttcgtagacatccgacccttggttgtagatcagctgttgcccatggctagcccgagaagtagtctggtcgtggtatcgatcctagtactcgatctccagtggtagggaaccactctgttttcttacggaccgtccttagctgagtcttgtaggtggatgtatcgaatcgaaataagatctcagattgacatcttgatacactaatttaccataataataaatagagtcaatggtgactctaccgtgggaagagccgcttctttcttgcttgatagtgggggcttccattcaccaatgtagactaaaagtgctctccgaaccatgctggatagtcacccatcacacggctctcagacccaacctgtggtgaatcccaggggacaaagtcaaagcgcttgattctttgccccatactttgagatggtcctccctgccgatcaagcagcgacgctgctcgtgataggcttagctttaagccgctatcgttcgatttgaataagtcaagtcccttcggtcg

SEQ ID NO: 102828 - DNA, 768 bp, Cannabis sativa
cacgtaaaaaatcctgtgttcataattttatttttacagcttttatattttttgtgttaaatcactactatgaggctcaaatttggttaacaaaaatttgcgttaacactttggtccccaagattatttgcccaaacacagtcaaggattttatgctaattgcttgttgcaatgttatctttaagattgcaaccaagcttttgagctctagaatcaggaaaatcttacctgaaataatatctcactcacaaggtggctttattaaggggagatttattgggcacaacataatgatatgccaagacttggtgagacattatggaaggaaatccaacaaaccaagttgcatgattatattagatcttcaaaaagcgtatgacactattgagtgggctttcattgaagagatgttgacaggtttaaagttccctagcccttttattgagctcattatgaattgtactaaaacccctaaattctctctcatgttcaatgaaacctttcatggtttttttgaatctaagagagggcttaggcagggggatcctatgtcccccttttgtttgtactgggcatggaatacatatctaggttaatgaggaagataggtgagaaggaggattttcactatcatgacagatgctcggatcttaagctaaatcatttagcttttgctaatgatgtacttcttttttgcaaaaggagattagaagtataagctatatgttgcaggccctaaaattattttccctaacatctagattatac

SEQ ID NO: 102829 - DNA, 516 bp, Cannabis sativa
aattggcaatatggaaaagataattacaatttaccaaatgtagagcctttgcataatcaataggaaagtaaaattgtttccaaacatccttagcatgcctacagcagaacaatgcgtgcccaatcgactcccaagcttgtgtacacaatgaacaaattgtcgaagtcagaactttcttttggaccaaagcaatagccaccggtatagcattatgaatcactctccaagcaaagattttaatctttgagggcagcttgagattccaaaaaaaattctaccattcactatgtgagtgagatgtagaatctaactctttgtcattcaaatctgaagctagatgaaaaccagatttaaccgtgtaagttccagcagttgtgtaatgccaaatgagcttatcttgagttggaaaaaaactcaaagggatggtcaagattctatccacatctatatccccaaaatgagtcttcaacaagggcaagttccattctctggtctctgaaatgaagtgggaaactg

SEQ ID NO: 102830 - DNA, 638 bp, Cannabis sativa
ttggggaagtttcatgtaaacttcctcattgagatccccatgtagaaacgcattgtttatgtctaagtgatgtaaatgccaattgcgaatggctgctaatgcaaaaataagtcttaaggtattgaatttggccacgggggcgtaggtgtcgatgtaatcgatgccaggtaattgagtgtaacctttagctactaaacgtgctttgcaatgttgaagagtgccatctggatttagtttctttttgtatacccatttattgtcaattacatgttggttgggtggaagtggaacaacgatccatgtatgatttttttcgagagcatctatttctacatccattgcattgttccaaaccttgaatttgggggcttgtttgtaggatgtaggttctggtgtaaggctgagtgagagaatagctgctcgaaactcaagagagaatttatgatatgaaatgtaattgagtaaaggatggtctgtgctggtgtttgtgatagaatcacattgataatcctttaggtaacttgggagatgttgtacacgacctgatttggtgcgtgttttgttgtgcctgggaggtgaaactagtggagatgggttggaatttggtgatatatcctcgagaataggtgaggatgggg

SEQ ID NO: 102831 - DNA, 506 bp, Cannabis sativa
ataaataaaatatattaaaaatatttaaatgatgtaaaaaaaaatagaaaaatatgatgtaatttaaaaatttgaggtaaaataaataaaataaaattttgataatacattctaaaaattaaagtaagaagcagttgagattgttcttatattacttacaagatttattcttaaacttgataaaaattccaagaattttcttttaagaaaatgtaaagagcaatttcatatactaaaaattcagatagtcatattagtacttggtactttttttaaaagggtaatatttgtactagattgttaaataaatagtgagttaataaattttcatgggggatttgcagtcatttgggttcaggatttcttttttaaccttagttaaataaagaaagaatcagaattaattgtggttgttccacaaaagtgcttttaaatttatggcaccaacaaaatcgttttcaactatttaattgtatgcactcttcaaaaaaaaataaaaaaattga

SEQ ID NO: 102832 - DNA, 583 bp, Cannabis sativa
attggggcatccctcccccactgttatgcaaaaagtcttgtccacaattcctcataatggcaccatcaacacactacagttttgtcatgcctgccaattaggcaaaagccataagcaaccgtttcctagcagtgattctaaagccactcaaccccttgagctcatccacacggatttatggggtccctcccacatcaaatccaaagatggatactactattacattcattttattgatgactacagccgatacacttggatttaccccctcactcaaaagtctcaagctcttgagatgttcattaaattcaaggctatggtggaaaaacaattcaatttaccaattaagaaggttcaagctgattggggaggggaatatcgaccttttaatcggttcttaagtgatcaaggcatccattttcaacacccttatcccaaaacaagtgagcagaatggaagggttgaacgtaaacacatgcatatcactgaaatgggacttacaatccttgcacaatcgggccttgatttctcgtactggtggcacgcatttcacactgatgtgtttcttatcaaccgtctcccc

SEQ ID NO: 102833 - DNA, 796 bp, Cannabis sativa
ttaattattttatatatttttaattaacattaataaggatttcaaaaaaaaaaaattaacattaataataatactaacttttataattaatttacatcttatgtattagattagagcacaaacaataaaattaagttaaatataaactaaatttaactcaaagtacgccattcatgggtgtaatagcaaaaaaagtagggagtttgataattgaaaatgttttcactttgtttttagttaccataatgacaagttacaatctatcataacatactcacttttccttataaatacattttgctaataaccggcttaataaaaggtggcactatgacaattatagcatttatctttggttttttattgtagaaaataaaaaaaaaaaaaaaaatcgaagatacaaattttaaatatcttatttcatcacttttaattttgcaattaataaaaattttattttattttaagttttattaaaaatcaaagacaaaaattgtgaggttgattatcgaagttctcaaggaaatatttgttttttacaaagtgattagaattatttatgaatttacgatgcactcatccgtcaccggcgctggaacctcctcgaacctggatagctcatcgtctaactgcagagcatgctttgccaaatcatgagccgttaaattctcagaacgagtcacatgagacaaaactgtctccgaaaatttagacaataaaactataatatctttaaacaatttgaggtgatttatatataaatatataaacatgtatcaacgttggaggctgcttt

SEQ ID NO: 102834 - DNA, 531 bp, Cannabis sativa
  modified_base (451)..(452): a, c, t, g, unknown or other
aagtagttgccttgctacttttaaatatctaaacgtattaattaatgcccaaatggaatctttaaggggttgaagtttggagataaggggttagtgttaaatgatataatgcagcacagaatatcttagatatgaaagctaaagtaaagtgaagtaaaagaaaatagtacactgtgcaaaggctaagaaaaaatggagaaaattggcagaggaaaaattgaattggtaatgatactaattacttcctatttgtaagaacctttttatcttgtggaatatagtcaagttattggttattttaggcaaggaatagaaagactactttattacaactacattattttgctatccagagaaatattacttatcatactataatcaattccacactcaaaaattaggggctttctttttgttcatcctcaatcaaatatatatatataaatatatnnatatatataaatatatataataagaatatagataaatataaacatgtggaagaggtttcaatggttacatttttattgt

SEQ ID NO: 102835 - DNA, 800 bp, Cannabis sativa
  modified_base (712)..(717): a, c, t, g, unknown or other
aaaatcttatagtgaatgtaatttcttttttttttttttttataaatgtgagtaatataatttagtaacaattttaaaatgtcaataaaatcattttaaatttgaaaaataaacatataaaatatttttagtaacattttcaaatattactatttaatgacattttttttaattaatcaagagatttattaattaaactcattcaaaacaatagaattcacttcagaggaacaatcctctaactgaggcacacaacctgtagagaaacaagagtctcttgccaagcaatgagccaacttgtttgcagatcgtttaacaaaacataattcaataaaagataaattcctaacatcttgaacaataagaccaaactgtgaggacataaaaattttactttggactgcttggacacacatcaaactatccgtttctaacactacattgtcccagggatgagtcgcaatccaactcaatgcttctttgatgcctataatctcagcaattttgggttgtacatacagaacctttcccttcttgaaagcttctaccatggttccatgatgatctcgagctacacatcccattccaagccggccctcttgttcaaataaagccccatcaacattaaccttaatcttgtttaacacaggtgcaattaggggtgttcacggtgcgggtggtgtagtatttaaccattttttcaaaccaaccnnnnnntgcggtttttctaattttccaaaccgcacccgcaccgtgatactaaaaaactgcaaaaaccgcaccgcaaaaaatgatgcggt

SEQ ID NO: 102836 - DNA, 517 bp, Cannabis sativa
tttgaatgtaaaaatgtaaatattttataaaaaatagtgccttatgtaattattccaaaaatatataactaaacaagttgtctatttatcccaaaaaaaaatatgtaactaatttatgtgcagctacattaattgttcaacaaaaataaattacagacactccttaaaatctgaataacaaacttgttacaaaatctagcttgttaaatacatattctttgacatattgttttaggaatcattttatgaatatggaaaattacaaataaatttatatttttacaaaataatttttttttactgattttttttttcttatagaccgttatttttaggctatactaagaaagattattgtttatacattgcgaaaatatattataatatttcaacaacatatttttccctttaacaatatcacaaatttataaaaatgtaaaaaaaaattaccttcgtttaattttccactcttggagaccgtttgatcttaaaggaaatcttctataattttacacct

SEQ ID NO: 102837 - DNA, 519 bp, Cannabis sativa
gaaaaaaaaaataaaaaatcaaataattcacaggctagtttgaaactccgtattaaattgtattgtattaaattatattttatgtaatattttaatgtaaaattatatatggtattaatttttatggatatctaaatatataatattttaatataaattaaaatataaaataatattatataaaaatataatatataatctaatataatataataggagagtgagagtggttaaatattacattcaccaaccttgataaatccaatagaatactttgttcatttcgtagtcacattgcatagtgtcatcaatagtgtcattttctggagactttagcttaggatttgagatttaaaatatgaaaaataattcacaattctaatctttatgagaacagaaatatttggagataaaacaaaacaatacagttggcagggacacagtgtcacattaaggatattaacactatatattaatttttacataaaatttttaacatttataattccttacctattt

SEQ ID NO: 102838 - DNA, 1106 bp, Cannabis sativa
ccttaggaggctctcaaagctaagtgggagaatatagtactctagagtccttggttttgttttgttaatgcacaaacagggggcagtccctatatacaaggtatggctttatttgagaaaaaaaatttaaaaataaaataaaattggcaattgtagtatctataacttgtataaaagtgtcaatgtttttggactttttcatattgaattacacatatacccttttagaatatataacttatataaaagtatcaatgtttttgaactttttcatattaaattacacatgtaccctttagaatatatattacttcacaatacaaataaattacatgcaaatgataatattttgtattttatttttgtaattttttttttctattacacatatactcttttaaattagtatagcttgtaaatatattcttatcttaacattttttctctatcattttcaaaaaaaaatatatagtaaatttacaaaacatattttgtgcatggccgttaagtgtaaggtaaatacctaagtcatatttttggcggtaaaaataccttctgttagagttctggaacttccgtagatacctgaccgttaagtgccaggtaagtgcccacttgtcatcttctcattggtctaaataatttaattttaattttttaataaaaaattatttaaatattttaaaaaatattaaaaagccatttaaatatataaaaattaaagaaaactaaataaaaaaattaaatatttttttttgaaagaaatataatagtgaaaatataaaaataattaaactaatatagtgaaattaattaaaacttttttaataaaacaaaaatacatctccatcttcaccaaactgaaaacccagaatctgcccaaactccattgtcggacctctacgaacatcggagacgaagctcaccacatttgccgacctccaagaactgtgcttctcattgtctctccgcgaacctagatctcgatctcatccctatcaactcgaataacaaaagggtagaggaaaaatacatctcattttaatcatcctagagtgcggcggtgaggacttctaaggttgggctcacgagggctcgcgagggct

SEQ ID NO: 102839 - DNA, 721 bp, Cannabis sativa
ctggtagagttgatcccttaattgttgaaatctttggagtcaaggaagcattaagttgggttgataggaataagtggtcaaatgctgttatagaaacatatagtcttgtgtgtgttcaagctctttattgtgatgtttctatgccttctgactttaaccttttggctcaagattgtagtgctttattgctcaattgtcaaaacgttgttgtttcttttgtttagcgatctacaaacaaagctgccatgttattgttaggggtcttgtttctcgccaggtcgagttatccgagagttagatttcactcctgagtttattttcattgtatggagggttgtgtttgttaatgaaagtttacattttattcaaaaaaaaaaaaggcttaaaaataatttttttactataacctgctaaatttcaagatcggctcttaatccaccccagctgtgccctggcctttgttgaaggcaccatccactaaaatatgagttgagtcctttgatgccttggatctacataggtttgtcttaaactaaatgggagtcttgggccaaaaaaattaattagcttttttatatgaatttttttttgagataattacataaaacaataagttttataaatttttaacatttttacattcaaattattattattttttttaaatttttacggtattttataaaaacacaagaaaataacaacaaaacaacataaaaaa

SEQ ID NO: 102840 - DNA, 790 bp, Cannabis sativa
aagggctcgtgatagaatgcaagtgactcggaggttggttaacatacgtggctattcgctgacgctgacacttgtcgcatttcttcgcgaagttgaaggcgtcttgccgtagtgtgggccagtaatacccttgccgcatgatttttaaggcaatagaattaccaccagtatgattcccgcatatactcccatgtacctcgcggagtatatagtcgcattctttcccgtcaatgcatttgagtagcggctgactgaagcttctacgatataatcttccatcatagatgacgtatcgggcagttcgatgtcgcagttttctcgcttctatttcgtcatcgggcaagatatctttctccaagtaagtgattatcagagtcatccaagtaacttctctggcaacgtctatctccatcacttcatctcgactcaccgtcaggtgaggtaacacatcaacaggaatcacatcgaggagttcagcttctctattttgtcatcgggcaagatacctaggttgttcatgaaatccgcaaaccgtagtttgaaacacgaaacaatccaaaccaactcattttagatcggactaaaggaatccgtcattgtttggttatctggactgttttcttactgtgcagtctggttacggttttgacattatttctactggtttgaaccaaatcggaccgtttgaattatttttatgtaatatatatacatagttgttgtcgagcaaatttcacaacaccaaaaatgaataataataataattataataagaacaatatgatgaaca

SEQ ID NO: 102841 - DNA, 647 bp, Cannabis sativa
tcaaaaggaacactagcacgtttattgactctatgacttgaactaaggtgatgatgtttagcaaactgacatgattcacaatctaacgaagacaacttagtatattgtggacaaaaaattttaagcataggaagagataggtggccaaacctacaatgtgcctcgaagggggattgtacaccagaacaagcaactgatttaggtattggtgtatcaagaatgtagacacctccaaattcatgtccttgaccaataatttacttcgtcgtaagatcttgaactacgtaatgataaaaaaaaaatacaacagttaagatcacgagtaatttgactgataaagatcaaattaaaagaaagattgggtaaatgtaagacaggcgacaaaggaagcattggagtaggagtaattctaccctacccaagaacacgagatggtgacccatcgactaacgtaacagtagaagtggaagcgtgaggttgaagattagaaaaaagctcgaattgcctgtcatatggtctgtagcaccaaaatcaatgacccatttgaaagatgaggaaaagagacacgaatttggtttacctgaatcagcaatagtagtgatagaagaagatgaatacttaagagacttgatactgtaagaatttag

SEQ ID NO: 102842 - DNA, 728 bp, Cannabis sativa
aataatatttatatatttattttttaaaaaaataaaacaatattaataataaaaaattattaatttataatttgaatttttttttttttaaaaaaagttatttgaattgttttcacataggtatttattttcttaaaaaaaatttacttactaatttacctatcaatttttttatactaataactaattataacagtttttttttagtgtgagctaactataacaaaattgattacttacttttgctactaatttgtttacatacatatacatattctaataatatttttaattaatttactttattaattttttatcaagaaaaataatttttattaatcaaaccgagtcaattacatctacaaggggattcccattcaaaataaaaacttacatctctttaattttttgggtttctaaattcacatcttcttcttctttttcttttcttttttttttttttaaaaaaaaaaacttgtctttatatataaacgtgtatatttttttttatataaatatctatcttcttaataatgtcttattttatatagaaaaatttatatttaatgccagtttattttttttctcctagattattttttaattattttttttattgaaatgtcgcatcactaattaaacagttaaatataacaaaaagtaataaaatggccacatttctacaactatcttatagaagaggtttcaatgattacattttttattgt

SEQ ID NO: 102843 - DNA, 775 bp, Cannabis sativa
ttcaatttatctctattaagccaaactcaaaaaaaattatcatttctctatataataacagaagctgtagattttatatttatgattagtgctccctctcaattgtgatacaatgagccgtgagccggcttacaattgctacccagatatatatatttatgtatatctatatatatataatatcatccttgactttgaaaaatagcacatacacatatacatgaaaaatatgttatcataatatgataatttttttatatatacgagatatcatcacatttgatgataattttatttagagaagttaacgttacaatttcattttcatttaattataaaattaaaaataatgtaactttccctataatatgtgactgaagaaatattatgcatgtattcgttttttttttcctttttttttttggctaaaatactcggacgcataaacaatcactttggaggtttaatgaaaaggcaaatgtgtatataaagagtatatttacataaaataagtttttaagtaccaagaatatatattagagacatattggcttgaataacaaaaaaattaccaccatcctccaataatcataacaggaaaaagagggaaacaaatactcgtaaaaagaattattcatacccaatttcatagatacataaagaattttgtggaaaattgtattcaatgaaagtcatatacacgatttggagggagatatctctccagatccattatataaatatgggttcgaaaagtcaaaataaatctctctct

SEQ ID NO: 102844 - DNA, 504 bp, Cannabis sativa
gagaaaggagtttcacttgtggtgaagcgaggcatggtcttgtatgcccagagtacatttggcagctcatctacccatctgcccttaagcttttctagctttgttttgaggtttcttttgattatcttgttcactacatcaactttcccattagcttgggggtgtactactgttgagaatcccctctcaatgcctctctcaaagtaataggaacttagcaagtccccttcaaattgggtttcgttatcagtgatgattttgtagggcacccaaacctacatattaggaacttattgataaaggataccacttgcttagtggtgatgttgaccaaggcctttgcttctacccatctggtgtaatagtctattgccacacaacatattttgccccggcactacctgttggtaaagctccaattagatcgattccctacatggcaaatgaccctggactagtcatgcttgtgaattcggttggagggcacctgctgtagttggtgtg

SEQ ID NO: 102845 - DNA, 559 bp, Cannabis sativa
tcgacatcatgtcgacattatcaacttagccatgtggacaattcagtgtccacattgtgtcgacatcatgtcgacatcatgttgacatgacatcgacatgaccaacttagttatgtggataactcattgtcgacattgtgtcgacagaaggtcgacatcttgtggacaagatcaacttagctataacaactcattatcgacatacatgtcgatataccgtcgacaaattgtcgacattaaaggtcacataaagcaacaaaactattgtgtcgacatcctatcgacataccctacggcatcctatcgatatacattaacaacacagagtcaaaagttcacataaaaacagagtcaatgataagtccatcgatatcatatcgataaattatcgataaactatcgacaaaccctgtacatacatataatttcgccaaaaataatctacagaatcaagtaatcaagtaatccacagaatgtacatgaacaaagataaatcacaagtaatcaagtaatccacaaaaatctagcaaaattgaacatttaaaatcaattgtttttt

SEQ ID NO: 102846 - DNA, 552 bp, Cannabis sativa
tattataatcccatatcacattaaattaataatttttttgggtgaaaaataattttttttctaataaaaaaaattttaaaaagaaaaaaaataacatgtgatcattatttatattgagcaacacttcatatatataattattcttaaaaattagacaactctaataaacaattcttagtgaaaatgcttttaatatttatctaaaaaatataaataatcgttaaccactcaaacatttatacaggaccgaccctgagaatatatgggtctaagataattaaattttggggccctcaaaaatatatataaaaaaaatttaaaaaaaatgttatgggattcaaacccatgacacattgtataatatatcatgcatctcaatcaactaagctatgactatttgttgtttacaatatacttaattttactttaataaaagattataataatatttttttttaattttaaactctcaaaataaatagactctaaacacaaacttaactcgcttatatctaaagccacatagtttaatattagacactaaaatgccaa

SEQ ID NO: 102847 - DNA, 696 bp, Cannabis sativa
tgttgttttgagttgttctgctgtttgttttactggtgttttataaaaatacagtatttttgaaaaaatttctgtgtgagtatttttataaaagttaacccaaattctaatatttttgtaagtttgccattagagtttatattgcaaatgagaaaattaaagagtctccaactaaaaagaatctaatatctaaaaataccacgaaaaatatatcttacataaaaatatcatgatttacatattaattagaataataccatattttattgttttggaattactaatgttttgtaccatacattccatgaaatagttgagggaccacatacaaatagtagtgttgcattacttcagaattaaaatgggaagcttacaaaaatactagaatttaagttaacttttataaaaatatagtcacactgattttttttcaaaaatactgtatttttataaaacaacagtggaacacataacataataactaaaaacaacagtgaaacaactaaaaaaataaccgtaaaacaacagtaaaaatttaactcagtacatagtataaaacttacacaatattttttaaaaaaattctactctacagtaaaagaaaagtaaaaaatattaaaaatttgtgtaaataatccaatttggttggagaaactgcattcacaaatttaattgggataagttgaaaaatgcctc

SEQ ID NO: 102848 - DNA, 829 bp, Cannabis sativa
  modified_base (52)..(52): a, c, t, g, unknown or other
ggggcacgtatggtggtacatctttattttcaagaacttctactttttggantgttgatacaaatctaaaattttctccatcaaagtggagaagtatgtaattcatttaagtgaatccatgtgatgtatagtagaaaaggattactagaacaatgaaaaaaagatgaatttagggaggaagatgctggttactgaaggttgattaagaagacaaatgaaaaaaaaaaaaaaaaaatcacaatacaataactacctcagagcatttagtgggcagacgctcaattgaagtttcaatttagctggatgtttaaaacaatcgaaaaaacccagttaaatataaaaatatatcattttttttacttataatttaaatatatctttagcattgtagatcacttatataattatttcacacaaaatttcgtatttttcaatgcgctatctattttttttttttttttttgaaatcaatgctatctaatttattgaaatcaaactcctatatcatactacatgaataaaataatagccaaaatataatttttttttaaaatggtgccaaacatataatttacaactagttttaatttgactcctaataatgtgaatagaaaaaaaaatattgtttatagttttctcaaatatctttctaatactatctaattcattacaatcgatattttaagacaattttttttttatcaactaaaacaaaagttttgaatgatattatgagatattacttattatatttaattttatttaaaaaattaacaaaaaaagttaatattcggttaaataatgcttcatgaactcggttaaactaaca

SEQ ID NO: 102849 - DNA, 705 bp, Cannabis sativa
acttttaccagtgcattttgcaaattgcgctggtaaaaatgtcaaagttttaccagcgcatatttggagtggctaaaatctaacttttaccagagcatttacacgctaggaaaagtaaattttgccagcgcttttcattttgtgctggcaaatgttcaaataccaacgttgatttgccaaccccttttgccaacacatcaaaagtaaattttattttaccaacgcaataccaaacttttgtccgcacaaaaatgtgcttgcaaaattgacatttcttgtagtgtggacacctattctcattctgcatgccaaaatatattctttcaaagatagaaagcatttgacctactttttcgtggaaaggcagagcagaaacaatgaacccgggtaatattgcttgggctccggatcctctatgtaaatccaaggcttatggaggccttggttctagaaatattcagcaatggaatatagctgcgaagatgtgtctgagatattgctctgaaaaaaagataatcttagtgtggtggatacattcggtgtatattaaagaaaaaagattggcaaagctatgaggctccaaaagagggaagttggtattggaaaaatagttatggtaaaaaacttagttaggaacaaaagtagtccatttatcttatatatggtattatttttggaataattacataaggcaccattttttgt

SEQ ID NO: 102850 - DNA, 779 bp, Cannabis sativa
  modified_base (26)..(42): a, c, t, g, unknown or other
attccccctgaactattgagattgtnnnnnnnnnnnnnnnnngtctaatttcatttaattttattactatttcactgattgtatgtattaaaccatgctccccaaattttgatatctaccaaatcttacccctgaaattttgatatgtactaaatcatgctctctgaattttcctccacgtcagaatttttttactaaaattaaacaaaagtccttaaatataacaatctcaatagttcagggaaaatttttaacgacttaaaaagttcagaggatataatttggtacatatcaaagttccggagaaattttttttttattagcctataaatataaaataagtacagtatgtttttaatgagcattattattaataataatgatttttataattaatttactttgtgtattatgatataaatataaaaattaactaaatataattttataatatattttcagtctaactttaatttaaaatatacatcatctattaataatcttatggccatacatattttcatatttcggcacatagaaaagagatacattaggaaagtcaaataagagctacaaagttgatttaaattaaattaaatttaaatgaaaattgataacagctagcagtaccttttttttttggatagaatatatattaggtactcagcattatttattcgcatatttatcattgcacatagaaaaatgataaaaagtagtagcagtggttaataatttaggggtgttcactaaatatccgatctaatctaatttgtacg

SEQ ID NO: 102851 - DNA, 526 bp, Cannabis sativa
aacatttctaatgcatctgatcgaggtagatcacaatcgattctagtttgatcaacgatgataacggtaggaagcataacactaaagtcggggaagattcccatgacttcttcaggtagtgcagatcctagatctacaacaacgaaaggttcttaaacaacaccatagttggagcagataaagatggcatcgaatcttcatggcgctttgggtgttctagaggacgtttctggggctgacgatggcacaccccaggaataattctaaaggcaagcactgttaatatttactatatgggtctttgatctggggcgacaagtaaagctcaacgacactggatatgacagggtgactattggcacgtgaagaaattggcggaccaagggtagcatgatctcgcccaattacagaaacaaattggagaagtgagttgtcgaaaacctttctctgtattcattcattcacttacgaagaatatgcatacaatacatatattttgttggttcacacattgaaaaggaagaag

SEQ ID NO: 102852 - DNA, 1041 bp, Cannabis sativa
ttccactcagactcaggttcaggtcagcccgcacacctgactgttggattgaggtaagaaaagtgttatgcaccatttatgattaacaatatgattattatagtctaaattatgattgacatcccaatatgtatttgttgtgactcgattatgatcgaggtaatgatacggaacaattattattgtttgtgactcgattatgatcgaggtaatgatatggagcaattattatcgtttctgactcgattatgatcgagtaaaagatacggtcattaccgttataagtaattactctttgaaagcgcaattaggttttttatttattgtttgctttattggacaatgatagtgacatacatagctcgtagacgacgagtggtaagaatgatttatggtaattgtaattagagtgctttatgaagcactaaaattatgtgtttatgatgatgtatgactagagtgctttgcgaggcactgagactatatggctattgattgggtgaatgtctatttagtgaaaagatgaaatttgtaattatgtgttactatgagtattcttataatttgtaatgaatgtgtttgcatggacgttaaagttatatatgcatcctgaatgtgtaatgacactctggtatgtatattatgttgtaaatgctagtactttctacgctttatgtctagtactttttcttactgggtgtttgtgactcacggttgcttcatagtgcaggtaagaagaatatcagttgtgttcgaccatgagtcagaggtctcccagtaatgtacatatcagccgtggtgtcttgacttttgagaagtaggattaacccttgtctatgattggaaatgtaacctacttttgtaataacgattttgttattagttgtaaaagaattttattaccaagggatctccacattacgacagtattttgaatgaaagtttttattttaaatttattcagtggtttaattaaaccacactttttcctaaactaataaattagtaataataagtttgtaaaagtacacatgtggcgtc

SEQ ID NO: 102853 - DNA, 644 bp, Cannabis sativa
  modified_base (587)..(594): a, c, t, g, unknown or other
ctggtgttcaaatcagttgtaatctctgagttttactctaaaagaaatcaaggcaaagcctcaaggcagttccccccaaggattagatccaagtgttattcacttgtgattgaaccttgtaaaccttgtgttcttattgattttactgctgcattactattttcttgttgctggtttactgtcaattaacttactggtttatgttaattgtttttctagtttatttgatctgttttaatgttcttgaatggtgattgaatcaccacaattttaaaataaattttattttacaataggggattccccgcccgtccccgctccattagagaattccccgtcccgtccccgatggggaataagtgggaatggaatggggatggggattaaaatccttaacagggatgtgggcggagagagcactccccgctaatttcccgcctcgtgtgcatccctaatgatagggtagagatgtatatatatatagatatattattgtcatttatgaataattttctgattcaccattatgttttataattataatgggttacggagagataaaatggtaaatagtggcataagtaccnnnnnnnntaagtttgtaagtggcataattccaatgtttatttttagcgttataagta

SEQ ID NO: 102854 - DNA, 513 bp, Cannabis sativa
gaaatttatagtacaataaacttaatagtatttttcaaaaaaaaaaaaaaaaaaacttatagtattttggtatactttctattttttctaaacttaaaaactaactttttagtgcatttttttgttttcattattctgtacgctataaatatttaaaactacatgtaaatagggtcggccttaacaatatatgtttctaatgcgaataaaattttagaaccctcacattcgaagtactcatgacattgtataatatattatacatcctaactaactaattaagctatgaatatttattgtttacaatacaataacttaattttacttaaataaaagtctaatgaaactttttattttttattttggaccccaacaattatagatcctaagcacggatctagcccgtctatatcgagagtcggtcctgcttttaaagttttaaaaatattctgaaatcgtttagtaccaaaaataagattcaaataggtacttttattgcatgtgtaactgttt

SEQ ID NO: 102855 - DNA, 730 bp, Cannabis sativa
cacacttctgcttcacctagactttacaccaggctcgactctgggcataggcgggctacgcctgtgccaagggtccacttagctcaggggttcaaaaaaaattctcccttttaaaattatatatatttttactaattttaaaaaataccatatttagttctaaataagagcccaattttttttttcctatggcctactaaatttcaggaccgaccctgctttatacacacagatgctaagctcattaactattgatcactaacaatatgggctaacatagcaaagaactatccaatcaacccaaattttaataaaatcaacactactacaaaaggggtttttgcgtcggtcaacgcatctggtcaaactcattgactgatgcaaaagtcaaccctcactctttttcttcgattgttaactgacgcaaataataattaatttgtgttggtgggtactttgacaaaagaaagatcaacattaaagatgaaatttaaaacaaaattgagggcttgaattttgcgttggttttactcaaacacagtatttagtgtctgttgaatggtttttgcgtcggttatgcactcacaaaaacattgtgtcaatgcacaactgacgctaaaaaaaactaaattgggctctggcccatttaaataaaaaaccctacaacatatataacctaacctaagaaaccctacaattcagccacactctttgtctctctctctctctc

SEQ ID NO: 102856 - DNA, 587 bp, Cannabis sativa
cctaatgatttggtggatgtcaagaaataagaagacgggcccctcaaggactatatccaacagttcttagaggaagtcgttgagaccaaaagtcttagcgaggacgcaaaggttgtggcactcgtagccaggctcaaagagatgagtcctttgtggtttgactttcgtctcaaggtggtatacaaaatgaatgacttcttaaatagagaagatgacttaatcaaacttgaagaagtcatcacccgagccaaaggctcaaagggtggtaagaaaaagtcaccagactctgaagcccctgttactgaggcccagagcaatgggaaaaaaggaggttcaacataggaaagagagccaacaatggtggcaaacaaagtaactcgagaatatgagccttgtttcaccacctaatccattctcttggcttcaagagaggagatctatataactacacagtcaacagtgtcatatcgcaaacctcttcccttcaatgagtcagagaagagggacatgaacaaatttgttgctaccacaataattatggtcatgatgctaatgagtgtaatcagttgcaagacaagatagaattt

SEQ ID NO: 102857 - DNA, 510 bp, Cannabis sativa
ttttttttttgaatttgacacttattgtcagaattttttttttttttttttttcaaattgttgccaatcaattattattctcatcttctctcaattttcacactttttcccacacatatataacaaactttccatccaaattctctcaaactaaagatccacttatggtataattaaggtcaaattttagataataatagatttatcttgtttaatttcaatatgtgtagaaacaaagaataggctaaggctcaaaaaataataattaggataaaatttcaaggatggcttgaaagacacaatcgatccaaagaatgcctaaatcacttttctagtcatgcataatttattattttgcctcaaatagcaagcaagcaagttctagaatttgttttccaaacaacttttcacatttcacaattagcttacataaactaatttaattgctaaaaaattacctaatatgattccatgttcttctaaaacacaaaaattaaaattagttaagaa

SEQ ID NO: 102858 - DNA, 521 bp, Cannabis sativa
taaatattaagtcattaaattcacgtgtcattttcttattggtatatttgaattaattttcttaaaataataaaaatttaatgacttggaccaatcaaggattatcacgtggaaatttacttaaccaggtacctatagaagttaccaccaaaaattaaacttaggtatttatttgcaactagaagttaaacttatgtatttatgccgcaaattactcttttttatgattatatacgttatatttatttaagattatttgtaaattaaaataaatcgtgggaattatttttctttgtggatggcatgcagcaatactttacgaaacggtggttgattatgttagcacgagtctcgagaaaaatattttttttttttggatatcttggttccacgtgtcacatcacataaaaaaaagttacataaaatctagaaaaaaaattatatttttatgttcaaatatatatattttatatttttacagtattctataaaatcaatatgaaaacaataataaaagtaca

SEQ ID NO: 102859 - DNA, 686 bp, Cannabis sativa
aaaagggaaagtttggcaaaggaaggcccctagagaaaatccttccgaattcactgctttctatgtcttgactgatgatttggagactatctacatggctactcaatcagcagctccgtacaagaaacctgctcctatgaaaaaggacataagtaagaggaacatatccaagttttgccgttttcatggagattatggctatgacaccaacgaatgcaacaatttgaagcaggaaattgaatttttaaaaagaaagaataacccccacgtgcaaaaatatgtcaagaccgatcaaaattagagggccgcccaggtagacaataaccaagatttactaccaccaccagtagatgggcatttacatgtcatcattgggggcccgcacatagttggagcttcaagcaaagcccgggaaaggtatgcccaaacattacagcacaaacaaaaagaagtggtcctggccgtcgaagaaaggaagccaaaagtatcatgggtagggaaacccaccataacgttcaatgaagaggatgttgccaaggttaactttttacacaatgatccgttggtcgtggaggtatagatagctaacaaaatggtggctcgaactatgatagataatggagcctctacaaatatcttgttcaaaacaccatatgaaaaaatggggctccaactcaaagatttaa

SEQ ID NO: 102860 - DNA, 653 bp, Cannabis sativa
ggctgcttcaaaaagacaaataaattaagtgtcagagtggccatgagaaaatatgcacacgaaaacaaagcggtaaaactagtcctaccctgactatctaactcagccctagcaaagtcttccactacaatattggcttcatcatccccaagaaagctgtctgaggggagaaaccagctggaagacagataagctgaatgatacaggagaataggtgcaggaggtccggaacccatctgggatcggcctagaaaatgacctaagttggaaaaataaaaggccttagcatgatcaccccaccgggtggggggcatcctaaatctaaggagacgctcgtcaaattcaataggcctacaccgagaataatcataggcagaagggacgtgatagaccgctaaatgagacttaccagatctggatttgctggcatcaggagcccctgtattgggaaccaggaccagcaacttaggccaagaaggcgtctactctttacccgcctccagtcgaagggtcccacggtggcggcctgagccttgatatatgctaactcttgttctctcctgaagagatacttctgataccagtcctccgccgaggctataatgtctgcccggagcaccttttttagcgtctggggtacgaatgtttgggca

SEQ ID NO: 102861 - DNA, 1036 bp, Cannabis sativa
atatactctatcaactccgcatttaatgagttattccattttaatatcttctaatataatagtcattatattcgttgattcgtattctcctaggttgacacgtgtgctcctctgaagtaccagctgaatttcgagtataacacaaataataaatttactattgatcacttttatatataaagtgaatctagaatatatttttttttaaaaaaaaaataaaaataaaaataccaaataaaatttatcaattaataatgagaaaatagataaaattacatctaataatcaaatttaaatttaaatagtatgctttaaatatttttaattaacttatttaattttaatttttcataatcattttataaaagaactatcttcaaatgttatagtaaataaaagattaaaaattgaaattgaaagagatatcatcatatgattacaaaactgctctcatcactgtatctcatttgtagtcgtcactacattcaaagtgacaatttgatagaaaaatacaaattaataaaattaagataaaaatgacaaaaaaaatagcagctatgaaaaattatgtgtaagacaattttataatttactttaataaattatttgataaatccctacaatgaaaatttgataatttagaacacaaatactattcatgattaagagttatttatatatttattttttttttaaaaaaaaaaagaattaataatcatataacacaaatttaaaatatctctaaaaacacatagtgatattgttctacctcaacattcaaaatttgagataaataatattaactatgaaaatatcttaaagagcaattttacaaaagatacactaaggtataagaatgtatactttgccagataagaaaaaataaaagaaaaacatataaactattacttcaactgtattattactacatcatctcaccgttataataaatcacacataaaatattttgatgaaaaccattattagcaaaggaagaagaagacttgtttctaaaaaactctaatcacatatttgt

SEQ ID NO: 102862 - DNA, 796 bp, Cannabis sativa
  modified_base (603)..(606): a, c, t, g, unknown or other
ataaaagattattagattgttaccttattaattttttttaatgcatggatattacccattaaaaagtgttatatatatatatatttagttataggtatacaaaatggttaagggtataattatagtaaaagattattttttataaaaaaaaaatattaatttgaggtttaatttgaacaaggttaaagctaggagtaaagtaatactatgcaaaataatatcatatcaaaagtgagagagtaaactaatattagtaaaaaaaacataagaaattgtaactaatgaccttaaatcttacactgatgaaggttaatgtccattatttaaaaaaatgaagtaaatgaccttttataaatattaatacctaaaatgtctttttttcttagtatattattacacataaaaataatatatcacagtgcaaaataactattctgaatactaaattattattcaattcttttaattttttttcttatatataatataacatacaaatattatactttagagtaatatgaacgtaccacaacaattctatcgtcaaataaatatacataaaaaaatttaacaaacttctacaagttttttttttctctttcnnnnatgatataccatagcaaataaaaacaatataccactctatttatttattttttatttattaatatatcatagcatataataaatatatattgtacaaaataaaaaaaaatactaaacacttaaattaatattttatagttttctttctttttttccctcacgatataccatatcacatacaaacgatata

SEQ ID NO: 102863 - DNA, 833 bp, Cannabis sativa
tcaactcacacattggctggcagtcaaacgaatactacggtatttaagtggcactatcactcatggtcttcatctcactaaatcctctgtcaaagaactggtggccttttgtgatgccgattgggccacggacattgatgatcgaagattaacctctggcttcacaatcttctatggcaacaacctcattgcttggcaatgtaaaaagcaacacacaatctcaagatcaagcactgaagccgaatttcgaagtctagctagtactgttgctgagcttacttggatccactcattgttcactgaacttcacattcgcacaacattgcctcctgtcatctggtgtgacaatctcagtacggttctcctcacagccaaccctgttcttcatgcccgtactaaacatatcgagcttgatctttactttgtgcgagagaaagtcattcaaaaattggtccaagtaaagcatgttccagctcaagatcaattagctaatggtctaacaaaggcaatatccactcaacggttctctcaatttcgttccaagcttacaattgaagacatctctgttgctaaagatacttcaaattgtaatcttgaggggccgtgttaggagtgtctattcagtttagctatttgttagaaagagttagttagagttagttacgtttgttacagtttgttatttctcttaactgattctgttaattcctttccttatcaaacagctgtaatcattggctatataatgccaatcctctaatctgaatagcgatgattgctctttgtttcaatccttctttctctgtctttcttcctctttctctttcgtttct

SEQ ID NO: 102864 - DNA, 1010 bp, Cannabis sativa
attcttgttgcagaacatatgcactcttgacagagtacattccattgacttccttagaccaacaaagcacatccgactgctggtgtatccttaatggaatttgcaaaatcagtctttgatccctctcctcaaataaatatcttttcaaggatatccacacatcccaagaggccatgtccatggacattaaattgctcactttagcatgttgaagggctggatgagaggaaatcacaagcggttgctggtggtcgggcagccaaggttcattcaacacatcaatagaagagccattccccacactccaacgaactcccgcacgaacaagagattgagcttcccaaacactacgccacacaaaacttgggttgttccctatagaagtcgagaggtatgttccattgggaaagtatctagcgttgaaaatacgagaaactagagactcggttcttgttaagaagcgccaaccttgttttcccaagagtgccaaattaaaatcatggagatttcgaaaaccacgccccccattgttcttgctattgcacatacgatcccaagacatccaaggtatacctttgttttccttcgatgaactcttccaccaaaatctcgccatggtactttcaatatctctgctaatctacaacggaagtaaaaacacattcatagagtagctagggagagcttgtgctaccgatttaattaacacttctttaccaggacgagatagaacttttgaatcccaaccttgaagcttttttcttactctatccttcaggaaacccaacacagctgacttatttcttcccatagtgctagggagacccagatacatactcctttcatctgcttgtggcatttgtaacagagtgttgatatcttccctgacatgatttgctgtattagtactatagaagattgatgatttccccaagttgactttctgtcctgaagcacattcaaattggtgaagaagttctctaatccgattggcttcttgaagagtggct

SEQ ID NO: 102865 - DNA, 847 bp, Cannabis sativa
aaaggaaatgaaatgtgaataaaacaatataatgaatgaattaaataacatatgattcctatagttatcatcgtctataccatatttgtaaatacgagtgtattgggtcgggtcggcctatattttgaaaatcccgtaataatattggttgtattgtgttagtcatatagattgtattgtgccaatattttttaagagaaaattatattatatacccattttaatttatttgttttaattcttacctctgttttcatattttttaagatatatccacttttatagataatgttctcattagacaccttaagttaatctaaattatatgttagacttaagtaaaaagtgagggtatattggacaaccctctcacaaaagtaggtatgtttcaataaaagtaaagagtactgagtatatttgacaacccattcataaaagtaggtatattttaataaaatataatattagagtatttttttaatttatcccatattttaaagggtaagcctcgcacgaattgtaaggacgaaattacattatatacatattttaatttacatgttttaatttttaccttcctattcatattctttaagatatacatacttttataaatgatgtccctattataccccttaggttaatgtaaattatattctagacttatgtaaaaggtgagggtatattggacaactctctctcaaaagtagatatgtttcaatgaaatataatataagggtatttttgatcaaaagatacaaaaaaagaagtattcctaaactctaggggtgttcacaaagtatccgatccaatccaatccgcacgatccaatccgcacgatccaatc

SEQ ID NO: 102866 - DNA, 881 bp, Cannabis sativa
attcaaaattattagcagcaatgacttgattagaaaccagtaaaattttcattcaccgcaggtaagcaataatcacgaacaactcgtggttgtgcatcagctgcagcaggtgttggttggttgttattagggccattgttgttattggctgtcgtggtaaaatctaaatttttctttgctttcaactgctttagagttctttcaatctcacgatttagtggtgtgagtggtgtggcacttcgatttgttcgcataaactgaaccacaatgcaacaaacaaaataaaatctaatttaaagcaaaaaattttagtaataatattagcaataatttaagaattttcaatccctaacaatggcgccaaaaacttgatacataatttttgctgcaaccgtacaacgttgttatagtaaagttttaataataaaggttgtcaaacccataggaattgattcttaaattttactaattattatactttttaattttatactttaattagataacaccaagaaaatatacctaagaatcacataataagataaatagaaaaataaatagacaaacaatgatttttaatcaaaaagaaaaaatttagagcattgatttacttatttcaaactatgaatctcaatttatcgattatcccaatttatcctataatttatagtttcaacaatcataatataatatattaacctctctggagaaatgataaatttaacttaaattaactaataagatatcgatattcaatgttaatcaattaaacactcataaagcaatatgattctttttaaatgaaactcatagaattaatagaatctctcaatctcaaacttttcctatgtcattctattctaagttcaattttagattac

SEQ ID NO: 102867 - DNA, 515 bp, Cannabis sativa
attagaatgtcattctaatataatactcttttcaccattttgatggaatgactatttcattttaaatgcaaagaaaaatcattccgatgtaacatgagaaaaaagttaataatttttttattaatattttttatacattttaaattttattcatttttattcctattcttattttcattcttattcatatattttcattcctcccaatcaaacaacatcttagttcaatctaaattatacttaaatttcaattacatagtactataatttctagagtaaaatagttataaaatagtagattgtgatttctacatcaaaatatatcacgtggtctccttctttttcttgatttggcgtcttttttttttttttttgatttttgcaagttgtagaagaaagtataatttttaaagcgaaaaactaataacttaaaacaagaactaaaattaaacttcatgatgattacataatatattactttgtatagaagcaaggttcatcatatcaataatttt

SEQ ID NO: 102868 - DNA, 965 bp, Cannabis sativa
aaaagtgagaagtacatcttcatcggctatgactcaagatccaaaggctacaagttgtacaacccaattactggcaaaactatcatcagttgcgatgtaaagtttgatgaagaatattcttggaattggaacacagaagaagatgagtatgatttttttccttactttaaagaggaagatgtagcggagcaaccaaggatgaaagaagaactttaagaacctactactccaccaatctcgccaactggaaatatacaagaagattcaagtgagagctcaaatgaaaaaatgccacgctttagaagcttgcaagaactttatgaggtaactgagaatcaaaatgatatttctcttatgtgtctatttggttattgtgaacctctaagctaccaagaagtagtaagaagcaagaaatgaagagatgcgatggataaagaaatcgattcaattacaaaaaacgacacatgggagccagctattcttccacaaggatacaagccaattggagtaaagtgggtgtacaaggaaaagaataatgctataaaggcgcggtggagagatataaagcaagattggtggcaaaaggctatagtcaaagggaaggcatcgactatgaggaggtatttgttccagttgctcgtcttgaaactgttagatttataatttctttagcagcccaaaatagatggaagatccaccaaatggatgtaaagtttgcgttcttaaatggttttcttgaggaagaagtctacatcgagcaaccattgggctatgaagtaaaagggcatgaaggaaaagttttgatgttaaataagactttatatggcctaaaacaagcgccgagagcttggagcactcaaattaacaagcactttcaagacaagaatttcaccaagtgtccatatgagcatgcactctatatcaaaattaagaatgaagatatcttaattgtatgcttgtatgtg

SEQ ID NO: 102869 - DNA, 731 bp, Cannabis sativa
  modified_base (510)..(511): a, c, t, g, unknown or other
aggctgcccaggctacccaagatttggaaaatagatttgtagaaacgcaagccagaattaatgagcaagatgaacaaaattagacgcttgagacagcacggtactcctacaatccctgctccaaaaatgcaggtagctcgctcttattgtgtagggaggaccagtcgctgcagtgaatcgaacggaacaactgtatgataggttccgcaagtaggaacctccagtttccctgggagttcccgatgtcatgaaagtcgagtagtggctaacggttattaccaaaattctgaattttatgagcgtcaatggcaatgacatagtggcctgtgccacatttcagtttcaagaagacgctctagtatggtgggacatggtatccctgacccatgatgttactacgatgacctgggaaaagttccaggaactgttcaatgcgaaatactataatgaggcagtcaagagtgcgaaaagaaaagaatttactcagctgactcagaaagaaaatatganngttactgaatacacaactcagtttaattgtttggctagattggccttgggaatagtgccacctgattttagcaagaaagaaaaatacataaatgggttgaatgcaaagataagacatgatctgatgatcactaatgatgacaacaccacctatgctgatatggtgggaaaggcactgcgagctgagggcgcagtagagtgcatccaggagtctcgaggga

SEQ ID NO: 102870 - DNA, 668 bp, Cannabis sativa
accaccttctgtaagttcaatttctagcttatgcatccaccaaaagcagtaaatgcataccatgtaatcgatcttctggtgtctatgctcccagtatagtctgagtcaacataccgtgcaatttcagtgtcaaaacttgcattgtccttgtacaacaaaccaactctagttgttccttttagataccttagaatccattttacagcatcccaatgcaccttccctggatctgaaatgaacctgctcaccatgcttaatgcataggccaaatctagcctagtacagaccatacaatacattagactcccaacacaggaagcataaggtactgtgtccatgtataacctgtcttcttcattgtctggtgcttgattttgagcaagtttgaagtgtgaggcaagaggagtagtggcagtcttggccttattcatgcaaaacttgtcaattattttctgaatgtgaccttcctgagacaagaaaacagggtcaggtctttgtctcttgatatctattccaagtatccttttagcttcaccaaggttcttcattttgaattcagagcttagttgatttttcaacatgtctatagcctttctgtcttttccaattattaaaatgtcatccacatagagtaataaccagataggtgtcttgttgtagtaaacaca

SEQ ID NO: 102871 - DNA, 540 bp, Cannabis sativa
tattatataaaattttgagaaatttaaaaaaatttaagacgccgaaaacaatcatgtttaaaagtggcgaactgatatactcctacctgtttcggcattcgagaaactttttggtctttttttcatggtcgtgtacagtatagttatttaagatatcctgcaaaactttaaaaaatttagaaaaatttaacttgccgaaaattatttgttaaatataacaattgtggtgatttttgttaatttatatgacattaatttttttttattagaaaattaatatagtaataaaaaatatattttttagtgttgtgattagagtgaaaatatttttttaacaccaaatttaatgtgtatttagagacgctctaagattaccaacccacttaagcccatagtcgcgggacccacaagtcccattgcatatgtacatatataatatttaactgaaagaaaaaacttagatgtataaaggtacatcaacatcacgtgtacaactagagtggtttattcttattggtccaataaccttcccgatactat

SEQ ID NO: 102872 - DNA, 868 bp, Cannabis sativa
agatttctccattgtagggtagtatatcaaatttaacaaaatgacccgtaaaaagaaactcataaataaacagagaacaaaaccagaggtaaaaaagaaatcataaaatatacaggctacatgaaagagaagcaaataaacatttaaacccacaaaaatgctactttttgcttccattagaaaaagaaagctagaagaacgagggtcatacaattatatacacaccactaatctaccgtaaatacattgtgggaatcaaccacaaacaaataatcagaaactattttgaaggtcacaaacgtaatccaaatattggggttcaaaacgcagcaaaccaaaccaagactctaaatattggtggcaatcagatgtaggggaatgtcaatcgtatatattttttgaatttaaactctgctaaaaaaattgtatatatttttgaatttaacctcacccaaaaaaattgttatttttgaataaaaaattaaaaaaaaaaatcacccactaattttttataaactaagaattcagttatatagccacattttatatagaaatagatatatgagagtctttacacttttacataacatgtataacaatatgaaagaagcagattttgaggaacaatattaacaatatgaagatttaactgaatccattttctttgtcttctgtattctatagatgtgttagtaacaccatagtaacacatgtagagatgcataatacaagttctatatcaaagtttggtctctcagttatattctgggattgtagtttacagtgcataaagactcacacacagagtataccaagaaagaagtacataacaagatagatataatgaaattgaaagtttctttcacta

SEQ ID NO: 102873 - DNA, 672 bp, Cannabis sativa
ggagaatcgaaacaggaagtggaaccaactcccttgtatgaatagacagcaactcctgaactgggtcttctctgcctatccaaatggacatacagaggctgttcctgcagtaaaccatgaagcagatctaaattctcatcagaaacaatggatcccccctgctagtggtagcatttgtgtgaactgtgacgccgcagttgttgataatactgcaggtgtaggaatcggattcatatggagaaaggctgatggccaaatgctctccgctggtatgcgctatttgaacaactgctgctcacccaaaacggctgaggcctgggctctttgggaagctctgaacaacctccctgctactgagaccagtcgcattgaagtccagtctgattgtcggctgctggtggaagaaatcacaagcaagaatcaaagccttactgctgacagcaccatcattcacaagatcaaaacagtgctggaaaactttactaatgtcaatataattcatgtaaaaagaaccaataatgaatgtgcaaatttgttagctaggaaatgtctagccaacaaaaattcctattcttttcacaactccttcccggattggttagtcaagttttgtaaggctgatcatccatttgagttgtagtttgttgtttttggttctaataaatttcattt

SEQ ID NO: 102874 - DNA, 657 bp, Cannabis sativa
attaggccaaatatcaagctccacatctctaacccctttatgcagtgccttaattatgggaacatcgctgcaatcgctacttatttgatttccagtcaaatacgaattacggccggtgtatatgaaataatgtgacaaaggagccgtcatgtcatgatgaacctgataataattttaacaaaaaaaaaaaaaaaataatccgtttaaacaaccaaaaattgtcttttttttcctttggtcattttctcttttccttataaagtatcaaaagaatataaacccaagaataaaattcttatagaagaagaaaacagagtaaaagtaatcaaagtacagagtagagtaaaaagaccttatccataagagggggattgaagtcaacagagaagaggtaatggtggaagtcatcaagagtgagcgagtgtcttctgaacttaggaatgtggtggtggtgacgacggtgatggatctgctcaatcatctgctgggcatcttgaactgtggtggcatcatctccttggaactcgaccaagaactgtcgtaactggtcggcgttcatgtggttcccaccttctgagtacttcttaaaggcatctttcacgtcggagggtggctctgcctccgtgatcctgtactttcgggtgaaacacacacaca

SEQ ID NO: 102875 - DNA, 965 bp, Cannabis sativa
gagagagagaaagagagagaaaattgagaaaatggtattcaaagagaatagtagatagagctggaattgttaaattttagagggtaagctggagagagaacaaaactcttatctttcccaattcttcttcttcttcttcttccttcacatattttttttggatacctactacaaaagaatatgggtattgagagagaagagaagcatttatttgagaagattgtgtaggagaagattttgtaagaatgtagttttaattaaaaaaaattgtcacaagtgataagaccacccatcactttcgtaattaattttaataaaaaaaaatatcacaagagacaagacaacttatcattttttttttagtgtttataaaaaaaaattaaatcacaaacgttagcatgtgactatatattttattttttgaaaagaaacgttcattcataagacattagacctcgcggtcattacaacaaatattcttaggaatagttgcaacatcaatacaaccatagtagttatgggtaaaagcccagttggccacgttatgggccataaagttacacgatctagccgtaaaacaaaataaacaagtagtgaaggaatgagcgattcttttacaaaataaagagtagttttcaatttcccatcggggatccaagccgttgagagtgttgatcactatctttgaaacgctttccaccaggataaactggtgtcctttgtcctttgcaacctctagcgccaagcaaactgtagcagttctccacacaaggcatcagagaagtccatcttgaccgtaaacacccaaatcagcctgcttaggtaatctctagcaatcactgctatgcacatatgctcccctccaaccttagcatcgcaattcattttgatccagtcttgggggaagggttccaatcagcgtggggggggggtcggggaagatataggaataatagaatctttgt

SEQ ID NO: 102876 - DNA, 608 bp, Cannabis sativa
ttaaaaataaaactttacaaatcaaatgctgttggaatatggggatcccctgctaccgaaattcttttacaattaatttacaaaacgactaatacaaaatcaaggttacaaatccaaatatagaaaaagaggtcaatcctgcttcgcagaagtcaagacaccacgactgatatgtacactgttgggagacctctgacccatggctgaagacaactgctattctgcttacctacaccatgaagcacttgtgagtcataatgactcagcaagaaaagctactagacaatagtatagtaagtactagcattataacataatatacatatcagtggatcaatacatattcaacatgcatatacatatcagtttgtctacgcgaacaccttcataacacagtgtaagaaaaatcaaacaaactcataattaataaattcaccttttcaccaagtagacattcatttaacccatagcaatataatctcagtgctttgaacaacactctagccatacattattgtaattacataatttcggtaattcacttagtactctacttacacaataccataatcacctaaactcaatgcttcataaagcacccttaccac

SEQ ID NO: 102877 - DNA, 640 bp, Cannabis sativa
ataataatattttaagcaaatgaatttagaaaaagaaaaaaaaactatatattaattttaaaattttagtgtaccttcataataacttcaaagagaaagcacacatagatctatcttcaataatatggagaatgataaaattaaattcagtgtattttttgtgcatccaaattgtgaaaaaaaaaaaaatgatgataaaaatagaaaaagaataatataaagtcatattatattaatttaatcttataactgaaatatttatatgcatataatatactaaattaattggtttgtaatagtacacttaaaattgagaaaatgaagaacaaaattgaaagaaaagaaataaataagagttcatactaacattaattattaatagattattgtataacgagaaaaattaagaaaattgggaatttaaaaaataagatagaaaactcctagaaagtgctacctcacattacaccttgcattaaaattatatatatacatatgcatatatacaagaagtaatgaaaaattctgttgccacatgatatgatgtatatacaacttataacatctacggttaaaaaagaattattcttacatatacaattggcaacgtctattgttggagaaattaatttttttacat

SEQ ID NO: 102878 - DNA, 615 bp, Cannabis sativa
atcaaggctattctgcaggcggttccaaactatttgatgagtatattccagttaccggtggccacttgtgataagcttcgctcaattattttgcaattttggtggggtactcataatgataaaaaaaagattgcgtgggtcaagtgggagagtgtctgtcaacctaagtcaaaggggggattaggcttcaaggatattcggctttttaatcaagctatggttgctaaacaagtttggcgtctgctccaatcgccggattctttggccgcccgggtgttgaagtataaatattttcccactatgtccatactggaggctaaggatcgccctggatcgtctcatttgtggtcgagtttagtgtgggggctggagttgctgcaatcgggaatgaggaaaggagtgggggatggtcagagtgtgcatgcgtttcaggatccttggcttcccaggccgagatcgtttcgtcctatttcgcctgcgcctggtgatgatgtaatggtttgtgacttgattggtgccaatggggcgtgggatatcactttgctctccaattatttcttgaggatggatatggatgttattcttggcatcccgttgcggggtgggcggtgtgca

SEQ ID NO: 102879 - DNA, 584 bp, Cannabis sativa
ttaatactatcatgaaaataagttatgtttttatcccgaaactgtaaccagttaatcttacttttttgtattaagtagctttctatcattttagaacaagaagttacggtcaccttaatttctttttcttcatcaaatagctccacagaataaatgttacatttaattcaaagctgaagctcatgaaaacgagctttagctgaaatataaacttgttgatcccctattaacattttatgaaactctctaagcacctctcgtactctatttaacttgaccatagtatgaaatagcctagtaaaacgagtaggctactgccaatttttcaacacattctgtctaaaattttggtgctagctctatccacattgaaaattttaaatggccgaaactccaattctctatgtacatacaaacttctaacaatacacaagcagtggtctgaaataagattccatttataaaaagattcagtagagggatataggcagatcaagtgccaatcttcattcttaaaaactcgatcaatcactacaagaaatgtcacttttaccagcacaattcgctactgcgctggtaaaagt

SEQ ID NO: 102880 - DNA, 551 bp, Cannabis sativa
aaataggagtgctaattacaatttcttattataattttcatgcctgaaattagaaattaggatatatttttttttaaaaaaaatttatagcagcatttgttatagttatagtatcatttcataaatttttgaaaaattacaaatgatttataatgtcaaaaatagaatttttggtatttcagttactacgggccttcaaaaaccttcaaaccataaaaaaaatttaaaaaatattctaacatatatttttagtcactaatattaactaaagaattataataaatgatttccactcctcaataaaaaaaatataggaaaattctataatgtactcctttaaaaggatgcatccatagatctttattgtaattttaagaaattctaaaaagtttagcacactaaaaattatttttcaaacagtgtgttgtatacgtgactattttattttacatgcacataaaatattcaaatttttcaatattttttcttgaatatcaaaacaagtagaaagtagatcaataaatctgttttaaggagatgctttataaaat

SEQ ID NO: 102881 - DNA, 565 bp, Cannabis sativa
tctcaaaattttgtaggttatcttgaatagttataacgtacatgaatatgaaaaaaaattagacaaattttttttctgaatgccgaaataagtcaatggtgtatcaatacatctctttagaatcacccaatatagtatgtgacaaaatattaaaatgttatattattagataaaaaaatatatcattttagaaatttatatgaatgttacttatgttgtgatattgatgttatttattttttttaataaaaaattgaagctaaaaaattattatagctaaatattaggatatatattaaaagaaaattctacaatgcacccctcaaaagaaatgtactcatacatatctatctcttttatattcgaaataattttttagttaaattttttctcatggtcatgtaaattataattatttaagatattttgtaaaattttaaagaattcaaaaaagtttaacatgtcaaaaattacattcaaacagattgcacacatgattattttattttatacacgtgtaaaataaactatttgaatattattttttatatggtaaattattcta

SEQ ID NO: 102882 - DNA, 621 bp, Cannabis sativa
ggcacctacacacacacaagcattggtagaaagcacgaaaaatatatggcaaaattcaagaacaaaattgaaaagccaaatatatttattaagacaaaaaagcaaaataaatctagccttaaaagtcgtccaaccagctgtttgtcttaagcagaatataaataaaaataaaccaattttagaagctcctttgtttgccacattgtcttaaataaaaggcccgggggccaaacagatacaagaaaggggtttttataagttcacactccatgggagtgtcccaagctcttaatgctgagggaccaaattttttaaattttggatggcaaaagaaggatcggaactcatgttttccttatcagcagtttggatgaatttttttgcctcatcctcaaccttcctcatctcgcaaaacctgagcatgtcttcacgaatgtcaccattaagataaccaaagttaacctcgaggttagctttccaaaattcataaaactcctccgcagcgattgtttcatgacactcaacatctttagtgtgagcttcctgctcaacagccaatgccccctcaagggcaattttctccttcaagaaagatttctctttttgcttaagggcctcgat

SEQ ID NO: 102883 - DNA, 582 bp, Cannabis sativa
accgacactgctagagaaacatggatatattttaaacaaatattatctttatattttttgtctaaataaattttataattaatttaaatattattgtttaataggaaaaaatgattgacgtacgtgagacaacaaacacagtccatcccaaatactaaagtgtcaggcaatgtgattaatccagaagacgaagatttatcacttgtgcaatctgtttttggaaaacatcgtgggccccaaaaaggttatgggcgtctaattagcacaagagagatgacaggactacctacatttacccaacctcctccacctcagactggtgtatatgttggagctgatgtcatatatagttgacatgcaagagagaattagacaattggaggaattagttaggacaagttgtgtcactctgagatcgcagaatccaccttaacaatctgatcattctgatgatggaggacagagttagtagttgtttttatatgtaatgtctatttctttcacgaaccattttattagcatgttaggtaattaaacttataactttaaaatataaaaaattaaatttatggtatttttatt

SEQ ID NO: 102884 - DNA, 879 bp, Cannabis sativa
ggtctggtggcaacttatcatccttcaagtattcgaggattggccgtctccagtcttcgatcgtgtccgtcggaatttcagcgcacttaatttcttccttggctgaaatactaggttctgaaataaagtcaaatggtattgtcctcgtaacgtggaggggggaagaggaccccaagccggctaaagcgtcagcatgcatatttgcttcacgggggatttggctaatttggaagtagtcgaaagtcccaatcaatttttttacttcggataagtacctggccattttcagttctttagcttcaaaatctcctttgacttgctgaactatcaactgagaatctgactggactaataccctctcggctcccatttcctttaccagttttatcccgtggatcagagcttcgtactcagcgtcattgttggtagttcggaaacctaactttatagattgttctatcatttccccgccgggtgacagcagtactattcccactccacttcctctgacatttgaggatccatctactttcagtagccagtcctttccagtggattctttctcgcgcgggacaggctccggggttatctcgaccagaaagtccactaacgcctgtcccttaatggtcgtccgaggcaagtactgtatatcaaattcgcttaattctaccacccatttcatgagtcttccggatacctctggcttgtacaagacccgctttagtgggagagacgtcatgactgagattatatggcattggtagtacggccgaagttttcttgctgatgtgactaaggcccatgctaatttttcgattattgggtatcttccctctgcccccgagaaagttttaatggtgtaatagatcggtaactgcg

SEQ ID NO: 102885 - DNA, 628 bp, Cannabis sativa
gggactactgactgtcacgcatttggtaaaaataaaacaatcacaattgcatgataattaaaacacagaataaaattcattaaggatgacaaaagcacgtaatactgggattaaaagctacccggtcagcctgttgtccgaaaaatgaaaaataattccaagtttaaagaccacttggccggtcaatatgtcttagaaaaggccatgaggccgaataagatacatatatatatatatatataaaaaaggagacaaagggaagtgtttaaacagcttgagtcccaggctcttggttcggttcttctaggccaactggagcaggaggatctgttatttgaatgggaggagcatcagcagcctgaccgaaggttgagggagccgcctcggttccaccataagccacttgggccgcgcagtacttaaggtacatgtccttagcgtcgcccaagtagtcaaagtcggcccgaggattagccttccaaaaatcaaagaagagctcgagaccagctgtctccaaggcattgaccttctgcttcaacctgtccaccttgcccgaaagctccccctccttggcatccttctcctccttcatccgatgaagaactgctagtagagaagtcctctcatc

SEQ ID NO: 102886 - DNA, 927 bp, Cannabis sativa
accaaacatgtcaaaagacaagacccagggttgactaatgttgccgttgacaaagtttccatagtttgtactgttgtttgggactaattcgataatattaaaattaataaaagaattctcaatagttaaaagataacaactctcaaataaattatatttaaattaaacttatcggtaaatctctgtaatagttagccctcctcaaaactgacctacaaattaacaaaataaaactttattaccacacaatttaaagaaaataattaatgtgaataaagatgataaaacaattcatattataatattaaggcttgaaacacttatctgtcagatctgaaaaagttatttatagaagacatgactacaaaaaaaaaaaaaaaattccttgtgcccattgaccatatcacaagatacccttaacaattagaggcaagccataaaaatggcacaaacaaccataaaaggcatgagaacgatcaaaaaatggtgcaaaaatccagccgtcatcaaacctaaatatcactattaaactctataatataataaaaattattaattaagattagatacactattgaaataaaaattaaaatctcaaaaataactactagtgtatataattacaattacttatgaataaaatattttactaaaaattaatgtaaattattttaacaaaaatatatatataaatggtatttatttaattattaaataaaattaatataagatatataaaaaaattattaattaaaagattatataaatgataaaatatgaaatagcaaaaggtcaagcaaaaaatcaataattaaagtacctaaatggctaaaatcaaagctgaattgctgaaaagtgttggtgctattttgatttcgtgtgttgtgaagatgaataatgaaccaaatctggaagatcagtatgcag

SEQ ID NO: 102887 - DNA, 516 bp, Cannabis sativa
ttttggtgttttcattgagagcatcactcgagtcccatagttgccttcaagtttttagcgtttgattagattctttccaaaaggaattcataagtacaaaaacctgtgaacttgtagaaaatagtggttataagatccactagtgtagatcgtgatgatattgttaccgccacctcaaggggtggatcgagagcccctggcttaagaccacaaccaaagataccaacaaagacgggtaatggaactagtgtttctttaaccccagatgagctgcatgtggaccttggtgaggatcctatggatcatggcggggatcttccagacctcggcaaggagccggagctcaaccctgagattgagcaactaaaggagattgctgctaacttgcgatagattatgcgggagtaaagaccgcttggctttaatttggaaattagcagataattagggtttaattatgaaatttttttattagtattgaattatttatttatgatgatttatttgaattcaaaa

SEQ ID NO: 102888 - DNA, 565 bp, Cannabis sativa
aaccgagctctccatctccgattgcccatcctaagccgaccccaaaacatcccaaatccctcacagaaaaaacaaaaaataatattattaaccttgaatttaagttactctaaaaatccactcagctaagaacaattacagaaagaaaccctaacaccaatgaaataacaatatccacaaacacaatcatatatatagataaaggggaaaaaattcatactaccggggaaagggattcatagatcgagaaaaacgcagagagctcgatcttcctgagaaatgtcttcgaccttgaagcatggacaattgatagatctatcttcttgtttcttttgtttcgcttgatgttaataaataaatgagaagccaaataaaactcccccaaaatcttgttttttcatcaaaaccctaatcttctttcccaaaaaccaaatactcagatcaagtaagaaaaccccctttgccatctctgacatcgaaacggaacggccttgcatgaggtccaagtcccgaaaagagagagggtttgatcttctatttcctgctgcttcgaccactctcgact

SEQ ID NO: 102889 - DNA, 506 bp, Cannabis sativa
gcatgattccgtttttattattataattgtcaatttgcatattgattttgatagaaatatttgttgtgtgtaaattgattttcaatcaataaatatatatagaaaatatgttagatttttatttaaatttaattagttttattaaattcaagttgattgaatagttctttgttgtattattccatattattaacggaaattatagtaaatggtctcaattcataggactatgttagtatatgtcctcattttaaaaaattatagcaaatgaccttaaatcataaaactatattagtaaatatcctcatttcaaaatcattaatttttttttttagaattagaagcaaattatttaaaaattatggtatttctatattaattttgttaaaatcttttttatttaaaagttaggttgattttattaattttttatgagttgttgtgggttgttagtatataaattttgttgtacggtatatttctattttgttgtatgatatattatt

SEQ ID NO: 102890 - DNA, 684 bp, Cannabis sativa
tctttgtggcagccaggtaagggggtttatgctaaggagattgacaccaaccgttatctatttcaatttttctatgaaatttatttagaaagggtagtagattaatagagttcagtttgtttttcagaagttaagaaggggagatgatccaaaaagggtagtgttaaacaatctcgacatctgggtgcaaatccacggcttccaaccggggtttaaatctgcgagtgttgtgaagaagttgggtaattttattggtacgtatgttaaggctgaccctaagaattttcagaatgtgtggagagattatatgcgtgttcgggttacattggacatcactgctcctttgaaaagacgcaggaagctccgacggactgcaatggaggacggtttctgggaaaaattcaaatatgaatatatccccacgttttgttttatctgtggtatcataggccactctgagaaattttgtcataagctttttaatacaccagccgagatgatcataaagcctcatggtgcttggatgagggcttaaccacgacggaggaaaaacctggtgggctctcactggttgcgtgatgggaatgagatagacgagatgtttgtcggccggttcaagggtggcgcggcgactgctccggtgatgttacaacagtagtcgagaagtgaggaggttgttggagg

SEQ ID NO: 102891 - DNA, 944 bp, Cannabis sativa
  modified_base (435)..(437): a, c, t, g, unknown or other
ggccaaatcaacactcgccgcggcgagggaatctatggccgcggtgaggtttcgtacggacgaaaaatataaagaaaattgcgagaaagagaagaggggaagcaaattttagacctaaaagcagtcaagaacggcaggaggagcagagtggcggcccggattcattccaccaacactttctttcttccttcctttaatttttctttatgttaaattctgttttaagaatggttatggatttgaacatgaactaaattcccaattagggatgatgatgaatgttgtttaaagttttccctagttaatgtcaattgtcattcctttcatcttgatttgtgaaattatcaatatttgtgtttataaatttcatgtttaagcttgatcaccttttacgtgttctatgatctcaattcaaaatctaaaaagtgagaattnnnaatgctaaaattggataatctaggctttatgtgaaacaaaagtatttgcgtgacctatgtgacaattagattattgcttaatgctgattacatgtgattctacttaagagattaattagagaacatgtgatttagaacctaaaagatctgaaaagagttaggttaaaattgtataatctgtcattcacatcaagaaaaaggatagcagttaggcattaacaattgggtaaacaaatcaacatgattctcttccctattttctcatcttgattaatttttatctgtctacttaagcttcttgaatttttattctgtttttaattataaaactattggtttgccaaatagaatcataaatttagtctagtggtattcaatccaattccctgtggttcgacttcacatgtgtgagtttactactttactacgtgcacttgcgtactatttacaattctcgtaacaaaacttatcctcatctttactatataatagagttgtagttaaata

SEQ ID NO: 102892 - DNA, 696 bp, Cannabis sativa
taagtagtgaacacacaccttccccagaacctgaaatgcaacatcacttttatcccggccagatcgagggtcaaggctactgatgcttcatctgggaacttagaaaggggtggaagcgctatctaccgtccaaatggacatatattgtccatccagatatcgttgacaccttaccggtaggccgtccaaatcctgctgatgtaggtaaacccattgctaccttcgttgtaatcattgccagacacaccaaccagactctgcccaagtctaggatgatggcgcgtaccaaacaaactgtgcaaaaatcttctttattcgacccacacgtagcccatctcgctacgatgccgagtgcagaacaggcccgacctactactcaggaagaagatattgttagggacgttgaagtccaagagatggatgatcagggcgagaaccgtctttgtactccttctgaagctgaggaggaaggtgcagcttggaggttgccctttggtagttttaatgaagagggacaacttgtgtttgaggtcagggaagtcttggaggccggtgaagattatgtcactgaggaatacatcgaggccgttcctctgagaagacaatgggaaggtaaagaatctgctcaagcatggttacttaggggatgtggaatgattcctttcctttcccaaccagttggcgaccagtccaagg

SEQ ID NO: 102893 - DNA, 543 bp, Cannabis sativa
tttttttaataaattataaaattttattaataataattaactaaaataatagtctgcaatctaatcacgacatctctcgcgttgtaaaaacgatcaggattaaaattaaaaaaacaaatcaaataattaacagtctaattctcaaatcattttacaaaaaaaaaaattaaaaagtaaaattagaatgaaaaagattgcagcatcacaattagcgttgataatgtctttattatgttttattcactgcttagaagagacaacagtaaaaattgttgcagcaagttcattcaaccccgaactcaactattatataaggtacatagctgcactactaacaactccttcagttgcagagaactgttattcccaactactaataacgatttgatggcgagccatcgaagaacaaagaagaatcaacaaaacaaaacaaaacaaaactatgtcacacagacaagactaaaacactcaaaactaagtcacagaaacaagactaaaacactcaaaatcatatcacgaagacaaaactaatcacagtagcaa

SEQ ID NO: 102894 - DNA, 568 bp, Cannabis sativa
  modified_base (48)..(69): a, c, t, g, unknown or other
ttcatggacaatcaccaaattagttaaattgaatgaaattagacaaannnnnnnnnnnnnnnnnnnnnnaatagttcagggagaatttttaactgccaacaaaatttagggagtatgatttggtagatgtcaaagttcaggggtaaaaatcctaattagccttttgtttttataaaaaatgtagatttgcttaagtaaacataatatttgtttagtttaatttataatttttttccaaaaaaaaaaaatatatttttattaaatttttaactgtttttttacttgttaaagtatgagtttataaatataaataagtttgatttttttaaaaaaaaaaaaaataattcatttaaattatttattagattttcaataatttagtttgatttttaaaatacgtgttgataaataaaataaagtttaaaaatattttttaaagtaaaattagtactttttattaatttaatatttttattcaattttttaatatatattttttttttgaattaataaaatattataacttttttttcaatcaaaagaagcaaaattttgtattaattaaaat

SEQ ID NO: 102895 - DNA, 665 bp, Cannabis sativa
gaaaaagagaaagtagtagggcccacataaattagggaaaaaataaaataaaaggtacttttcccacctatttttataggaaatatctttccctatttaatttattttattttaattttaattttattaattaaaaataaaaaagataaatatgccctttaaaatctataaacaaaatataattacatgttctaacaatgaaaattttgtcaaattaaaatattctgattacctttcttatttatataaacaaaataatatgattatgtccgtacagtttagtaaacagcataataaaatattgttttcgattattttttattttaaaccaatttatttcccgcattgattattctaatttcagttacagtttagtaaacacgtcattagtttgccagtaaaaaaaaaacatatgtattgctggcgttggttgagaaatcttttgccaatcctaggcatattatcaacgttattgtacgttagtaataaattaacttttgttgacgctaaataaagcgcaccaacaaaagttgcagttattatggaacctaaacttaaaactctttataaaatgaccagtaaaagtatataggtgcatggcaaatgactatttttatagataacgcaaaaatgcgtcgcggcgtcggcaaaaagctctatttttg

SEQ ID NO: 102896 - DNA, 967 bp, Cannabis sativa
  modified_base (149)..(156): a, c, t, g, unknown or other
acgaccgacgaatgtcaccaattgaaagatgagatagaaagtctcatcgctccaggccattttaaacagtacgtgaaaagatagggccagggattcaacccgcccagtctacccaataacccaaaaaccaggggttacaacctcttccnnnnnnnngagaggacatcctggttatttcgggaggcctcatattgttggggaaagcaataaagcctagaaaatatatgttgaagagataaagaacgagcaatcagcatctaccccagaaccttccaagaaggtgaaaaccgaggaatctcccaatgtattcatggaggaagacgagaaaaatgtatggtatcctcacgtcgatccattggtgattaccattcaactcaccaataaaaggatcaagagggttttaatagacaatgggagctcagcaaatatcctttataaggaaactctacggaaaattgggctcaaaaaggccaaattaagaccttgtacggtgaatctttgcgaattaaccggagacagcgttgccagtcttggcataatcgagctcgcattaaccttaggcgaggcacccttatctgccactgttatgcaagacttcttagttgtcgacctaccatcggcttataacatattgttgggtcgtcaagcactgattggactaggggcagtcagttcgatcaagcacctatctttgaaattccatacacaagaatgtgtgggagtggtgcgtggcaaccagatgctggctcgcaattgctatcgcattgagttgcaacataagaaagtcgatcattagttgatggcgatcttagcacaagaaaatgagaagaaagacgaagatcttaagccctgagtccaagatgagtgaaacctattgaaaccaattgaggaattggaagaggttattctcgacccaggaaatcccacaaggtgtgtatacatcaggaagaacctggacgagcagctc

SEQ ID NO: 102897 - DNA, 588 bp, Cannabis sativa
gtacaaaggttggcttccacctataaaggctagcccccacctacaaaggtcgacctctacctacaaaggatggcatccacctacaaatgaaagccatcaattgatgtgtagcctgtaggctggcaggcacatggctggctagaccttggcaagtacatggccggtcagaccgtagcaggaacatggccagctagaccttcataagaacatggccgaccagtcttttcccttgcaatcctttggtgcgtagccttcatccgtggatagcaagctaaactgtgagtttggccttaacagcccatgaaagtaccacaaaaataacatcaacttccctattttcaaggaataatttagtcatttaaactttattaattaattatgtaaatatagctttatttacctacttttaagggacattaagaatgtaagttctactatataaagagcatcagtctaaccctaattccctaagtctgaagtcattaagcctctaagctccctatgctctcaactctaagtccaaaaaccctaactctctcttctcctctcttatacatgcctccaaggcactctctctctctctctctc

SEQ ID NO: 102898 - DNA, 582 bp, Cannabis sativa
gaactctgtgagaaagcgacttgacagggtcattgcctgtgccgattggtgtgtgaagttccctgaagcagctgttgtccaccatgcgattatggcctctgatcatgcccctgtggtcctcgactctcaaccggtcacccagaaactccattatccgttcagattcctggaagtgtggactgcagatccgaggtgcacaaaagttatccaaagagcttggagtaaacagtgttatggtcaagcgggtaatcgtgtttgtggtaaattgcgtaacactaaggatgctctcaaagtctggaacagggatgtattcggtttttgcgatcaacaactcaagagtttgtatgctagactgagttctcttcagtctcaagttcatgcgacgacttgcgaagaagaagcggagattcaactgcgaattattgagctagaacagagacaagaaagaatatggagacagaaatcccgtgagttgtgggtggctattggtgactgtaattcgaagttcttccatacagccactttaattcgaagaaggcgaaattccatacgcgcgatccttgatgatggtcaagattggat

SEQ ID NO: 102899 - DNA, 610 bp, Cannabis sativa
tctaaattaagttattattaaattttaatttgataaaaattgagtttatgatactattttgtatcattttaagaaacacaaagtctgaataatcatttaacaaaatagaaagtacaatcgatacattttgcaaaataccaagtgtagaatagtgtgataatttctcgtttagtaattttgtttatatttgtaggcattttttcgaattttttaatttgttaaggagtggggcgtgctatttacaaatattacagttttattgtacttgattttttttgaaagaaagacataatccattaagataaatccaatgttatagaagcactcaaaaatcgtggacaagtatccatccaaacacactctcctaaactagtgacagctgttgccagtgtgtgggcaacaccattcaccgttcgcagaatgacactgcaagaaccaccaccaacaacaactaataaagaaaaatatctaataaaattaactgaaaactaaaattaaaatgaagcttattaatccaaccaattgtcactgtagaattactattaataatggagatactgaaactataatgatgtgcgagagtcaagcccagacgaatagcaagcagctc

SEQ ID NO: 102900 - DNA, 641 bp, Cannabis sativa
agggcactgttgggtaagtgtatcaagtttcggtgccactctgacgattgcctcgaccctggttcccccagaacctcttgttctgaccaaagccactggttgaagtatatgcctttcttttctgatcagtggttgagccactacctcccctgctaaagcctgatgcaggaggggtaggagtcctgccaacaaccggagtcctatgagactctactatgcatcccactgcgccctcagctcgtagtgccttatccaccatttcagcataggtggcactgtcgtcagtagtgatcatcaaatcatgtctgatcttcgcatttaacccatccaggcatttctctaacttacagaagtcggttggcacaattctcgaggccaacctcgccaaacggtcaaattgcgttgtgtactcagtaacactcatgttttctttctgagttaattgggtgaactcttttcttttggcacttttgactgcctcgttataatacttggcatgaaacatctcctagatttctcccaggtcattgtgctaacgtcatgaatcatggacaccatttcccaccaaaccagagcatcttcttgaaattgaaaagtagcacagaccagtctattattgccagtgacgcccataaagttca

SEQ ID NO: 102901 - DNA, 566 bp, Cannabis sativa
aaataaataatagtgaattggtacaccaaattgtaaaattttccttaaaaaaaaaagagatagtagtaattagtggaagtgagctgggcttgggcagtagccgagctgagttgagggccataagtgaaataaagaaggcgctcatccaatagtttttcaagtcaaaatgtgcagtcattagcaaccagacatagtatatggaattagtgttagcttatgtggtccccattttgttttcttttttatatatttgtatataatactgtaccttatatatgtctttatatcatttaaaaggtagaaagaagtgaatgcaattaatgtatttgcttccaagcattcattcatctatacatacacattcaatattatataatttaaaacaagatatatatatatatatatttactaacatgggataagtcaaatgcataatcctgttagcttagacttgcagacaatataataacaaatattaaatttctcaacagcaccaccacaagaggaacacaccatttcttttttggggtcaagatgttctcagaaaaattaattcaattttattt

SEQ ID NO: 102902 - DNA, 525 bp, Cannabis sativa
ttatttattattttatatctttcttgagccctaattaattggattttgaaaatctcaataaatattttggtactttcatcgagagctgaggaaagtttgctagtcatcgtaccacctcaaccatggtgaaaacacgaaaaaatataagtaagaatactcctctagatactattatggaggaggcagactccatcacctttggtctccagccaggcgatgtaagcgaagaagatacaaccaatgctgagaaccaaagagaggatgctgagaacgtgtttgatggcactgatgatgaccagaaccctaaagacatggaagaggaggatgatggtgataattatgtgaaggaagggttgctgggagtgacaaaaaacctagaggctactcagacggagttagcagaacagaggaagctcactatgaaaatgaaaaggatgatggagcatctccaaaacaagtttgaggacttggaaaagtttgatgataagcctttggtgtaagtaatggccgaagagcgtgctcaca

SEQ ID NO: 102903 - DNA, 554 bp, Cannabis sativa
  modified_base (52)..(52): a, c, t, g, unknown or other
  modified_base (133)..(142): a, c, t, g, unknown or other
agtttcgggctcagatcttggtgatactctgatacaaaaaggatacaagggntagagatctgagtagaaggagtcatttaattctgctacacccagtttctcataacatttatgtgtttaaattacattgttnnnnnnnnnnatattaggatgttaaataacataatggtaataaatctagattctgctaaaataaattccaacaaaatgaacaatccgattctagccaagtatattggctttctaatgaaatcagtcaatcaaggacttcttctttttaacatatctgtaagtatatctcaattttttttaattattttatagaaattattttccaataataatggcttcttttgctctttcggtctctctctgtcctacagattccgaggattgtgcgaaggatcaacagagttgcaatgggcgtaacggttatatgggagcaattgactgtaacgttcgatgatcgcagcagtagtgagatgagtgatgggtctttcttgcgatttgtaaagggaaatttgattttctatacttaaaaaaccttaatattt

SEQ ID NO: 102904 - DNA, 509 bp, Cannabis sativa
taaattgcaaatttattggtaacttcttcaatgtttgcattgaatttgttttgcagactattgttttagcaatgattatatcaacaacatcatagaacatcagtaccaattcaatcgaggggatctggcccagtattatgtatcctttctaaggttatttgtgtgctcttttaagtaatttctgtttggaaacttgggccttctttttgttcatttgtgataagccaagtggttttgctggtttatttctgttgtaacaatttcttgttagttagctctttagttgtaattatcagcttactctttattgttacagctttctctataaaaaaggggctggtctcagaagttcagtacatttgcaaaaacttctgagacccattcttgattctctcaatataacttttgcgtagatagctcatccttattttttctctttattgtttcagtctagatttagttattaagtgagaacttgtgtcacttctaactagtcttcatgtctctct

SEQ ID NO: 102905 - DNA, 697 bp, Cannabis sativa
  modified_base (50)..(61): a, c, t, g, unknown or other
ttcaattaaatgatctttgaactgcaaatccatatattctccacccctannnnnnnnnnnnatctttaaggttttacccaattggttttctgccaatgctaaaaattcctaaaacgtttcaaatgtttcagatttcttatgcataaggtaaatatggccatatctagaataatcgtcaatgaaagtgacaatgtaatatcccagaatataaatgatatttaaatagacatatttgattaaataagtaattattttgataatgaagtaagattatgatcttatctagggtaattattaaggattcattgaatgatcataaagcgtaatttattaattacggagattatattgagatatatgtgtaacgaggataccattattgaaataaaaatattttatctggcccggcgactgtggaaatttaacgatgtggttaaaaatgtcacgacattaatgggaggattattttgagggtatttcggactaggttaaaaattttagaatgtcggtttaatggattagtagaattaccgaaatgcccttaggttattttttttatatttaagtttctttggagggtagttttgtcattctttaagaaaaggtatttttttttttagtttaattgtttatgagctgtatattttttttttttttaaaaaaaaagaagaaggaaaccctatttaagggaaaagct

SEQ ID NO: 102906 - DNA, 918 bp, Cannabis sativa
  modified_base (862)..(864): a, c, t, g, unknown or other
ctttactagggcctcctgtgctgctgccaactcttcaatcacccgcactagattagagtcatgttcataatacagaccatccttatagtatccatctttatagtagtcactatcatcatcttcatcataagtctcagtatatcagccatcctcacgaccttctccaacattttcgccattcatttctggattctcggtagtagtattcttctttgggttctcgattgtagctacgccttctctaccattttccacctgtgcgtctactgcatgagaggtaccttcctccatgaccgtatctaatggagttcttttgccaaagttttgtcgcgtcttcaccatgattggagtgtgatgaacactaccacgcttccttcgactcccaatgaaagcagcaaaatgtttaccgagtttttcaaaaactaaatattttgagagaataaaggaaataacaagtaataaataataaaaccagcaaatttttacgtggttcaggcgttaatgatccttagtccacgagtctatattattagcctctttgagcagaagttttgtgattacaatgtggtaatcttctgtggaataagatattgctagggttttcggcagggtaacggtagatgaaaagttgttctgccctgccttcaaaagaatgaggctatttataagcacacatggggtaaagggcataacccttacctacctagggtttcatcctcctcacgctacaaaagcatgtattacaaaagaacgatctaaccatccactgggtggaaccttcttcatcgtgcggtgtggaggagttgttgaggacttttgtatgaccttggacacgtgttgtccatgttgggttttatgcccnnnataaaactcatttcaatataatagatcggaagagcgtcgtgtagggaaagagtg

SEQ ID NO: 102907 - DNA, 847 bp, Cannabis sativa
agaaatgttgagtttcaggtgggagatcatgtattcctaagagtgtctctaatgaaggggattaaacgtttcagaaagaagagaatgttatgccctaggtttaccaggccttttgagattctgaaaaaggttagattggtagcctatcgcctagctttgcctctagcactataagtagttcataacatattttatgtttctatgttacagaaatacgttttggatcccactcatgtgttgagtaaaaacttagaactctagccagacttattttatgaagagcaaccagtgtaaatccttgataaaaaaggataaggtccttcagaataagaccatagctttggtcaaggtactctggaggaacggtaaggtggaagaagccacaatggagttggagtccaatatgagggctcaatatccaaaattgttcaagttagattttgaggataaaatccttttaaaggggagataattgtaataactacttattttatctctgagaattactagataattagggtctaattttaaaagtatacttttaattattatttttatgattatggagatatatttgaattctagatgtgctaattatattgtatgtaaaattttatattatttttcatattttatgtccggtaacagtggaatgcgacgtatcgcctataaagtcactatgttgtggttagtattctagaaatagtagggcatcttagataaacatttagtatgtcgagattgtttggggtgatgaatttggaccataatacccctaggtttcaaggttacttcttagtgaagtaaaaattatttaggttagttttgttttaatttgtattttttg

SEQ ID NO: 102908 - DNA, 623 bp, Cannabis sativa
tttccccagcaaatgctacaccaaacaaaggagggagagtgacctagagaactttggaggaaagaagagtgagggaaatatctagcagataaaattttggacaccgttgagtttggttgtttcaagatacgccaggcttgcttggcaagaagagcttggttaaaatgaaccagggagcggaagcctaaccctccgtccctcttggacctacacaacttagtccaactttgccagtgagttttggggcagttgttgtcactgacgccccaccaaaaattggccattatggactctaaggaatgacaggtggccaccgggagacgaaaacaagccattgagtaagtagggatggcctgaatgacggatattagaagagtctctttgcccccttttgaaaagactttgttcttccaattatggagatgaccccagaccttgtcgtgaaggtaatggaaaagttgcttttttgatcgaccgatatgctgggggagacccagatatttttcaaaagaggagcggaccgggattcgcatgaagtcagaaatcaaagtttgatccctgagctccacatttggggagaaatacagcgaggatttttggaagtttaccttttgaccagtggc

SEQ ID NO: 102909 - DNA, 687 bp, Cannabis sativa
caaaagtaatgaaagtgggctggggcagtaaaaatgttgtttttgccgtgtcccagtataattgtaaagttttggtccaaaagcagtatttttgtaaaattccctttgtttttggttttaagttaatgggcttttttattttaatttttttttttttttgttattgaaaaaaaaaaatatgtttaaaagaacacatatatataattttagaaatgaaaaaaaaatatatattaaaatgtgtcataaaaattatattatattcataagaatgtgttagcaggtataatttatggcatttggctataccaaaatttatatataaataagaaaaagtatatgaatatgagttgtataaatagtagcattaaagaaagcttcaaaaatagacttttttttttttgaaggcaaaagcaaactttattagccagcaaattcagctaccaaataaggtagcatatcagttgggacatcccccaaactgaaactacgatcaggatataaaatggaagctcttgcgagacaatgagctaccatattagccgaccgcttaataaaacaaattgagacatttttcaactctcgaagaagacatttacattccgaaataacaataccaaataaagaaatcatcttcacttgactccgaagtgcttgcaccaccgttagacaatcagtttcaacgaaagt

SEQ ID NO: 102910 - DNA, 749 bp, Cannabis sativa
ttcatttatcacaaaatcaattatttatttatttccttaaatagaaatttatttccttaaatagaaatatatttcccaatatagaaatattcttatactcccaacattccattatagttcacacttaataaaactaattaattttcaaagaaagtgtgacagcctgtcttgaaactcaattttgagcctggtaactttacaattgagttatgaccatgagacacgcatagatccttcttaacgatctttccaatgcaagtttaaccaagtcatttggataaaaaaataagagagttatgcctattttaccaaagggcattatgtacttttcagctccaaatccgacatgtgccatgtcatcatgattcataacacctcatcatggtacaagtcagtcgtgcatgttcttgaacacctcggggtgtgttttgaatttttttatggtgactcatattttggaggtgttgggaccccaaaacctcattttgacatttgaaatcctaacaggagacctgcgccatcttttggttccaaaagatggcaatggtcggctagggcatgtaggaagcccttgatggtgtttctttcttattttagtaatatggatactagaaaaatactttggccacattagttctcgaccaattggtagaagagagcaatgtcatcttttgggacatgaagatggcagtggtcggctatgggtgtaatgaccgctctagtaatgtggattagtaaaggcaattagc

SEQ ID NO: 102911 - DNA, 974 bp, Cannabis sativa
  modified_base (909)..(914): a, c, t, g, unknown or other
tgttagaaaaagaataacggcaaccatcaaatattaaaatttaaatttagtattaaattaccactaaaacaatataattttagcactaattttttgttattctatccataatactaaaatttatattaaaaaaatattttttatttttatattattttattaaactatcctacatcataatatatataaatataaatttaatcataaatacattattttcatattaaaaactaaaaagaaagaagttagtctacatcccactaatatcagtgggacactaataacttttacatgatgtatagaataacaattagagttctaattggagcaatttggttcacatatatattgaatcaattttgtgtctaaaatcttacaaatttagctgcaaattaaatcttacaaaattgtaagttaatttttatttttggataacttaatatgatctctaacatattcataatatatattttttggttatcttactatatgttcattataattcaattattttactagtgatgtattacatatagatccatgtatataattatataatattgttgactaatttcttgtatttttttctattagaaaaaaaaactatatttcttgtacttaagcactaagaaaaacagaatcactacaaaaaaatctaacttttagtcataataaaacttgtgactaaaagtgaaaaagttgtgactaattataaattatcattcctatgtcgtgattaaaagatctacattattaaatgtattagtcacaaaaattacaatttattgtgactaaatgtatttttagtcacaacaagtcacttgttgtgactgtgactaaaactaatgtagtgtcaacttatatctaaatactatattttagtgacaagtaacattttgttgtgactannnnnnacatttagtcataaaaaaattatgttgtgactaaagttgtcaccaaagataacagttttt

SEQ ID NO: 102912 - DNA, 904 bp, Cannabis sativa
tactattgttgatgatagatctaggtttacttggatatatctcttgaagcataaatccgatgttcatactgttattcctcaattcttgtcctatgtagaaactcaattcaattgcaaaatcaagaagtttagatctgataatgcacctgagcttgtttttaaaaatttattttcaagttatggtatattacatgattttacatgtgttgaaacacctgaacaaaatgctattgctgaaagaaaacaccaacacttgttaaatgttgctcgtgccctttgttttcaagcacacacaccactcaaatattggtctaaatgtataatgacagcaacttatcttgttaattgtattccttctcttaacttgaacaataaaactccttatgaattgttgtttcaaaaacaacctgattacactcatcttaaaacctttggttgccttgcttttgctactaccctcactgccaacaggactaaatttgctccaagagctaaagcttgtatctttcttggttatcctcaaggtgtgaagggatatagattgtatgatataaacactaaacatattttttttatctagaaatgtggtatttcatgaacatatttttccattctcaaaactgaatgaagacactggtaatgttgatcccttcatcactattattttgcctactgctgatgtttcaaacacaccagtcaatgattatccctcaactaacactgctattcctagtgttgatgattctgtgcaggaagaaaattctggtgcaactgacattgaagtcgagcccactgatgtacccaacacaccagaaattccacaaaatgcaccagcagtggtgcctagacgatctagccgaactacaaaaccccctgcctatctcagggattttgaatgctactc

SEQ ID NO: 102913 - DNA, 808 bp, Cannabis sativa
aaaactgggctataacagcctcaggattggggaagaagtgaaggcgaggttcgagcttattggccttccaccacatacacgctccatcttcaaagcacttttcatagtgcttgcaagtaattggagctagtaaagcatccctctcggccttggcagcctctttacgagttttgtcccagaactcacgaagctcctttagttcaatagttagattagccgttgtctgcaagtcagtctgatgcagctcctccaaagattgaagcttcataaggagctcctggttctcctctctggagtcccgaaggtttttctcgctcgaggcgataatgtcatccttcgctttcagagccgcctgatgattctgctttagaagggccttctcctcttgggcttcattgcgaagggcttccatttggtcctctaactccctaagcttcctcatgaccccgtccatgccgccaagcttagacacgatgaatccttgatcatcaaagtcttggaaagctgatcggcctccgcgacaatctagcaatcataaaagataaggttagaactgtgaaaataaaagcatataagagacgtagaagattttcacttactgcagtcagggcaatgctcatgtcttggatctggtatacggggttggaagaagtgcatgccgcatatctcttggtgggaagttgggtcaaatcagtaaaaatgactcaccatttatgaggctaacaaagccaaattaggccccacgaagcgtttaaaccagtccgtcaagggatccaaatttaagtcccagacgtccccagcatattcg

SEQ ID NO: 102914 - DNA, 630 bp, Cannabis sativa
  modified_base (29)..(60): a, c, t, g, unknown or other
  modified_base (596)..(600): a, c, t, g, unknown or other
ttatttcattgttttagagatattcatannnnnnnnnnnnnnnnnnnnnnnnnnnnnnnnatttagatcctggtaaaatattcccaacaggtacgacccgcgctagaactgaggggaggatactgagaacgtgtgtgactaccgtgatgatggccaatacctcgaaggaggagatgaagaaggtgaaggtgatgactatgttagagatgggtatattacaaagttggatatcactatgaccatgaccaaaacctattgcgagtcaccaaagacttagaggcaactcaggcgaagttagatgaacagaaaagactcagtgcataaatgtaaaagatgatgaagcgtatgcaaagtaagtttagggatttgacagaattcgatggtgaacccgcggtggaagtggtgaccgaggaacatgcctagaagcaaatagaggctgagacctcaaatcctcataaggataagggcaagggaaaactgggcgagccctcacaaaagcccgcaccacttcctcaaaaggatacaaccgcagttggttagccccaggcccggccctgggcataggcgggctagcctgtgcctagggcccacccagnnnnngggcccaaattttttttttcctcttttaaa

SEQ ID NO: 102915 - DNA, 577 bp, Cannabis sativa
atatttatgagtatttttttttgtgttttttttctctaattggttgattgatgaaactggtttcaattattttcagtgtatattctttttgttttgtttttataatctatattactgttgtgtaacgaaattagttccttgatgaagaaaccactttcttggtgaagaaatcggtttccactttcttggtgatttttctagtgatattgctggcgacaatgccaattttaacgacttttttgatgctttcaataactccggcaaattttccgacaccaccatcaaactccaaaatagtcgttagaattggcattgtcaccggaaaaattaccaagaaaccagtttcttttttatttcaactgtaatttttccagcaacaatgctaattctgacgactttttcagcgctggcagcaactctggcgactttttcggcaccggaaactactctgacgactttttcggtgtcgtcagcaatcttcggtgactttttcggcatgagtgttaggctaaaattagtctaagtttcgggtcatattttcggttagttttcactctttgtttctagttttagggct

SEQ ID NO: 102916 - DNA, 654 bp, Cannabis sativa
aaggaagccaaccttaataatgtagggttcaacacctttcttagggggacgaaaacaaagtcgtgtggaggcctttcccatactcttggtgttggactaataatggatcgtgggtttcataacagatgaaaactctctcccactcactattttaaaatgtgtttatctttattaaaatcattttttaaaaaaattaattttaatctttaaccaagttgtaatacataaattacactatatatgggaaaattataggaatttacttttttatggcataaataaataatgctaaaggggttatgtgttttttttttacatttatatggactttttatatgccatatttttgtaaaaaaagatagaaatctcatatttgtaaacaataataagtttttccagaaaagtcgccagtcgctgacgtcggaaaagtcaccagaaaagttagtgtcactgaaaaagtcaccgtcgctggaaaagtcatcgttgccgaaaattcaccgtcgccaaaaaaaattactggaaaaatcaccagaggtagatgtctcaaatataaacaaaaaaagaaccggctctacaatataatgaatgaaaataaataatacaaaataactcaaagcggttataattgaaatataactggttttgtaacataat

SEQ ID NO: 102917 - DNA, 664 bp, Cannabis sativa
ttatacccgaaattcggttgccatctcagttgaggacacgtatcaagataaagagaatatggattgatggaatcactttttatggaaaaactcagtaatttcgtaagtataagagtatatttgtgacctggtgactgtaaggtcttaggcgaggaatcaatatacaatctggcgcttagtatattagagacaaaccatatatcactgaatgtgaatagcgaggcatcaaggacagtacacataggaagaagaaagcgacaattatcaattgcaaaagcccttagtgtataatgtacaaactaagtgtaacaatcggatcagctcgagatcaagtaagcgaggtgcccgtctcgctatgggaaaacttcctataacttcatccagtcccgtcagcgaggcttacaaccctggcgagccataagctatcattcaaatgagcttcaaaaaattctttgtaaataggaaccgcgatcgtcacaagacatgcatcgtcgacttcagaaggaaaaatggccccagctcgctgttgagaccaccgtaaccaagcttctgtcgagacatctctatatataataattaaaaacatgtttaaaaaatgatcattttgacctagtaaaagcgagaaaatcacagctatatgattttcaaatcataaccgcattta

SEQ ID NO: 102918 - DNA, 616 bp, Cannabis sativa
cagccattctggataatatacatctcggatcaagccattagctagtagcttgtccacctctttttctagagcttccgcctttactggatcgagggggcaccgcttctgctgaattggtggcatatccagattaatgttaaggacatgggttattacatgaggactaatgtcggtcatatctccttggcaccaggcgaaaacatctgtggctgcccttagtgctttaactattttatctttttcctccggttctaggctctttcccagccggaggatcttggtggggtcgaggtcgcgtactggcacttccttgacatcttccatatgttctacaattttttcgaatcccactcgggggtccaagtcatcttcttctgccaattctggctcgataccttcacggaccatcaacattgttaagtgggccgcgacattataacattgcctggcctcaccctgattgcccctcacagttcctactccagcctcctaggtggaaaaatttcaaacacaagtaccggatggacgtaactgcgcaaaagtctacgagggccggccgaccaaggattgcgttataagcagttgggcaatccaccaccacaaacgtgcagtactt

SEQ ID NO: 102919 - DNA, 522 bp, Cannabis sativa
tactaacttttgtcatttctttacaaaaatactgccagacggtatttttttacttttttactgtatttttttataaatttcatattgtagtatactgtacgtgttaagttttcactggtgttttactagtgttttttagttgttctactggtgtttagagttgttctgttttgtgttctactagtgttttatgacaatatttttgtaaaagttattccaaattctaatatttttgtaaaagttacccgcccattacactatttttttttaaaaaaatttatatatattttaaagggtcccaaaatcaaatttgtcttaggcccataaattttcaagggcagccttggttaagctaccttacacatataataagtcagtggttcgagtccccttcatctttatttttgggttcgccaatactcgcacacatatattttaattttatactataaataactttaaatactcaccttttttggtgttgtgaaaaaatccttgacaataatgcacacaagtcttgcc

SEQ ID NO: 102920 - DNA, 965 bp, Cannabis sativa
gtgataatcaacaatgtgatttacttacacttgtataagtagaatgtccttttcaaggcattagcaaagtaaactagtatcagatgtattggttatacaccatattggacggatattgacagtggaaaagacatcataaacttaccgttatgccttttctaagtcaatgtcacttaattgatcttaggtaaattgattttaatccgaagatggttaagttctagcctaattttactatacaggttctttgacatgtttgttacagattactaataggatttgctcaatacttgggaactcgatagttcaattgagtagaagcgttaatcatagatatagaatctatagcttctttagaagtaaaatgatggtttccttagagtttggtttaatacgataaataatagaatactcattttatattagtttactaaaatatcatttacaagtagttaagtattttaagaatataatacattgaagggtaaaacggtaaatttgtccttattcaatataaactttctataaaggatcattgactgtttagattgtaaaaaaaatggataattcataaggtatctatatttggtatatagatcattctatgtaatcaatagtgcaattttaaatctatagtggagtcagaaagaattaataagataggaaatttacttggtaaattttggatctacttattagaagcttagttacataggcccatggtccctacactaactgagataatattattttatagtctcaattaattaatttatttaatcaattaagattctaagtaagactatgtcttgcttgtgaaatttactaagaaatggtatatttgagaagaaaagagaattcacggtttgtttattaattaagagatcttggatggtctaattgataaatatatttaattagaatttttttttactaaatagttataattattaaatagataaagt

SEQ ID NO: 102921 - DNA, 528 bp, Cannabis sativa
atttttatatatatacattatatagattaatattaaaaaaaaacgttatataaaaacaatccatctttatgccgtgacacgtcatcaatttgaattacaactgcaaacaattggacgcgtgaacagttgaagcctgcaacaactgaagacgtgaaggacgtgatgtcatgacgtcagcacacatcacacacgtcccagtcagttttttcaatttttttttttaaaaaaatgaattaaattgaaaacggtacactttgatataaaaatgaaagcatcatatttttgtaaaaagaatgaaattaatgtactggaatgtaaattttcctatattaaatttcataaatctaaaagcacttgagttaaaactaaaaaaccaaatgagtacttcaaaataagagaagtaattataaagtcaagaatagcaagcagaatgccaagagtaaagacataaaacctaaaaccataacaaagttttgtgatcatcatatcttattggttgttacaaataaattacttatttcttttatg

SEQ ID NO: 102922 - DNA, 1066 bp, Cannabis sativa
  modified_base (176)..(183): a, c, t, g, unknown or other
cttagctttaatttagaaattagaatataattagggcttaattatgaaaattatttataagtattgaattattaatttatatgatttatttgaattcagaatgcattttatatgtcataaatagaaatttcataattttgcatattcagtacccggcaacattggaacgcggtgtnnnnnnnntagaatcacatcctagtatttttagtatagcagggagatatagttatacattgggaatgtcgggaatagtcgggatttcagaatttcccaaaatacccctaagtgattttaagatagtttagtgtgggtaagggcattttggtctttttgcccactttgtattttgtctttatgagaaattaattaaataaatacaatcaaattttttaaatgtatttggatgagattgatttaataaaacctatgttatttctttattttacaaaaataataaaagtttatcaaaaaccacattctctctcaaactctctctctcttttcgaacccaactagaaccagctagggttctttatttttccctgcaattcagtgatttctagcagatctaagtgtaatccaagccaaggtaaagtgtgtagaaacttcctctttgatttcttgaattgtaagaaaaggaatttttgcatgaaatgaggttttggttgttgttcttgctgttgttgtttgctcttgttttcaaaggttaagttatgtttagaactcaaacttggggctttaatggtgaaacttgattttgtgcatgttgagatgttttattgctttagatatgttctttgtggtctataaagcaggtctggaaggtttcattgagtttggggttgaattggttgagttatgattttttgttggattcctgcaatgagccggaattccggttcagagggacctgtaggaaccgaaattccagttggtccccaggaaaccccgcagaactggaattccggttgggaactggtctaccagatgggacaattttgggaaccttagtttttcccatttttgtgatgtttagggtttttccatgttattcatcgatagggaa

SEQ ID NO: 102923 - DNA, 577 bp, Cannabis sativa
gtctttctccttttctccttctcggatgtgcgcgacagtggtggtgctccggtcaccgcaggccatgaatggaggccacaaatcgtggtggtggttgaactctcatggttagctgggatgatgaaaaagatgaacaagaaaaaaaatgaaaaaattaatcataaaaaatttaaagacgaaaaagatgaacaacaaaaacctaaaaaaaccctagctgctcaatcatattttctcttgtaaaaaaaagtaaccgaaaaacctaaaacagaaggaaaagcaaaacctaaaaccagagaagagaagagaaatgagagagtgcatctcgatccacattggtcaggctggaatccaagtcggtaactcttgttgggagctctattgccttgaacatggcattcaggtgggtttttcttcttcttcttcgttttgtgatttattctcatttggatcttacttacaatgattttcttctcttacctagcccgatggtcaaatgcccagtgacaagaccgttggaggtggagatgatgccttcaacacgtttttgcaaaataaaataaaataaatttataatttt

SEQ ID NO: 102924 - DNA, 635 bp, Cannabis sativa
ttatggtcaatagtattgtcgtatgaacgttctaaactcaatacgcgtgagatgcgagataggattataattgggtgtatgcgcacctagttataatccattttaagtttatgttatgattatgcttttcttattaagtctgttgactctcagttattgtttacatgtgttggtaaggataaaggtaagtttgagcagcagtgagtgcgagcaatgaagattgtacatatcaaggtggttagacttggagtgttcgatctttaggacagaagactgtattttgattagtcgttacgcgataacttttgtagctaatattttataatttggttgtaactttttagatacgggatcccaatttatgtaaagtttattattttaattaaaggttaattaagtaaagttttaattaaatacgtttttaatcaaatacgttgaatagcaacagatacaacagttagctttaaatcacaataacacgcctaatctagtagggtattacaatttggtattagagccgccacgttgtcttctgaaaatcgtcatgatatgtacaatcatcattagagataagctcgactcacggttcagtaagcctttattttttttagtagtttgttttattagtatgttat

SEQ ID NO: 102925 - DNA, 571 bp, Cannabis sativa
agctgaatatattgtaagaaatttttcgtttttgaggataaaacagaaaaagagaaccccaaaatttatctcatgtttagctgaatagattatattttttattgtttttgaaagggaaagtcattgcaatctcagtaataagttcactggtgcgtgtttggaagtcactgttttttcactaggttatgttattatacaatattttaaaattttgaagtgaggtggtaattatatatgaatttttattgttttgtttggcgaaatatatgtgttagtaattatatagtgtaattacactcaattataataatttcaaagattgcaatggggattggaaagtgtagttgagatccttcaattgtatgtattgtgtaattaaataattagaaaaacacgccaaattgagaaattacctcaaattacactcaaataaggtacaaacaaatcaaaaccttgcaaaacttgaggcatagattcactatatttccttttgcaaaacatgtgaccttggtattttgaagataagaaattttgcttgctcggaattggagatgagatgtctgtttttaga

SEQ ID NO: 102926 - DNA, 1114 bp, Cannabis sativa
tgatcttttgaacacaaaacgcctttgattgtattgtcaacaactttcataacatcaggagacaaataatattgaccataatcaacattgtcctcatgaacatacataacagaaagaaactagttatataaaaagggaaaaaaagattcaaaatcacataaactggtttcaaaatatacaaaaaaatggttaaaacatgtaccacagacttaatactgggaactgacaattctagaccaccaacatcatcagacaaatcccgataataagcctgtaaaaaattaaataatttgattaaaagagaagaaaaccagtttcatacacaaaacaataagaaaaaaaaaattttgactaaaagagaagaaaaccagtttcatacaaataacaataagaaaaaacataatggtaactatattaaaaaaaattatattaacttcaaaaagctatttcaacaacaacataaaaaaaataaaataatggaacaaaaaataactttaaaaacggtgccaacatttaaaattagtttaatcaacaacaaattaaactaattctttaatttttttttttaaaaaaaaaagaatagtttcttaaaaaacataaagaaaaaaatacaatacaaaaagaaaaattaatcaaaaaatagtaacaacttaaaaaaaaaacagtttcaatgataatcaattatactaaagaataattacatataaaaattaaaggaagctaataatttcgttaatataaacaataataaacggatttacctctctatcagaagcaccaaacaaatcggctgtgtccatcttttcatggtttttggagttcatcttttcaatcatcccactcaacttagccaaatccctagaaaactcatctctaaagattgtcatctcattacaaatgcatacttgagaatctttaataaataataaacttttgcaaatattctcaaacttctcctcaaaatcctacaaaagacacaaaaaatattaaaaaagaaaatatgaaatgatagcaaaacaatttgtaaaaaaatgtttaaaaactggtttcttaccttctcatcatccacactcttaggaagatacacgggttgaaacttaaaattcttcaaaag

SEQ ID NO: 102927 - DNA, 515 bp, Cannabis sativa
gctattccgtgaatcttgttcctgcacagaatcaatgcctgcaacattagacaatatgtgaaaaattaatagttcacagcaacaaattttcaaataacctgcccagctaatcagcagcactaacaaacccctaacaaaaaactcataattaacttattcatcatacaaaaattgatcaaattaagaaataatcgtctgaaatatttccactttaaatctacaaagttcctttaatcatgatgcattaagaacagtattgacattttaagagaaaatatagtgctattaaatattttaaaacagaaaaatttcaagagcttactctctgtctccaaagaggaagaaacttagattcatcctctatatcatccaatctatgcacaaggtagaatacaaagatgagaaaatttaattcgtttcacttgagagttagatttgtaacatgagaaaaacaatagaaataatttcaacaatattgttttttattgaaattttgaagagattggatggttttt

SEQ ID NO: 102928 - DNA, 596 bp, Cannabis sativa
aaaataataataaatttttttatagaatttgttataaataatttaaaattttaaaataattataagtaattaatattatatattttgaattttgcacttaattataaaattttctttaatatcaacattttgaattgtgatagggtcgttgattagggttgaaataccctgtagatagtcaatgtaaggataaactacaatatttgagtgatataaacagtaatcgataccaatctaagccttttgaataagaaagttaataagagcattaccgattaatgtaataattgttaatctaattagtatattctttgtgcaaatttctcttatgcaatttgtcttaagcgtatttgcacattagtcattttatcactctataaatagaagcttaagtagttagaattctaggagaaaagagagacggaaaaattcaaaaaaaaaataattcacagttaacttccaccatggactgtttatgtgtacactcttgaacatgcggtatgtttagatcgatacacctaatatttttatttcaaaatttatttaaaaattataaaaataaaaaataaaatatttaaaaaaatattataaatttt

SEQ ID NO: 102929 - DNA, 689 bp, Cannabis sativa
aggatgttttcatggcacaacctgaaggatttgaagagaaagggagagaacattttgtttgcaaattgaacaagtctctatacggattgaagcaggcccctagagcatggtttgacaagttgagggcaacactgttaagttggaactttaaaaattcaagagcagatacgtctcttttcttcttcaaaaatggcaccgcttttatcaaagctctaatttatgtggatgatataatagcgattggaaataacaacaagaaagtaaatgattttattgttgaacttaacagaaagtttacattgaaagatctcggtcctttacatttttttcttggaattgaagtgtacagggacgagacaggtctttacttaacacagacaaaatatattgaagatttattgaaaagaacaaagttcatcaatctcaagtcgtggcccacaccagccacagcagggaagccaatgtcccttaatgatggagagccactgcacgacatcacagcctacagaagcatcattggaggactgcaatatctctgtcacattcgtctagattttgcctatgttgttaacaaattgagccagttcctgaaggctcccacgacagcacattggaatggtgctaaacgtgttctgagatatctcaaaggaagcatgaacaaaggccttcacatcagctgtgattctcaa

SEQ ID NO: 102930 - DNA, 516 bp, Cannabis sativa
agctatggatgaattttaggatatttcttatagttgaattcatgttttatttggagtattgctgctggaatttaattgagttgggttagtttgaagcttaagttcatgagcttgaacttggttagtttggagcttgatttttgtgtattgctacaatcttaaattatgggatttattgttggatttgatgcatgagattttatttttgactctctaacaattgttagcaactttatttaatgatttgagagtttggatgtaaattgggataatttgggtgtgttgtgttgctgaaattcgtgagtttgcatgctagtttctgggtttgaaacccaggtgctacgacatgacttttagcatgctgcggcccgcctcctttaaggacctgggagttggtctcaggtgtcgccgcatggtttttgcatgtcgcggcccgcccttgagtttttgggcagattcatgtgtggactttgaaaattcataactttgtgatccgaactctgttttgggagttct

SEQ ID NO: 102931 - DNA, 786 bp, Cannabis sativa
ctttgttgaattgattctacaaactgtcacaaccgtggagtataatgtggttcatggtggtaagattcttggcccaattatcccacactgaggtatccgccaaggggatcctttgtctccttatctatgtttaatttgtgcagaagggctctcatctttgttgaagtaatttgagagtctcggtcatccaaaaggttgtaaagtggccaatggagctcccgttatctcacatatgctatttgctgatgataattatatatgctgtcgtgctaatgaaagggaggcgtccaatataatgagacttcttcagttgtttgagatggcttcagggcaacaagtcaattttagtaagtcctctatattttttagtaccaacaccactgatacggtgaagaataaaatatgttatttgcttcaaatggagattgctgatgaaaattgtactaacctaggccttccttatacgatgggaagaaataaaaatgcaatcctgggctttctcaaggaaaaaatgcagaaaagaattcagagttgggaaggcagactcctgtctaaagcaggtcgcaaagtgttattgaaaaccgttgctcaagctctgcctagttatgcaatgactattattctattgcctatggagacatgttctaagttggagggtattatgtcaaagtattggtagagcacttcttccaaaaacacctgtggaattggttggacgagttggaagcgccttactaaacataaagatgtaggtggaatggggtttcgtagtcttcatgactataa

SEQ ID NO: 102932 - DNA, 776 bp, Cannabis sativa
  modified_base (36)..(40): a, c, t, g, unknown or other
gctctccgtctcttccttgctctctctctctctctnnnnntctctctctctctcaatttggtagatctagggttctgaaatttgtaggcttaaatattctttttatagtgcttgaaaagatagataatccgcttagaattaggatttgttttttaaaaaaaaaagataagtgagcattataacgcccacgagatatatttcccgaatatcccatgtgctgaaattatctttttttttagaccggcgctatgccgtaggaattgggtgctgtagcgcccagcacaatttttgtttctacacctaattagtattttggccataacatcttcaatacaactcggatttagaagattcaagatgttctagaaatgtaagaacgagatctaaaacttttatgttgagctccaagtccagttctgcttctaaggttgtaaaaagtttcaattaagctataccttgtaaaagctagccgacttccacaattttccaccaaaatatgctaacatccctctaaatgactctaaatgtatgattagtctttaaaatatcctaaacaattaagatcacactaatcaatttaagatcacactaatcaattgttcgaattattttacaattgttcgaattattttaccatgttcgaattattttaccaggttcgaattattttaccaggatcttagatctactcacaagtatttgtgtaacatcctaaatatcaactttctaaaacgataataaatacatataaagtttagggaaccttacattggttg

SEQ ID NO: 102933 - DNA, 679 bp, Cannabis sativa
aaaaatataattcaatataatacactgaattaattacgtgtaagatataaaatttaaagatagatggatgaagccacaataagtgatttgaaaacacagacactactgataaagctgaagatgcatatacacatacactttatatgtgagaataagcatatgacttacttttgctttttctgtatacatttgtcggtttccttttccattcacatctcattatcatatttattatccaacattcactttgtttggtagagtaaatacaacaaatgagagaaaattagagattaattttttcataattaaccaagagaaattataaaaaatacaacttctttttttcttcctatttagtggattgattgaaaaattaaatgtatccttttatagattctgtcttaaaactaattagggttttattgttggattaaaattcctactatgtgttcatatattggtgtattgctatttaaagtttgctccaaataatataattaatggtagtgatcctcaagaaataagagcaattatattctcattttctccatcaagagagaaaattagaaaacttaaatatttattttattgaaagattattacccaaaatcaccacaaagatcatttttacaagatggattaaaatcatcactatctatgaattaaggtatgctttcac

SEQ ID NO: 102934 - DNA, 596 bp, Cannabis sativa
  modified_base (542)..(545): a, c, t, g, unknown or other
ttgcatgactttgcaaggaactttctttctttaccgttctcggaagtaaccgaacgactagttccgcaaactaaacaagcctccttgattgcattttccttataaaataagcaacaattatacgaacagacatggatagagtcataacccaagcctaatttcttcaatctcttttttgtctcgtagtacattgctggaatattatttttctttggaaatgaaaactttaatagcttcaacaattcttcaaagatgttgttagggatttttcctctaacttttaaatgcaatagctttgctaaaaagttgagagacgaaatccaatcacaaccgggatacaattcagcttcagttccctcaaataagtcatcaaattgtgggtttgtggtttgttgttcatctgctccttgtacatcctctgttgtcggaggaaagaagtcttctagaatagaaatcatttcatcctctaattcaacatcgccaactgctacatcaccaacagcatcctctggcttcccgtgataggtccacttctcatatcnnnncataaaacctcgatcaaatacgtgtgctctaaccctatctattttttcaaa

SEQ ID NO: 102935 - DNA, 551 bp, Cannabis sativa
ctcgaaaacgcatgtcgcttaggttactgggatacacccagccattttttgagatatccttctgctcgcacacctgacttttcgcgtcttggtgggatggttagtttttcgcgagaatttaaatcatcctcccaagacgattttataacttatatgcggaagaggtcacttattttgtttttttgcacattcaccacgctgaaaagatcttctatctttcagacgagcgacttatcggatagccagattctcgactcacgatgcaacgcgtttgagggagacaaggaccaacgggaggatagttttatcccgacttcaatctcagaagaggatatcgcaactgcgggaggtgtagaattaggcccgatgtcttccgtagatattgagaggatggtgcaggagctcactgaaccaggaaccattgagattcgagatagcgaatctacggtgtcagcgcatgattatctcgtccactccaggcatgcccctgacgtcaacgtcgaggagatggatgatgattgggcgaccccagctcgagagtcaggcgagga

SEQ ID NO: 102936 - DNA, 790 bp, Cannabis sativa
  modified_base (481)..(483): a, c, t, g, unknown or other
gtgaattgtacacatattttaatacattacaaatttatcatacattcaagatatttaaatatcattccctgaagagaatgaatggacataaaattatgtttcaaaaatatatgttttacatatattagtaatgctacaaacaaattaatatatacatatgttattatttcttgaaatcaatggtttcaaactattgttgttataagatatgtatatatacatttattacttaattcagtttgcatattcctagaagtgaatatataatttactgatattataataaaatttattagtggtctaatataatttaatataatcaaagtgataaagaatcacaaaataattatttaaaaaattttcttgatgaagtcttaaatataattgctacttgaagtagttaaataattttgtatgtacctagatgtatagtttttatcaagtcatgaaagtgacaaatcatgataattagactgttgannngtctattaataaattagatgacttgttaaaaagacacgagaaaaaataaatgacatattatggttatatcttattgaccattgcaataccttttaaatatacaaatcattaaattgatgatgaagaaatataaagttaaataaaaatagtgactcttaaagagtgtatatattttagagaataacataattattttatttatgtatataaaaatgaaacttgtaatgattacttatatgttatagtgattttacaaattatcctacgaaagtttcattgaaatacaaattatagtgaatctgaagtt

SEQ ID NO: 102937 - DNA, 903 bp, Cannabis sativa
atcagccccctcacaccagcctacaaacaatcattgtaataaaaagcttgtcatcttcctaacatccctacttaatttcttcctttgtaaactatacaacctattccttataacaactttaatctcattgactatatacaaaactgtaaaagaaaaattttcatgaatacagttgtttcggttcctccaaatgctgtaaacacacgctacaagacaggcacagtagatgctcatgctctgccctttgctcctgttcgaacaccaactaagccgtccatcatacaacaaaggccaagccttgacaccaatcctaacaaagatagcagtaaccacctgcttagagaaaatatagtcaaagtataggtgtttatggctctcaatctcagcattgcatctctagttagcaattgattattaaccacctgccataatacaaacctatgcttcgggaggctacttctgcaccagacagcttcagtatagcacactttcccaacctgcagagtgcttttgtacactacagcaacaatgaatttcccatttttacccgcagccataagcgtagcagcagaaaaccttgcccttaaatggcacaacttcctccagtaccagcttacatccattataagggtgtagtcccatatattcttgtccttcaaatacatgacattgacccacttatcccaaagcaaatcatgcttattcatcacagcccaaagatactttgttagaatagctctattccaattggcactatcccttaatccaagcgctccatgagatttaggatagcaacttttttcccaagaagcaatgtgtaatttgctcctattacccttaactccccatagaaatcccctacaaagcttctccacttctttaacaatgctttgaggaagaatg

SEQ ID NO: 102938 - DNA, 628 bp, Cannabis sativa
ttgaactgggagtgccccactcccttggaaatagagtacctttactcagtgaaggcggttcctgcgaggaagaatgctgcaggggttttttattatctcgggactcacacaagcgatcgtaagatcattgttgggttgccaaacaagacccctttcaaagatgacttttcctagacaactggtctttccccaattggcacaaccaccttccgcataatacgtaagtgattacttgcctacgacttgattaaattattccatgtctttaattctggcttcgctgactttaattttgcttttgtttttgacagctatctcgagaagaccaaccgctactccagagatggttgagcgatgcaggcttgctgggtcttccatatggtctccgatcggctgagttcctcttgaacgaggtcaacttgaggtccgtggatctccttacgaagaaggagtttacttgtgattacaaatattcgaagtattcttcttggcaacaggttcttatctcaaacgacgaggaaactcaggactatgtggctcgggtgcattaccttcagagcatagtccctcgggaagccgaagaaggagcatctcgaggtagggctgagcatcaatcagtttggtcgat

SEQ ID NO: 102939 - DNA, 635 bp, Cannabis sativa
gaaatatgaataaaatttgagaaattttttgaagctccagtgtgttttgtattttttttttttttgtgtgggttttgttactattcctatatgttcttgtcattttgagaaatttaagggaagaataaattaggaaggagttatggaagatgattaatgataaaataattagagtgggggtttgtaattttcaagtatgttttttaaattatgtttaattttattttttatatatctaaaatgactattaatatattttataaaaaaaatttaaaataattgtaaaaggtttaaattgatttttaaataaaaaaaaaacttaatagttagagtgacacgtggacagtgacctaacacttaatggccagaagttacagaagttccaagaccgcaaaattttttacttaagcattaatctgcaaccaaaaattaaatttaaatattttcactgtaaattattctttcttggatactttcaccgtaattttgctgcaaatattattttaatttaagtatttttacctattaaatttcactaaaatatagataaaagctactcttacttctcaaaaataatttatacattaaatcattaaaaatagtaacctaatacttcttctttttctttttttttt

SEQ ID NO: 102940 - DNA, 717 bp, Cannabis sativa
taatataatatctcactcaaaaataccaaattagagggaaatttacaaaaatactagagtttaagttaatttttacaaaaatactgtcacatagaaaagttttcaaaaatactgtgttttttataaaacaccagtaaaacacaaaacataacaactcaacaacaatagaacaactaaaaaaatactagtaaaaatttaacactgatgaaagttataaaaaaacacagtaaaaaaataaaaataccgtctgacagtatttttgtaaaaaaaataacaaaaattagtataccatgtaaatttcccaaattagataagggtctcaaattagaaaaacaatgtcattttttctaataaaatgcatatataatataagaattagataagtatcaattttgtataaatgatcttgtgtttataattcattatatgtatttcaatagtgttaaaatgataataaacttaaaacaatatctggtacacttacagttatggatgtttacaatacgtacaaaaatatgaccttttttttcaaaaaaaaaaatattttataggaaaaataaaagaataatggcaaaaaatagttaaaggtaacttgcactacaaaaaaagatacttttagtgacaacttttagttataacataaattttttgtgattaaatgtgattttttatcacaacaaaaagttataattatgattaaaatataatatttagata

SEQ ID NO: 102941 - DNA, 583 bp, Cannabis sativa
tgttacactctctctttaagaagaataatggtgttagggggtttatggcgttgaagttggacatgagtaaggcgtatgatagagtggagtggtgcttccttcgtgctattatgatgaagtttgggtttcctagccggtgggtggaccttgttatggattgtgttactacgccggaatattgttttttggtgaatggtaagccgagggggtgtgtggtgccttcaagggggctgcgccaagggtgcccactttcgccttatctatttcttttttgtgctgaggcgttgtcatctatgattcggcaagcagaggttagtggtgagttgatgggttttcggtgttctcggtatgggcctcgtgtgtctcatcttttctttgcggatgatagtttaatctttggtagagccaatggaagagaggcggagtctattcgtcggatccttcagtgttatgagcatgcttctggtcaacaagtcaattttgataactctgctatgacattcagtccgaatgttttacctgcggatcgtacgagtgtattggatgtattaggcttggattcagtcgccactcatgacaagta

SEQ ID NO: 102942 - DNA, 695 bp, Cannabis sativa
ccaccctgctggatggataaaaaatcccagacagatgaggttatctggattagttatccaaacttctaacatgcccaaacacgtgattggacaaattagcctgtctaattcaatccagtcacgcgtaccaaacaggtccatatattaatagataaagttagacctcgtggtcattacaaaggatagaagccgatattgaagaaaaatcaaccatactggataaatcattagaaaaagcccatttggcaacattatgggccatgaaattacaagatctagcaataaatgaaaaattacaacataacataacattagagagttgtttacatcggcgcacataattatcaataccccaattagtgtcagcacccgtcagattcttgatgaccgtctttgagtcactctccaccatcacaaaactaaaacgcctagaaacagcagtctccatggctagcagacaagccgcaacttctccaataagagggtcagaaaagttgagcaagtatgtagccacccacaaaatagactccttgtgatcatgagcaatggccaccgcatacatgaaatcgaaccaactcgcagttgatcttgacccaatcctcaagaggcgatgaccaaccagtagacccaacaatgttcgaagaggtaagtaaacaagatccataatctgcgtaacaagaagagatagaatcaat

SEQ ID NO: 102943 - DNA, 570 bp, Cannabis sativa
tttttttttttttttcaacactttgaaaaggcctgcaccgaaggaaaaccccaaggttgtgcctgggatgaagagcaagaaggcccatgatccacaaaaactttgttttgatcccccgaaagggaagggttcgcaaaggggtagatttcccataggaaaaactaaccctaggaccgtggagatcgaagaagcgtattcgtgcatcaagagccaggaaaacagaaggggtatgccaggaaagatcaccctgtcgatttacgacacaagctcaattccaaacatggagacctaagggcacgccttgaccaaagaaaaaaagttgtgccagtctctaagggtatcttaaatgaaggagtcctggccaaacttgctatactttgaaaggacatagcaaggatctccctttggtagaaatgagatgactcagaatcatactgtgaggatcaggagccctatgcaagaaatatactagatgccaaactcccaaaataatttaaatgcctgaaatggctatgtacacgggtgacacgaatccaagtgatcacctgtctagattcagcaaagtcatga

SEQ ID NO: 102944 - DNA, 833 bp, Cannabis sativa
ttaacacctcccctcaaactcagagttggagctatcgacaatggtgagtttggaccgaaattgagggaagtgttgacttgaaattgccttggtaaaaccatttgcaagctgatcaatagcatgaacatgtttgacaacaactttgtgttgctgaactttttctcgcacgaagtacaagtctagctcaatgtgttttgtacgagcatgaagaaccgggttcgcagtgagcaggactgtactgagattatcgcaccaaacaacaggaggttggggcagctcaatgtgtaattcgaagaacaaggattgaagccaagctaactcagccacaacattggcaaggcttcgatattcagcctccgtacttgagcgagaaattgtatgttgtttctatgatttccaggcaattaaatttgacccaaaaaatatggcaaagccagatgtggatctacgatcatcaatgtcagtggcccaatccgcatcacagaaggccttgacttcaaaacttggagacttttgcatgtgtaagccatagtgtattgttccagcaacatatcgtaggatgcgcttgacagcaagccaatgagattgaaggggcttttgcatgaattgacataccttattgacactatatgatagctcaggtcttgttattgtaaggtattgtaaagcccccacaatcgatctgtacatttgaggattatcaaagacttcactgccatatgctgagatcttctggccactgatcatgggagtgtgaataggctttgcatcctgcatctgggcacgagacagtaagtctcttgcatacttactttgacacagcagtagaccat

SEQ ID NO: 102945 - DNA, 825 bp, Cannabis sativa
atatatatatatataaaaaacaaattaataataatgattgagcccatttaaaatatgcactatttttttttatcttttttctttacaaaaatatgtcttaatttaattaattatgattaattaaataatttatttcgttattatgtgtcattattttaaatatattattactttatataaattatcttactttacataataataattatcatatatattattttttaacattttttttgttaaaaaattacaatttaggttagtgcagtgatttttatgtggatttcaaaatagattttgattgtgagtgatgtagattgcttcattaatttctatatgagttgctatatgaattttcgtaaaaaaaaattactttattatataaaaatgaaataacaataataataaataataatacacttcaaataaaaataatgtgctattggactcctcataaaataggaattaatatactttattcatttatttatttttaaaacaagtgattaaaatttattattaataataacaccatctcactttacataataataattaccatatatatatatatgtatatatattattttttaacaattttttttaaaattttaaatttaggtcactccagtgatttttatatggatcgcaatatagattttgattgtgatgtagattgttccattaattgctatgtgagttgctatatgaattttcgtaaaaaataaacaaaaaataatttaatatataaaaatgaaataataataaaaataaataaaacactttaaataaaaatagtgttattggattcctcataagatagga

SEQ ID NO: 102946 - DNA, 607 bp, Cannabis sativa
aaattctcaaccgcaactcaattgtggtttccgacaatgtatcagcgggaaggaggttccagtggctccttggcaaagcagcaaccccgttcgttgctccttggcgaagcaacaacctcatctatggctccctgacaatgtagcaatgggggttctcctgtggtctctctgcctgtgctcgtggttctctagcgtaggtttttttttcgtaaagatgttagtttgacaaaaaattgttgaagattttatagaatccccaatacattgcaaaaataattggaatactatatacataagcatatctttagatattacagtcacaaacctagtttagcgtacttatcatagcttgtctttctttatatggtttgtcttacttaacatgactcgtctttcttatcatatcttattttgcttaacataacttactgatacatcttaacgggtgtggatcactaacaaactgaattcttagctgaacgtactcccttaatcataatgttctgaatccataaattagattcatagttaccacgatatagaattggacttcatactcaagtcatagttactattagaatatttcttagttatattatggtagcta

SEQ ID NO: 102947 - DNA, 515 bp, Cannabis sativa
gataatcatttaatgagatggtgatcttagttttgcaaagttgagtacgaaattgactgatcttggctcaactttgagtagagtgatatttttcaagattagacctgataacagcagtagtgttgcaccctaccattcgagtgagtatctttttagacatatatgataggagcctggaaaccagaagattgtcttggatgtcatactcaatgaattcattagagatgtgattatcgagttcatcttcaactatgatgaatttaggtggaacaaactttagatcgaggaatttgagaagacgatgccctttaatggcggcttagacttgatgacgccattgaagaaaattattttcatcgagtttgacaaataatgagtgattgaaggtgatactgtttgttcttagcaacgaactggaggattgacctcgaaggtttgagttggaatcggtcatggtggaacgaaaggaccgtgttaggcatttgataccatgttgaacgagagagagagagaga

SEQ ID NO: 102948 - DNA, 698 bp, Cannabis sativa
  modified_base (345)..(350): a, c, t, g, unknown or other
  modified_base (415)..(415): a, c, t, g, unknown or other
tccacctcgaagggactgctaggatgtacgtcgtcctgctcttcaatctcctgaacctcagcgtccccatcatgatccccctcctcctggacggctggatcctgttccgcgctaggtaaagcggcgtgccgagccacttgagggtcagacgcgtcggccatacgcgttgtctttttagtatgagccatcattctatggctggacaaaagatttgagggaatatgtctttcaatgaaagaaggtggactagaacagagacgaggatggtcctcgtgcaagagttgaagcaagtcctggtcaattcaatgttcgctctcccaaaactcacctgggttcatctacaannnnnnacacacaagatgagtgtttggtcagaatatttgacaataaaacaagaaaatatgccgaccaggantactcaacagattaaagaataagaatgttcaaagaaaagtcaaaagtcaggaagtttgaaattttctcgagttagggaaaaaaaattcatgaagcttagaataagcagaatgaaagacagaaattatgcagttcagaaagcaaacattatggactgtgaaattgcatgaacccgtgaaaaaggagaatcgcagagtttctaaacttagggtttcctacatatcttctacagcaaagttgaaggtgcattcaaaaagtagacatgcaaaagtaaacataaagga

SEQ ID NO: 102949 - DNA, 539 bp, Cannabis sativa
cacttccgactacaaaatatatatttatacgactataccaacagaaaccatgttattaatacattaccatgtatattataaattttcatatacatatgtttactagtactacaaaatatgtatagtacaaaattaatgaaggggtcgctttatacttatacttatttgaagtttatggtatatattatataacattaggctttgcgggccaaccaagtttattatcctagtattcattgttgcatatggtcatgaaggatgtcttataaaacatcattattcactccttgtaaatattgcgaaacaagccatattattatcacaaagaaacaaccgaaaacaaagttttaagccgaaaattgtatgatcatcatttgctaatactaggcctcgtttttcatcattaatgttcccaaaaatgaacactagtagttcaccttcacccttctaagatatcagcttaaatttgccaaaccaaatcctccaactttcataacaattcgtttttaaaatctttttgactatactcaaagtgtagg

SEQ ID NO: 102950 - DNA, 796 bp, Cannabis sativa
gctaatcggcctaaattcttctattttttgaggcttatcaactttgggtatcaaggcgaccaccgtatcatttaaacaactcaaatcagccccattattaaggacattcaagcacaccgcaatgacttcatctttgagtttagaccagaactttcgatagaaaagcgcaggcagtccatccgcccccggtgccttagtggggttcatctccttaactgcttgcacaacctcttccacagaaaaatcaagcattaaatcctcattcatggacaaagaaactttcggctgtaccacttctaaaacctcctgcattacgccctgatcaatgtccgatcccataaacaaccctttgtaatagtcttccacaatttggcaaaccaacagtttatcatcttgccaaactcccatttgatcttgcaacccctttatttcattcttcttcctgcgcgaagacgctttatgatggaaatacttcgtgtttctatccccccattgcaaccataaggctctactcctttgtcgccaatactgctcatccttttcaagcaacccatttaacttatcttccatgtgttgtatcgcctcccatacacccggttgttgctgcattgtcaactcgtgtagcatctttttagtcttagctatctcgttattcaaccgagccttcttcttcttgttccaatcttgtagtgctttcccacatttattaactttacatctaaaagacactggccgacccctcccctgcctttccttccacatattatctattatctcagtacactcctcttcttga

SEQ ID NO: 102951 - DNA, 854 bp, Cannabis sativa
tatatagatagatatatagattaaatacgtaagtaataatgtttttcaaaagccataatttatattacacttggtgttatatgatgcatattatttataaaataatataatatataaattaaatgagtataataaataaataatgcgaatattttaatttttttagtattaaaataaaaactaactatttattaatatatcaatataatatataataacttaaaaaataattataatatataataatagtaaaactatattatataatatatttacatattaatattaataattttatttattaaaagattaaatcccataaagtaagataaacatttaagtctattcattaaattataattattgataatgctattattaaaagtttatttagtgtcttttattatttatttattaagaagtttaaaatttatataatgaatgtataatagaattttaaattgtttttcttttttttttccaaaaaataaataaataaatagggcaaattacataaaaattagtgttgttattattattattattattaatatttaaggaaacactcttttccataatttttttctattgttattaccgtatctcacctgttgttattattgtattttatttgtagtcgctgccactattgtcttttccaaatctcaatcttaatcctagatttcatcccgaatttataatattttatatattaaaaaatattaacaatatatatgaaaagaatcttaaaaaaaaagtatagaagatacattttagttattattattttgttttatttattttttaaaaaaaaatattagagatatttcagtcgatacaaataatattcaaga

SEQ ID NO: 102952 - DNA, 833 bp, Cannabis sativa
gaataattccacttattggattgtttcgaagatcgagacgtgtaagctcttttaaagagccaataaactttgggatccgactgatgttcatgtcagagaggtacaattccttcaaatgatgtagttcggccaacgaagagtcaatctcgccaccaagtgtgtcaattgcactagcatcaacggaaacaacatggctggtttggtcgtcacaagtgatgtattcccatttgcaacagttttgagtggtgctattattggaccaggaggaaagacgacctttagaatcatttaaagtggtcttaaactttaagagagcctctctctctttgggaatgcattgaggtgtattattacgctcatttgaattcaccacattaattgcagttgtggaaaacaagagcataaacataaaccccactacaaaaatactcatcatataattctcacaaatcacacaatatagatattaacttataattaagactaatgtttcggtttgcagtcttagcttgtggctagtattctatttataacaaatcaatatccttataacttacgaaattagctagctttttccttttcttgtgttgactcaagagagatgacttgtataatatttcacatatataaataattttaacaataaagagagaaaatgaaatttcaataattatttccattattatatatatcttttcataatatagattgataggagataaaagtagtacgtgtctttattgtttcacatggtaaagtggaaaacatgttggttattggctttatcaactttatattaagcgacaaaaataatgtgtatggtcgttatattt

SEQ ID NO: 102953 - DNA, 657 bp, Cannabis sativa
ctcttcaggaagatgtgacttatgaagaacaacgtgtcaaaatcttggcgagaaaagctaaaagtgttaaggaacagagagattctagtagtcaaggtcttatggaaaaaccacagagaagacgaggctacttaggagttagagtctgagatgtatataaagtatcctcacttgtttgattttccacttcaggttgtactttaaaattttgggacgaaatttttttaaggaggggagaatgtgaagactcggtattgaccgagtcaaaaactatatatataataataataaataaataataaaaatatatatgtatatacataaaaaaaaatcaaaattagatttaaaccccccatttcgtcctcttcctcactcactctctcatttctctctcttcaaaacacaaaaagaaacccacaaaccaccatcgccaccaccactcttcggcaacccacctctgaccaccgaccaaccccacgcgccggaccattcgaatccccaagtgctggcgacctcaagcccctaagcggggccgcttatttttccgccattagctcgggatcgcaagtcaaagttttgcgattcaaactttgaacggattttctggtcacctccggtgtccgtttgacgagccttcttcaccactagactcagctc

SEQ ID NO: 102954 - DNA, 534 bp, Cannabis sativa
caatagttttggaattagagaaatttatgttttctcggtttatgttaattagactcaagcctagcataaattaaaagtctgggttctttgtgtttagaggttctgctgttacttgttttgattttgttgttagaaagggaaagaaaagaaaaaacacatttaggattttgagggaaaagctcaaaattctgaagctgtttccctggcattgacacctaaaataggggcttagtgtaatatttctgatctgtataaagcttggtttgaaaatactgtagcttttgtgatttcgtacatacataagtgcttctttccaagtaagtatatttatttgaagctgaagttttgaatcttgcttagtttgggggtctggatttagtgtgtattgttaggactcagtttcagtatttgggtggtcatttgttttcaatttttgtttaactggattggcttttgaggttctgacaattcctttttgacttcttcataaaatggaggtactttaattatcattattattatcaattttttttt

SEQ ID NO: 102955 - DNA, 1093 bp, Cannabis sativa
  modified_base (152)..(163): a, c, t, g, unknown or other
caaagtccgtggccctctgccattaggggaattgacctaatcggaaaattacccaagggcaaaggaggagtgaaatacgcagtggtagcggttgattacttcactaagtggacaaaagcgaaaccactcgcaaccattacataaaagaaagnnnnnnnnnnnnttgtgaagaacataatctgccagttcggactacagtacaagatagtttcaaacaatggctagcagttcgacagccaatcgttcactgacttttgtgtgaaccatggtatcatcaagtgtttctcaatagtaacccatcctcaagcgaatggtcaagttgaagtagtcaacaagaccttgaaggatacactgaagaaaaacttgatgatgccaaaggaaattggccagaagagcttcttgaagttctatggtcatatagaacaactgagaaaacggcacccagacagacaccattcgtaatggcgtatggaaatgaagctatgctgcctgtagaactcgagccaccttctcacagaagattgatgtacaattaagataccaatcacgtactcctagctgaatcactcgatgaaattgaagaaagacgatccattgcaagcttgaagtttatagcccattaacaaaaagtagctcgatatttcaataaacaagggaagtctcagaaattcttcgtgggagatatggtccggggaagggtattcttagacactaaagaaagtatggcaggtgtacttggacctaactaggaaggacgatatcaagtggtcaaagttctcgaatccgaagcatacaaattaggtaagtatgacgaaaaaatgcaactcgttctagtacaacggtattggaatggggagcatttaagaaaatactaccaataaagtactaggttggatgaccacgctaagtactgaacgaacatttactcttaagtaaatggactgctcggcggactacgctcaaaggtttcgacaaaggaaacaaattactcaggtcaggtgaccgccatttaaagtacagtttcctatttctggaatttgttttatttcatgttaagctaaaagatcagattagatcaaatagctctgatgta

SEQ ID NO: 102956 - DNA, 1137 bp, Cannabis sativa
ttatagctgtattgtctaaatttttgggcgcagttttgtcccatgcggctcggaataagaattttgcagtgcttggtttgacaaagcatgcccttcggttagacaatgagctatcctggttcaaggaggtgtcgtcgccaattgaggattactgctttgttaatcatgtgtgatttattcaccgcgtcaaaaaaaaatgttgtttttgattttgaatatattatctgatgatggtaaaaaattatgggtttcacataataaaatgaccatcttaaaaataaatagagagatgatgccagttttgaacttaaagaattaacaatgtagctgttattttttaattttaaaattgtaatgaaaagagataaaaaaatatatctaaaaaaatgtttgagtttaaaatttagttattattcttacaaaaaaaagttacatgtaagcgaaaaaatatatattttttagatattaacatgagtatttttttaaaaataagttattatagtattactttttaaaccaaaaccgaaataaatagttatgtttgtatagctttttttttttttttaaaaaaataatcgtagagaataaaaagcaataaagaagaaaaaaaaagtagatggttttcacgtaatggaaaaaaaaaaatcaaaaaaaaaacttagacggaaaaaaaatttggaatgtagatatatattattttatattaagtataaaagtatacgtattatctatattaaaaattacatccgtatcagtataaataattttagtattgagtatataatagaaagttcccctattctttactttttacttagggaaatttacaaaaatacttacttttgacctaatttttacaaaaatactatcacacggtaaaaattacctttattctgccttggctaatttttttttttcttttatattgtaaacacaaaaaaaaaaaaatgagacctccatcttccacaactacagacagaaccaccacaagaacaccagaacaatcaaaaaacaattattaattccggtgcgattgaggaaaaaaaagtaaaatcgacgtcaaataaataatcatggcaaaataattgtaaaacaacactaaaacaaatcaaacaaaagaaaagaaaacatgattaa

SEQ ID NO: 102957 - DNA, 660 bp, Cannabis sativa
  modified_base (29)..(33): a, c, t, g, unknown or other
  modified_base (295)..(325): a, c, t, g, unknown or other
aaaaacaaaaaaaaaaaaatcactttcannnnntttttaaacagtttttttcttaattaatatattggacttccatcagagtcggacccaaatccccccacgaccttggcgctgaacccgacctctgacttgaacccaaatccgacctcggatctagacccgacgtaaatataatcaaaaaatgaaaaatgaaaataaattttacagaatacacttttgttttctgtttttaaaattaaaaaacaaaagtgtttatagaacgcatttatatttttcaaaagcaaaatttttaaannnnnnnnnnnnnnnnnnnnnnnnnnnnnnnaaaattagaaaacaaaagtgttactaaacgacacctaaaattatacctcaatcttgtagaaggtctgaattactatttaataaataaaataaataaaaaaaaatcagtaacttcttattattttttttagaaaaatgatagtaacttttagaatatacactataaataatattttgattaatatattcttacaattataaaatgtgaaaaaaagaaatttatgcaattatttatttggatgaaatcattcacatatcacaaattataaattttaatggcgtttgataacattttttttaatcagttttctattttttaaattaaaaaagtgaaaa

SEQ ID NO: 102958 - DNA, 574 bp, Cannabis sativa
tgtatgtaaccattttagggatgtgtcaacaacacaagttttatgtggttttcgaaggtaggaaagttggtatttacacaaagagccgaagagcaagtcaacggtgtaactggaagcatatatggcgaggttactgtagctttgggattgccaccaaggacttcgagttgtaccagaatataaagtacagaggaggttaggagcaaagcaaccaccttatgtggtggattttattaattagcggtttgtatgaacgagtacgtaatcgaaccgttgacaaggatgacgtgtacaacgcctacgccgtcggacattatttaggttgcctcagtggattagagaaggggctattttcaaaaatataagaaaaattattaaggttatgataaatatggcatacaaagtaaatgtcactaaatatggcattatcaaaccaatcaaactaaaaatatggttttttttctaaaaaaaaactatttaaaacattaaaaagaaatctgaatttaaaattcatacaaaataaaaacttaattaaattaccataaaaatattaaaattctcttcatatttattt

SEQ ID NO: 102959 - DNA, 508 bp, Cannabis sativa
tcttaatttaaatataccaataaaaagatgatacctggataatgatttgacagttaacgactagatatttacggaaattctaaaaatataatttaggtattattatagttaaaaattaaacttaatcatttatttacaatcgagagttaaacttaagtacttttattacaaattactcttatctaaaaaaattcctaatttgtaattaagtgtatagaagctctatgagggagttcaacgaaacatgtcacatagttcttatgagaaattatactatatatattttttaatttgatgtctttaatttttactctctttttcaaaatttattatgtctaccttttttttttcaatcattctactaattttactcctatcacttcacgatagtttttatttttctctattaaaattttcccctaacttttccacaaacttacacatctatctacaaagaacacaaaattattatatttgaaattatattttagttatgtgagtgtgtgag

SEQ ID NO: 102960 - DNA, 614 bp, Cannabis sativa
gtaaagtccaagtgtgaatacgttcgctactttgtggatgaccataaaatccggtgaaatgaaaggaaggcagatcttgaaactcaatgaaacagtctatgtgattggaggaaaaattattaatggtaacctcagcttctaacttccaaagaagcattagaccacccccaagaccattacgaggaacttcaataccattgggaaaatgtaaactattgcgaaacttatcaacactaccagcttgtaactttgtctccataagaaacaaaacacagggggcttgctcggaaatgagcaagcgcaaaaatctgaatgcagtggggttccctaatccccttgcattccaacttaggagattcatggcgaatcgcagtggagcatagcatccaccgcagaagaaccaggctgttgcagggttgaatctgatgaaaaaccagaaagaaccgaagcagaagagagatcagtagtggctggtggaactaactgaccattgttctgagaacgacatcttttaagaaatttacgaagggattctgactctattggtcgttttgatgcagagaatttccaagagaagaaccatcaacagattgggatgcaatattgttagtgaa

SEQ ID NO: 102961 - DNA, 827 bp, Cannabis sativa
aggctttcaatcggggtggtcatgtagagaggattcaacctaaagttgctgagatggttggcatcaaagaagcattaagttggattgatcgtcataattggagacaagtaattttcgaatcagacaactgggtatgcgtacaagctattcaaagtaaagtctctatgtcatcttcttttagtcatttagtgcatgatgttcgtgcgttgcttttatctttaaacaatgttaaattgggttttgtcaaacgatgtgcaaacaagctggctcactgtttagccagagattcttgtttctctccaaatcgtgtgcttcagttggaggattgttcctctaaagcacgctctattgtttttaacgatttgattagttaataaagataccaatttgagtcaaaaaaatataccattcatcaaaatataaactaataataataatcaaaatatatattacaaatatatatacactaaccaaattaaataccacaattaaaatagaaagtaattaaaagataacaaaattatataccaccattgtatataagaaaatagaaactaattaaatattatttaaaataaatatatatcatacaattaaaatatataaaaataataattaaatatttgtagtatgccaataaaattacatacatatattaaaatatttgtattatgctaacaaaattatatacctctattatacatagcaaaataaaaaataaatatcatctaagaatagtaaaatactatacatgcaacaaaataaaaatatactctataacaaaatctatatactaacaacccacaacaactcataaaaattaaaaa

SEQ ID NO: 102962 - DNA, 889 bp, Cannabis sativa
catacttgtgagtagatctaagctaatgcttcatagccataatctaatgcaaaaggtgtctgcccggtggtcgtcctcttggtggtcctgtaagaccaaagtacttttggtagttgttcgggccaatttccctttccctctttaagacgcttcttcaatgtgtctttgaggtttttatttacagcttctacttacccgtttgcttgggggtgagcaactgcaaagaatcttttaataatatcatgccgattgtagaagttggtgaacatattactatcaaattgtttaccattgcctgatacaatcttgtctgagagaccatatcgacagatgatgtttccaacaacaaaatctaagacattctttgaagttataatggttaatggtttagcgtcagttcatttcgtaaaatctatttttagtctattattttttttcaaaaatctagatttgtttaagtaaacataacattttttatatttaatttctaattttttttcaaaataattttatatttttattgtatttttaattattttctaagatatgagtttataaatatcaataagttttatttttttctttaaaaactcttaatttgtttaaattatttattagatttttaataattttagtttgatttttggggaattaccccatatactatttttttattttttttctttcaaatttatggtttggtttctcaagtggtttctatatgagttgttatactgattttggttacaatttaggtttattagttgcaatatgagtttctatgtgaaattccgtaaaaatgcaaagttttaaatttttttttgaagaataattaattttttttaagtaaacttaatattttatcagttttttttttctttattttttt

SEQ ID NO: 102963 - DNA, 508 bp, Cannabis sativa
gaggcctgggtatatatataccccattccttgtaattcattttattcattcaattcaataaactcagacctcggttttctctcacaaaggttctttcgtgataataatatattattccatcactgaatatgtaagcactaaaattttgaagttgtcccaccaataaagtggactgcaaacaatgcaaggttcatattcagagacataataaaaagtagctttattattttacgtacactttcaattatatgtccccacatgcaattagcttacgtcactgaatacgcacccatgcaagagttcccattctcatagaagtagtttaatatgtcccttttgtttaacttttgtttgaaagatataattatcattaattaaatcgttaaaatcatcttcaatggtataatttttaaagggctatttacaaaaatatgggaaaataaagataagttttgatatatatggcataaaaacttaattacactaaatatggcatttttttaaaaaa

SEQ ID NO: 102964 - DNA, 604 bp, Cannabis sativa
  modified_base (333)..(338): a, c, t, g, unknown or other
atttaaaggctataattaagatttttaagatttttgtatttttgtcctctttgtcctctaaattttgacatgtattaaattatttttcccgaacttttaaggtcgttaaaaatgttccctgaactattaagattgttgaatttaaggatttttgtctaattttagtaaaaaatgtctataatagatgaaaattcagagacgtgatttagtacatattaaagttcgaaagacatgatttggtagatatcaaaattcgagagacatgatttggtagatatcaaagtctgagaaacatggtttaatacataaataattactgaaatagtaaaattnnnnnnaattagacaaaaatccttaaatctaacaatctcaatagtttaaggggaattttaatggttagaaaaattcaagggacacgatttgatacatgttaaagtttatggagcaaaaatcctaattagcctatacttaaatttaagtattgatattgagcactaataatatcaaacaaaaaatccaatatatctaatcatattaataataatataacacttgatggatgcttaagcaccacttatatcttttagcctttgtattagatatt

SEQ ID NO: 102965 - DNA, 568 bp, Cannabis sativa
tttggttactggtttgagagcttctgtaatgctcacccaggagatggtattgagaaactgtctatgatcttatggggtgtttggggagctagaaatgacttgctttggaacaaaaagcttgcttctattgaaagagtagtatctgctgcagttacgtaccttgaactttggaaaattgctcagttgaaaaatggagatgcttcgacatctactagccatgcctcggctggttctgagctctggagtaaaccatctttgggtaagttgaaggttaattgcgatgcagctattttttcaagagaaagaagtcatggtttggggtggattgctcgtgactcggctggtgtgcttcttactgctgctgccgagaagaggattggtgatgttgaccctgtggtggctgaagcaatgttaatgaatgaagctttaagttggcttaagcaaacttggagagatggtgttcgtttgaaggatggattcctgctggagtctgtttggagactgattgtctagtgttggtgaatgctattaataataataggcaaattctttctcctcttggtttaat

SEQ ID NO: 102966 - DNA, 633 bp, Cannabis sativa
ttttatggttcgtcggacaaaaatacgcctgggccatacgggatctcgccgcggccaagtatggtctcgtcacggccagattgatgctcgaaaatctcgttctgtaactttcatatgtagcctcaaaatcctgcctatctgcttcgtgatctagctgcgaccaagttgtatctagccgcggccagatatgcatacttcctcaaaatggtatttttcttggctcaactcgtcttttattgaatttttgcatcccaagacctctattattccaaagaacttgaaaacatagaaaacaagcacaattctgtcctagcacaataaaaaacgcacataaaatcgatctagaatataggctaaaaatagcctaaaagaagaagatatagtttcttggatagcaggggtgcttttttctttcattttgttgttaaaattctggtttcttttttgtcattttgtatttggattttaagaattgttaggtagggaatttaagataactatgatgaggcacatgaaagtgtatttactcatttatcaacagcaggggactatcttagtgggatcactcaaaaatattggaccattactttgcaggtccaagttggctattgactatataaatatatatatata

SEQ ID NO: 102967 - DNA, 892 bp, Cannabis sativa
tgagattaaccttggggaccaaacacttatgttctttatatggtaaactaattcgagccccataaacactaattaggtttactattagctattacacattacaaagcccatactaaataagatattcattgggctcatttaatgagatcacttatttaaccttagaatattaactcaaataaattatctttatttataggacaatatttggattattaaaaatgatccaacaatttaagaggtaaaatttagtgttcatcatttttcgttagtcagagggaattttcaaaaataccattttttatgttttatttacaattttacggcttacatttttaattacaaacatactcttgtaaagttttaaaattacaaaaacacaccttaaaacaaaaactaaaaaataacgtgaaatcaatcccacgacaaccactaatcaactataaaacaaccaattaagaaaaaaaatctcatgacaactataatacaactctaaataaactataaaacaactaattaaaacacagttgattattttcagtgaagaagtatttttgtaaataataaagttcaaataaagagtaaaaaaaaaaattccatgttgatgtatttttgtaattcttttttcttaaaatttttgatcaattatgtaaattttttaaaattttgtatctattatttaaaatttttcttatataaatatataaatatgaatatccttaggagtgataaaatgataattatcataaaaattcacagaaaagagtggaccatttctgagcatatatagtgtttcaaagcattttcaatattttgtttacttgggtgcatacaataaaccaatattttatccaatatagagttccccatctactcttacaaactgtggata

SEQ ID NO: 102968 - DNA, 597 bp, Cannabis sativa
agtcgcgaattaggtctctttctttaagacgttcgcagcactgcccagaattgtacaagcagaccatcaacatcaacaggataaattagcccagtcaaaataacactatatcatagctctactgcatgatagaaaacagtcgaaataccacacccaataacactgttgtttagaatacatgtttgtaatataatctgggttgagtcgtgaattaggtcgctctctttaagacgttcgcggcactgcccagaattgtgcaaacagactatcaacttcgtcgtccccaaaataaaacaactcagtcaaaataatattgtatcagagctctactacacaatagagaaccatcaaaataccacacccaataacactactactcgaaatacatgtttgtaatatgatcaacaatactagaattatcattggtagtcatgacagaaacacatcatcttcaaattgttgaaatagttgctgcaaaaaaaataaataaataaaggaaacgaacttatcgaataaaatctaggttgagtcgcagattaagtcgctttctttaagatatttgcagtattgcctagaattgtgcaagcaaactatcaa

SEQ ID NO: 102969 - DNA, 848 bp, Cannabis sativa
aaaataataaaatatttatagtaactaataaaattattagtaaacttaattttatttaaattttaaattttggttatttatttgtaataaactataaaagaaattgaaatgttgctcttaattataattattttttcatgtttgacaaaaaaaatatatttgttacattttaaaatgattaattttaattttaagttgtttttttttttgaaagatttaattttaagttgtaacgatatcaactttatgtcaaaaggattaatggtggggatgaaatttatttttaatgttgaggaaataaaataaataattttttgagaaaaaaaatatagaaaatcgatggggagagaaatgtatgtgtctttttaggagagacttattattttctttattaaaaacataaatgtctatggataagacaagaacacgtagaatggtaatactttttctgttttggtatgttttgctccgtgtgtatataattaatttgattttcgttattcgtgtcattattattagatttaagtatataagtgaaaagtcctctttttttaatattatagatatataatttgggccgaacctaggctaaactttttttcaacactaggtagggatgcaatgttcattgttgtgattcaagctatttccacctactcgataaatctttgtaggcttcctgttgctttcattgaagagattcaccatctttgggtttttaagatggtgctagttggaatagagctatccttgttaagtatttgtgagttgttatggaaaaacataatctcctttaggttaagtgggttaatgtggtatatatgaaaggcattgagttttgggattac

SEQ ID NO: 102970 - DNA, 776 bp, Cannabis sativa
tccttgtggcatacaaagacttatcacatatttacaagttatctgatccacgtgtccctacttgactggtccacgtattttgggcgaatttaggggcaacagaagctatactgaggattgaagctaaaaaatcaatagcagaaggtatttcagtcctttcattgcatgtacaattttgatatgtttagagtttatattgagaattgaagctcaaaaatcaatagctgaaggtatttcagtcctcttattgcatatacaattttgatatgtttacagtttattctgttttttattttattttattttatcttaaaaaaataaggcgtttcatagataaggaaaattagacctcgcagtcattacaaatgatagaaacaggtatagagaatgactccatagcacctgtaaaattctaggcaaaagcccacctagccacattatgggcagcaaaattacaaacacgggacataaaagaaaagttacaagaaagaaaataattagagagtttattacataaagatacataattatcaatattccaaaaatagtgcattcccttcagcgctttgataaccacttctgaatcactctccactaagatatagtcatgcttcctgagcctcgccgtgtgcaatgcaagataacacgtcgccgcctcaccaatcagagggtcactgaagttaagacaggacgtagcagcccacacaatcgcaccagtgtgatccctggccagggccgcaatgcacatggtttctccgccaactttaacatcacag

SEQ ID NO: 102971 - DNA, 973 bp, Cannabis sativa
agagagagagagagattgaatgaaggggttgctcagtatgtatgaaaccatttttattagggatttttagtcaaacaatttctttattttttaaattaatatttatttattttgaggaaattatttcatatactatttttgtttttttaaatttatgctttaagttgctctagtggtttctccattgtttttatatgagttgctatacagattttagttgcaatttaagttactctgttaattgctatagaaatttctacgtgaaattttgtaaaatacaaaaaaaaaaaaaaaaattgaattaccatagtcaaacaatttcattatttttcttaactttatttatttatttttgaataatttacgcgtaattacggtaataataattaaattatacttaagttattttttttattagtatatttaaataaatttttaaataaaaaataaaaaaaatttaacttagactaatcaaaaattgtcacgtagtaatttatttcacttaacaacaaagtgtctttcaagattataatttgcctagtatttatttataatcagaatcaatcttaaatatttatattataaattattcttttttttttagtatttttacccaaagtactgaaatgatacttctttttttacattattttacaattttatttaaaaaagatagtgatattttttgaaaaattaaggtaaaaataattattcatatatttgtaaaaaaaaaataaaattcataaaaaagttgaaaaatgtaacttgttttgttatttttgagtatgtatgaaggtatttctttgtagaaaaaaaatttactctttttaaattgttgtgccctttttattccaccaattatttcaatacacatcatctatacttatttaatatataataataaattcgttaacaaactctaaattaaattaatatttataaaatagacataaattaatacctttgaaaaact

SEQ ID NO: 102972 - DNA, 604 bp, Cannabis sativa
ctctctctctctctctatctatattggaccgccaacgatgaagcccaaacaacgaaggttgctgcttgcaccacaggctcggacagactccatgcaaccacccccataatggtaatctatatctctctctttttccccttctgatctctctctcactctctctatttatttctctctttctttccctctttcgatctctctctttttcatttgatgttggctttttttagggttgtggtggtgcgatggccatgggtaggtgcgatggtggcggtgcggtgttggcggtgcagtggtggtggtgcggtggttcagatttatttttattttttaaaaaattcttttgctttggttcataaccaaagtaaaaaaaccagtcagcgtcagtgcactattatttgcttcagttatgaatcaaagcaaaaacttttttttatttaacattttgtgtcggttctaaactaaagcaaaaaatatgactatttgcatctacaattaataacacgttggttacagtctgtgcagtgacgaactcagaatttaaagtgagggggtgtatttttttttttttttttttttaaagggggggcacaccccaaactta

SEQ ID NO: 102973 - DNA, 503 bp, Cannabis sativa
taacttagttaccaaatttagggccattttgcatctcaaccctccaaaatagttatatggtttttttaataaaaaagttttttttcttgaaaaatggtctgtaataattaaacttatataatagaattcaatttacgagaatcacacaaataaacgttttgaaatacatccgttccaaacaatctctttatcggtttttaaagccctttgagctaaaatattttagtttctagatacatgataaagggaaacattagaaaagaagacaaagatgagacaattttaaagaccaaatctagaaaagatgacctatccctccatttcatagccatagtctttaactaactccaatcaccgcctttgtctcacgtttatatctttttgagtgaagaagtacttgagacttctgtaatcagtataactttcacaccttccactatataagtagtgtggccaaatctttaaggcaaacaccaccgctgcaagttccaagtcatgtgttg

SEQ ID NO: 102974 - DNA, 526 bp, Cannabis sativa
  modified_base (358)..(362): a, c, t, g, unknown or other
attttagattacccatgtcattatgtatagggattttttaattttttaattttaggctaaaataacttaaaataaacatttatattattccaatcaaaaataaatatatatactttctaataatttaaaaaaatactatttataaaaatttttattacaaaaatacggtagagatgtgaatcccatgtgcaaaaggagagagtaagatacacatgtggacaatataggcgagtgagactcacacgagtggggggcaaagtcattggctggcgcacgcataactgtaacgttagaaatgcgatagtgactctgtcgctgccacgtggcagttttgacgaagtgagcttgagcgtgttgnnnnnctttttctcaatacaatagatatgaaaaaacaagtaaatagcaacacaaaaacgacttgacaacaaccaaacttaaaaaatatatatatattaaacattaatatattgctttaacacaattaaaatttataaataacacagcaacaccgttaaaaaagcaacta

SEQ ID NO: 102975 - DNA, 1023 bp, Cannabis sativa
  modified_base (957)..(964): a, c, t, g, unknown or other
gtgcgcacaattctaaagtactacagaattcttcaattggtatattctctaacttcataaaacaactaatataattaggggtagaagtaattcctgagaccactactccttccttccacaatagcattaatccccctcccatacctactctaggcacttcgtagacattttcaaaagatagtattaatccccctttattattatatttagatatatatatatatatatttatatataagtacactgggtattacctataaatagatagtattagaaaaatttgagtttttatgtttaatttttctatctaattaaaaaaatctcacattttgacattatatgagatgtggaattccattgactgaaaaaaaaaaattcggcaaaaagaaaaggtaaaaaaatttttcacttaatattttgtatataaacatatttttaatatagtataaaatgagatataagcctagaaattcaaatttattctcttttattatttgtcaataaatcaaaatctaatagtttcatatttttaaaattaatatttatagttaaatttgtttagtatggataatacttattgaaaaatgttaggatttttacactacatactgaaatttttcactattttcttttttaatgtggggtggattttttttttttaaaatattgtgtattgtgttaaatttttacaattgttacacagttattttttagttattccattgttgttttaattaattattttgttttgttgttttatggttattttttttaaaaatacagtatttttgtaaaattttaaacttttgtccaaaatttagtatttttgtaaaaaccgaaaaatgttccataattaatactagacatagttccattgaaaaactaatatatatgtattctaagaaagacacagtttttattcattaaaactaatatatatatagggtgactattcannnnnnnnatttttattgtaactatatggttacatttttctttaacctgtaatagcaggttactaat

SEQ ID NO: 102976 - DNA, 711 bp, Cannabis sativa
cttagcctttgctttacctacacacgcaaacaataattgtgagcaacaaactcagtaagaaaagcatacaacacataatatattattgacttgtatttgggtgcccatatacacctatccagaagacttaatagatgatcaagaacgttcttaacagaagtacgacctctgtaccacatgaactaagtaccgctactttactagtgttggtaggactgaaccataccccgagtactaccgagtgttgtaccacatgcactacgtacttaattgtactagtgttggtaacaccagattgtaccctttaaacatcatacattgtaccaatatactcagtatcggtactataaaagtgttggtagaatatgaatcacataaacaacatgcatataatacacatacacaaacatatatatattctatgctaatcttatctcgttttcaaatttaaatgtgccagtcgatctaaatggaaaattatgcgctgaacagaggctttttgaatcaaatccttaaacacagctaaattcctaagaatttgatgagcaaagaccctggtttgccccagccgaaggtagaagaaagagaatgtagagattgaacttgttttgcttttttttttgttaaagtgaggtgttttttaagctaagtgatacctattactaacttaaataattaaaaatttagaatataaggataatactactgaga

SEQ ID NO: 102977 - DNA, 724 bp, Cannabis sativa
gccactgactaccttctcagatacaacttatcaagtcaacaatttgacgatcacaaggctacacctcccaatggttcctggctcctgtatgagagtttgactgtgacatgcttcgtcacccacactcaaactggggaataagtaagagacactatcaaagtggaagtaatcacaaatcttgcaaaagacatttagagtctcaattacctttaactttatgacaatgatttatggtgctacacggtacgctcaaatctaaatttaacttgtttaataccaaatttgttaaaatttctatgttgattagttacttaattccaaaataaaataaaaaagaaacattaaatcccatttagaacataagtggtaaatgtttcctccaaaagtcatcaaccccgctaggcaccacaaacaaaaaatagatcacaaaaggagacatgtttgagtcaatatcaatattaaaaaaatagaaaaaaaaagaggtttaagaacacatgaaccactaagcataatgtaaaacaaaactaagcatttgcatggggttcttctcaatcatttatagtaccaaggtcaagtatctcagcagttgcttcctcgataaaagcatagtcaagttgttcaatcctcccaccatcaacatccaaacacatgtgggcacggtaagtttcaatttcaccaaccacatcccaatattcattccttccagcatagtactcaatcatta

SEQ ID NO: 102978 - DNA, 592 bp, Cannabis sativa
aaaaaaaaaaaaaaatatcatgatctcaattttcattattttttttttaatataaacaacttgaagttagtctaattataatacttccaattaggtttattattaagtttttatttgataaaaattgaactcaaagcactattttacatcattctgatcatagtatagtttatttcgtgtgaatttcgagtagtgttatcgtgtttgactcattttatcgtccctacaagtacctactataattataatgtacatcgtcagatgaaaaacatttgagatataatttttctaaatgtcaaaactagaatacattctaggaacaaaagtgatgttactagttaagatttttctctctcatttatgtataggataagattatagtaggaacattattttagtctatttttttttcagcatgtgggaagaattataatccatttttttttatatgaaaatgaatagtaggcattctgccaattttcaaaatattcaaaaagtttacagtgttgaaagtaaaattcaaataatcagttgtatgcgtgttagattttttttttcacacttgaactataatttattttaaattttattt

SEQ ID NO: 102979 - DNA, 552 bp, Cannabis sativa
  modified_base (179)..(182): a, c, t, g, unknown or other
attgggtaaattacggtataaatattaaatgtttcgaattttatatatttaaatatttattatttattttttgagataaaaatacttaatgttataatttttttattactattcccgttaactcataaatatgaacacgtggggagttcagatttattacatttatttttattttattnnnnaacttaatattcttaatatcagaaactgaatgctacttgtttaaaaaaaaactagttttcatagcaattttcacatgatattggcactttaattcgataatcatgttccatatactgcaccggtttactcaactatagtaatttagtattatatctctcttatttttttaaaaaaacaagtagcatttagtttctgatattaagaattttaagttttaaaataaaaataaatgtgatacatctaattcctctacgtatctatatttatgggttaacggaagtagtagtattggtgtaagggaattgtaacattaggtatttttgcctccaaaaataaacactagaaatgtgctataaagattatatcgct

SEQ ID NO: 102980 - DNA, 738 bp, Cannabis sativa
agtttaagtttgaggtatagttatatttcactaggaaatattgtctttatgttcattagtatatcataaaggagagaaaaagaaaaagaaaacatgtggaatattaaattaagattttggtatgtatatattttttccactatactggtggtatgttaatttttcactatagtatttatgcttttgatgctattgtatatcgtagaaaaaaaatcatttaatagtatattcgtttaagtttatggtatattcatattggtctaaggtatatcatttgtatgtgatatggtatatcgtgaaggatagaaaaaaaaaactattaaatattaatttaagtttttagtatttttttattttgtacagtatatctttattatgtacaatgatatattaataaattaatagactggtatattatttttatttgctatggtatatcataaaagaaagaaaaaaaaaacttgtaaaagtttatttaagtttttttaatatatttatttgactatagaattgttgtggtatattcatattaattactctaagtataatatttatatgttatattatatatcatgaaagaaagaaataaaaataaaattaaaagaatacctattagtaaaaaaaaaaaaaaaagacataataatcatattactcaaaggtatagtatttgtatgttatattcatattactctaaggtatttttataataccttttatataatgaagggtattttaggt

SEQ ID NO: 102981 - DNA, 501 bp, Cannabis sativa
agtcttgccaaagaaattagcctagaaaaggcattgtctttacaccaaaattaataaagcaaaataaagaagaaggaaagaaaagacacaattttgttataatatctactagtaaaatctgattccttttcattgtatttggctactatttatagtgtaaatttgctattcaaatatggtattttcgtgtaccatttagtggggtaaatggcatgaaaaactgaagaaaatgagaattatgagggagttgcgtcaggttcatagccacgtctgcgtttgcgtgttggaggagaagtaacatgggacatgtgttgattgtttgagcttctcgacttacgtgggaacaagattaatggaagtggtctgattgctatgttgttttcggtcaaaagcacccaaactaatttgggcttaattgatttgtattgaataatcaaatcagcccatcaaaagagttaactagagttgaataattgttttgggccgtaactttggtgagca

SEQ ID NO: 102982 - DNA, 687 bp, Cannabis sativa
ctagaggttggtgaattggagactttggaaaacctacacactgtctaaaccctaaacatttacccagacacaattcagccctaaaaattgctaaaaccaataagataacagcgatgctaaccaagaagtggtaattaaacctagaaatacaacacaacaaactcgcatgaaaagaagagagaaaatcacttacttttcgaagtaggtttttgggatgatgaacgactttgcagtctgtgaattagcgaacgatgtgaagatccctctgaatgcttgaagtcaaaaattaaattggatgaaacttgtagaaaaaatgtcaatgacagagagggcatgcaaattttcgagcaaatctggtgatggtttttcgatggagaagcttagaaaatttttagagtttcaaaaatggcaagggtagtgcaaagatggttctttttttttttcattttatactcttgggttaatctccgttagatcatgaagataattgattctatggatagaatttgaaaaagaagtggaaaagatggtaattaaatgctaatgtacctcaaaaccataaaactgccaaaatcataggacatgcattttctcgaaaggtattatgacaaatataccctctgtagtcattaaaacgcactatttcttaaaaaagaactttttaaaggacaattgttatacccaaaa

SEQ ID NO: 102983 - DNA, 549 bp, Cannabis sativa
ctgtttataatatgtttccaactccatgttttaaatgataaattttactcaagcgatgaagtgctagaatcatatgtatataaatagatattattattacatatatatatttttcatatataattatatatgttatatatagatatgagaaatatatgattacattattctaataagcaataattgattaattaacgttaatatcaaaatattcactatgtgtgacaggtgggatcacattattgttataattatttctctcatcaataatttatttgctgggttcgcagaaaaaattataagaaaaaacagccggcaaacgtttaattttttaatttttttcaataagataacaggcttgtcaacaccaataatggacaagggagcctgaattaataattgatttaatttaatggaaacaaatatgtcaaaagatattgataaattatacggacatgttaataaaatcttaagtttattggttccaaataatcaaagaaaaaaaattcaaacctgcagacataacgtatttaaaagaattaatactaa

SEQ ID NO: 102984 - DNA, 643 bp, Cannabis sativa
ttttttttttttttaattttcatctcagatctctatctctctttcaaatttaattttaaagttcaaactatttttaggtttcagatgcttttctaatagatttgaataaattttgaattgggttgtgttgaattggcttgcattactactcctccaagtccaacaacaacatgtacttttcattgatctctctttaatttgttagatttaagagtgtgtgttcccagttgaaaatcctatgcgtgaaaggatttgaactggagttctaattaggctatagagctttctccataatttaagcactatttgaagatcgttctcacatgcacaatatatgtataaacattcagttttattagctatataggaggagaatgaagctcttatgtagagcttattaggaaaaattactcttaaaatttttgttctaaaaatttctcaaacatttgtggtgtttccttttattatcaaccagatgtttctcgacttgcaacatacatgtatttcctttacttgtttccatttgcctacattaatttctagtaatggtacactatttcaagtgatgcttacttgaaggaatgaatgtgtaacaccctgatttctcgagatgtcacagaagatagtccgtataaaacaattt

SEQ ID NO: 102985 - DNA, 576 bp, Cannabis sativa
tatagaaaatggatgattcaaaaaaaaaaaaattgattaatcacttgtaactctttggttgatcataaatttagtgtaacaaaagagatattacacagaattgattatcggattcaaagctatgataatcagggctggccctgaaatttagtgggctatagggaaaaaattatttttggcccttatttagaaaaaaaatggtatttttcaaaattagcaaaaaaattgtatatttttaaaagggaattttttttttgggcccctggactaggtgggccctaggcacaggcctagcccgcctatgtccagggccaaccctgatgataatatatttgttaggaattagattaatactcatttataggagaagaatgagttagaagacgtttgggattgatttggttcgaaggagattacaaaacttataaattggtatgatgaaaaactgtagcagctgcaacatgtcgcctaaaggtacaaaattgagaaacgttctttgaatgttggggaacgattccaactcttgtataaccatcaaatctttattattaattaatccaatttacacctattaat

SEQ ID NO: 102986 - DNA, 696 bp, Cannabis sativa
tctctgttgccttccagtacccagctctgttgctctgtttgttctcagcccagttgggtattttctgtgtcttacatagaaaaaatatcgttctttttctcctatttttggctccggtggtagacgggggaggagtggtgtgcgcgcgatggatcgacgatgacaggcgacgttgaaatggatgacgataggtggttgaatcagggtttcaaggactaaggagggagagagagaagaaatgcaaatagagagaggtagaagagaggggggcggctgagagaggttgaagagagaggggcggctgagagagttagacaaattgttagggtttatgtttcttatatccttatatattcttttattaaatgatttttatttttgagcttttaaaaaaaatacatttttttttgttgaaaagtttctcaaatgttaatattgttatatttttttattaaaataaaagggtatatggtgacacgctacgcgtgtgagcaaacgtgtttaccaacgcattttgcgcgtggctttagtgacgcgcaaaatgcgttggtaaacacgtttgctcacatgcgtggcacgtctctataggtcatagtttttttatttttataaaattataaattttagattttagtatttagtgacactccatatttttagtgacacacattccgcgtaataaataccgaacattta

SEQ ID NO: 102987 - DNA, 871 bp, Cannabis sativa
ttgcgagaaaatttgttagttattcttttaaatactacttattgacatattctggggtaaaacttttgtgaagttgtggttgactttttctaagcagaatatatgcgtaaaggcagacaagtctcaaagtactttgcccaacaacaaactatttccttaacaacactataagaacactctaaaaagaaagtgatcactttttatagaattcaaatactcctttaaatattatatttaaaaattatccaccaactccatggctatcacaaaatattttattggatgtttatgatcacaaataaaaagatcacacgaccaattagaataggcaataagttgcaaaacaactccaaaatagatttgttatgtacttgatgacgacacatcgtctgatacacactataggcgcttttgtagattttgagaaaagggaagaagtcacgaactactttgtcggtggtggggatattgtagaaaataatattgttatttggtaaattctttttgctctttttagttcttggttagaaatgttaacttttgcaagcaataaattcacggagtagatttgagttttgcttaattttatattattgatggccttagatattttttttcaagaatgtaattaactcctcatttgttactgctaacagtatggaagaaagaaaaaatcaatttgttttgtttttggaaattaatatacttgccctgttataatttttacttatttatttgttttcttgtgttggaatgtagaggagctgctgtattattaattcttcaacgagtgtagccatttttctggaaaatccttcaacctatttcactttttacaagtataataaaatttaaattatgaaattatatg

SEQ ID NO: 102988 - DNA, 669 bp, Cannabis sativa
gtcccgtgacacaaagtctgtaatcaagttaggtgtagtgtatcagagtatcccaccaaccgataacgaactacggttctacttagtggtaccgatgcacactcgttaggtgtacaatctgtaataaagttaggtaaagtgtatcggagtcaccaatttcgtaatgaaatcactaacttataccgaaatagagttctaattagcggtgtcgatgtacactcgcagtactgacattattgtcactatagatatttagggatcccgtgacacaaaagtatgtaatcatgttaggtgtagtgtaccagagtcaccaaatttgtaacgaaatcactaaccgataccaaaatagggttctacttaatggtgtcgatgtacactcgcagtagtgaagctatcactgttgatgtttacgggtcccgtgacacattgtatgtatttaagttaggtgtagtgtatcggggtcaccagtttcgtaacaaaataactaactgataccgaaatacggttcttcttagcggtgtcgatgtacactcgcagtagtgacactatcactatagatgtttaggggttttgtgacacaaattatgtaatcaagttaggtgtagggtattggagtcaccagttttgtaacgaaatcactaaccgatatcgaaatatggttctacttag

SEQ ID NO: 102989 - DNA, 573 bp, Cannabis sativa
tgaaggacatatatgcatttgagtcgataggttcctctattccagcctttgagtcaatctatttgtctaccctgtatttgagtagatagatgatgagagaatgaatttttttaaaagtaaaaaaaatgggaaaagaaaagaagaacaaaaaagaaaggtagatggaggtttagtgcttgacatcataattgttattattatttttttttaaataagttttaatgttttttagtttaaggattcaattaatgattatgtattttaacttgattacgatatgaattttaatatatattgtttacttttaattgattttaaaatatttttatttaattcttaaattattaaatgaatttttaattaagaaatacaaattgatgatgtagaccaccaagtgaatgataattgcggtcaagtacttgtgaaaaatttcaaaagtttaacagaaaatatttttatagctaaaaatttttgttgaatatttatttacaaccgcgagttaaatttaagtatgtttatcacaaattacctttttttttttagttgggtatttatttactaccgcaagttaaa

SEQ ID NO: 102990 - DNA, 796 bp, Cannabis sativa
aggaactactctctccagatattgcatcttcgattatgggatcgtctcgattttgatcttcatcatgatctttctagcaactagtcacctcatgtggatcgtcaaggtttcctgctttggtgctaggaccagtaaagtgaagactagattttttttgggtgagtaccatgattactgaatgcaatcatctctagatggtatcactacttcttccttaatctctcaataaaagtacctaaatatttattgagatttttggaaaactaattatatataagaaatatacaattaaaagataaagagtaagaaatacacaaacagtttttacgtggttgaggtgttaactatccttagtctatgattcgatgttattgtgcaactttttagctagaaaagcctttgggaagacaatgagcataagttctcaagttttcttgagagctcaacccttgatccataggattcatcgagtatttatagtatttagagaattacacttagttttccttttctatctattgaggagtttacactgaattacatacttggcctgtctcgtgaagtccagcccatgagaggatgatttgctgactaaccaaaggagatacagttaaattagtcaaaaccgtgtcctataattatgggcaattaatcgtgaattaattgtttgacctctattttaggaagtttctccttttggcttgatgcggtcttttgttgagatttgagaagcagttatttccttatctgtgcacaagaataaaaagggaaactggacgggttttccaggaacacg

SEQ ID NO: 102991 - DNA, 592 bp, Cannabis sativa
caaagaggccaaagtagatatctgatgccaccaccagtggtaggacacctaggagtcataatagacggatcccacattgcagacgaaactagaaaatctagggagtgctatgctcggacactctatcacgagcccaaaggcgaagtcctagctgtcgaagactagagctctaagcaatagaagcccgtagagcccatgatctcctttaccgaagaagatgcagcattgatcatttaaccgcaaatgatcccctggtcaatactgtgcaaatcgggaatatgaccatggctagatgtatggtggatgatggtgcctcctccaacattattttaaatcaacatatgaaaagatggggctctaagtcgccgacctggagccttgtagccaaatgatgtatggcttttttggccaaggcattgcacttgtcgggtatatcagattactcatcacagttggagaaaatccaaccacaagaacactatgatgcagttcgtcgtgatcgacattccctcagctttcaatgccatgattggccgatcgaccctcaatgacctgaaggcgagacgtctatctaccacttatgccttaaatt

SEQ ID NO: 102992 - DNA, 1099 bp, Cannabis sativa
gaggattcgatgccatgacggcattctttgcaatccgctctttcgcaacatgttgcttagcctactcaacaatcaaggctagctctaccacttttatgtacaaagtgtcatgtgaagtggtaatgtgcaagtcccgactaattgtggcattcaatcctctcacatatttctgtttcctggtgaaatctgtgggcactagatcaacaacaaacttagatagccgatcaaactccaggctgtattcggccactgacatctttccttgagtaagttttacaaagtcttccatgtctgaagctctcacagtgatgctgtaaaatttttcctcaaacaaacttttaaattcttcccaggtcattacaccgacatcccgggtttggcccatgatatcccaccagacgggggcatggtcttgctacatgaaggctgcacaattcactctctcagttcccctcactcccatattatccaggatgcgggtaatagtgctcatccactgattggcctttattatatcaatacctccgtaaaaagtcggagttttgaagcttcacgaaccgctcaaataccaagtctctatgcatcataacaaacccctggttacccaccactggcacaagtactggtggtaacacgtgaactacaggggcagccggtgccggttcccttaatcgtcgcaactcttcctcttgacgaaatatgacacttcgcatttcttggaacatctgctgccaatcagcaggaggattagcattaccaacccccgcattatcccccagattctgcagaggtggaggcggtgtcggtggattggtttgggcagccccaggctctacttgctcggcctgttgtctagatgactgtggagggtccattactagtacccctataatcaacaaccagagcgagttaagcaccaataccacacttatgcacttattgccttaaaccctatctgatctatttaccccatataaataaacgcttaatcatataacatataaagcatggcatcacataaaacatatatactcttgatgctcgcatactgcctaaaattgaaagcgataaacagatgatcacataaacagtaaagtat

SEQ ID NO: 102993 - DNA, 1024 bp, Cannabis sativa
  modified_base (558)..(564): a, c, t, g, unknown or other
atacaacttcaaccttccttcccggaagccaaagcttacttcataaaaattcaacgtgactcttgcatgcaccttgttttttgttaaataaagatcactgggggtacaatacgttttaactctccttcccagaatggaaggactacctgaagtctgtcctactccccgtgatgctttcccattgatctttccaagcgaagtctgatcttgaatcgatatgaaactccatctttcttctcggaatccgaagcttgcttcataaaaattcaacatggctctctcgtgcatgctgtttttcgtgcaagaaagatcacttggggtacggtatgtctttaatcctccttctcggaatggaaggaccacttgaagtctatcctactccccgtgatgctttcccattgatcctttcaagcgaagtttgagcttcgatttttatgcaacttcagccttccttcccgaaagtcgaagcttgcttcataaaagttcaatgttactctcgcgtgcatgttattttttatgcaagaaagatcacagggggtacgatacgtcttcaacccnnnnnnncgggatggaaggactgcttgaagtctatcctactctccatgattctttcccgttgatcttttcaagcgatgtctaagcttgaatatttatgcaacttcagccttccttcctggaagtccaagcctatttcataaaaattcaatttgactatcgtaaacccaacacgccttgcccttcgacatttgtaagcaaaatctcatcataatgggaattgcccgcacgtaggtacatgcccagctttccctctgggaaaccaaaagcccacgatgctgcaagaggcccatgcattcacctacgaggtttatgtcacaaaggaattgtttggggtgaatcatacaactgggtttgcattcgagaccccatggttccttctcatggaagcctgagaatggttgtgcactttcgagaaactcccctgaaggatagtatgcttcccaaagcgaggtagaactacactcaa

SEQ ID NO: 102994 - DNA, 716 bp, Cannabis sativa
gagagagagagagagagacatagataaatgagcaagaatagaggtgaacctttggtttctaggttagaactctcacatcttcactagccagtcggtgttctaggcgaggcggagagaccgatcaacccaaaatctgttacccatgaccatcgttccaaaatcggcgagacccacctggaaagataagtcgtccactggtcgatgacgttcttccatctgggttgggaaatcggggccaagctcaccgtctgtgtagaagacgattcccttgcgcaccgtctgtgtagaagacgttcctcttgagccgtctgttggcatgagagagaaggggttgtttaatagactttgacaattttagggtttcaataaccggccttttagcttctaaaaaagaatccttttatttatattacttttaatacttttaatttttttttgcaaaataaaaaaacattattttaacttttgattgaaccgagagagagaagtaatctttataaattgattttttttcaatattctttgtgtataacgtcgctccatgtaagactggaaaaattatcccagtcgcacgtggagtgacgtgcaaactaattaatttttcacaaataattaaataattaaataacttttagtgacacttcatatgttttagagtcatgcactttgggacataaagttaaatatttagtgttgaataatgggtgtcactaaaa

SEQ ID NO: 102995 - DNA, 568 bp, Cannabis sativa
  modified_base (26)..(30): a, c, t, g, unknown or other
ataaaatggattacattgaaatggannnnnatttagggcataaaactcaacatggaaacctttcagtgaaattgcatcttaatttttaaaaataccatcttttttctatttttaacattttttttagctttattaaattaaagcatataagtttaaataaaaaattgcactatatatgatataaactataatttatattcatgtatatctgagtcgagcaacactttggtacactgaaatgcacagtcttgcatcacagtcggcatgtccgccgatgtcatgtatattcaaatattcaaatcgatggctatggctgccatgtatattcaaatcccattaattttattatttctctttacgtttcaaactctttacatcgtatccgtacaaagaaaaaaaattctttacatcatatatatctatgaaataataaagtgtatttcttcttatccaagccaattgaaaaagaaaaagaaaaaaaacttggtgacttcttaaacaaacacagacgtcgacgaaggcaaatatgtaaatcaaacatatataattaaagaaagaaacaaacaat

SEQ ID NO: 102996 - DNA, 622 bp, Cannabis sativa
taattatttgcaacataagtgtgaaagagttatatcttaggtacatttttcatacaattataaaataaagttttaatacaaaattatgttagataattaaaaaaaaaaacttacaaatttaataccatatacacaatgaatgataattatatattgtaataaaaatatatttttttgagtacataataaaaatatcttaaaatcttaatttttgagtactaaatgcacaaactctaatgtacataataacataaagaaagatgctaagttattttttttcttttcaaatgaaggaatatatatatataataaaacattgaaattaattttaaatcaattattctaaaataaatgattttgttttatttaatgaaaacattaaaaggaaagtgaacttcagcacaaaataattattaaataataagtatatagttagaaattagaaaaatccagtaatacacaagtattaaaaaaaatgagttaaaaagtcaaaatataataaatatttatatagaggaatgaaaaagagtatattattattgagtaaaaaaccattgtaatagtagcattgtataaaaaaaagttgagggggccaccccagtcaataacatggctccactcc

SEQ ID NO: 102997 - DNA, 552 bp, Cannabis sativa
aaaaaaagtattaaaaattaaattctacggaaacaagtttgagtttatttctttctccaaaaatttaaatttatttaggtaaacataatatatttttaatttaacttctatttttttaatttttttttttatatttatattaattttctaattattattattttttttaaaaaaaatatgagtttgtaaatttttaatttctattagataaagttcaaaaaataaaaattatattttttaaagataaagaaagaacctaatagaaagaagatgattatgtaactactaacggtcatattttagcaaaaattcttaacaaaccgtacattttatatatataattctttcttcttcttggtcatgtctcttgacatgtttgttgtctctctacattagagtgattcttttttgtgtgtaattgtttactggtgtttgtttgagtgatctttttgcaatggcttcatctagtggagtgaacaaggatatggaacaaaaatggaaaagtatatgtcttgaagatgaggaagataacgaggtggtttatgaagagga

SEQ ID NO: 102998 - DNA, 1095 bp, Cannabis sativa
atttagattattgtttaatgcagattatatgttagtctatctcagagatgattagataacatataatttaggacctaaaaaatcataaaagagttaagttaacttttatatatgtcatttacattaagaaagaggaacagtaattaacattagcaattaaatatttaaagcagcaggattctttttcttaatttctcatctttgattaaacacttttattgcttaattttattttctggttattctttatttttatttttataaaaattattggttaccaaatagaaatacaagtccaatttagtggtattcatctcaattccctgtgggatcaacctcacatgtatgagtactacttgattacgtgcacttgcgtagctattcataatttgtgtaacaagtttttggcggcgttgccggagaattgtttaaaaattgatattatagaaattagactaaattctggtttggtttttcttccttacttcttgctaactattttgtcttaatttttcctatcctatctcaggtgttttggtttatgcaacgtcaaggagctagttcaagagtgcatgttgatcctgagattaagaagacctatcgacagaatagaatgaacaagagattagaaagagctacattgagggctaaaccagaaatagtcatggctgacaacgccaataatggaaacaacgaaaaataatgggggtgcattagaagaccagacaagcaatcgtaatccacctaaccatggtgtaagggactatgttctcccaacattgacggtcgttcagtcatgtataagaccacccgccatagaagccaacaattttgagataaagccagccatactccaaatggtgaaatcttcagtccaatttggtggactaccctgagaagatctaaacctacatttatcaaacttcgcgaagttatgtcaaatattcaaagtaaacggagttagtgatgatgctatctgcctgagactgtttccattctcgctaagggagcgagctaagagttggttggtgtccttaccacccaactctattaatacttggaccgacttgccaatgaaattcttatcaaagttct

SEQ ID NO: 102999 - DNA, 865 bp, Cannabis sativa
aaaaatattaaaaaaaaaattaatcaatagtatatattaatttttgcttgaagaaatttcaaaccaaatggctgccattttcggaggagggctggttttagaaaatgaattggggaagaagaagaaaggggggaagagaaaaagagagaaagaaatatataggcgggctggcaaaatttagtgaccaatcttagttggcctatattggcccactgttattagtaaaacacggtccaatgagaaattttaagtgaccaatctcaacgggtctatattggcctgtcgttattaataacacgacccaatgaggaattttaagggaccaattgtgagcctatattgacccaccaagattggtaaaattttaagtttaaaaaatatcaataacgacagaacatacaatgcctgccaagattgctacactcataatttttttaaaaaaattcagacctatttgcgtgcccgtcgagatagggctcctttttttttgtagtattgattgcaccaaaaacgataacgtgttaaaaaaaagtatcaaataccattattagtttcttttatcatttctcaacaatagcacagttaaaacacaaatttgattattggtaacaaatcaaatcaacaaaatagtacattaactttgataagagtgcttatcccaagccactccaaaccatgtacatgtgattggtgggacttatttcaattgggatgaccctcatttcacctttgacaatcttataacaatctattattccacactttagtaaacataacagctacacaaaacatcacccttcgatatcctttctatctctcaaattcatatggctaattgtttattatcataaattaattgtggcga

SEQ ID NO: 103000 - DNA, 763 bp, Cannabis sativa
ttttctttttcttcttcctctttattttaaaaaaataatcccaacttctcgatcaatcacttcccaaataaaaagaagattttatgtaccaatcgaaatttctttcatcataagtgcacgatttattcccgcattgcttttcaagttccaagaagtactgaaagtactcattaggatgaacaacttgcgcctcaacctgtattaattatcgtaatacaatattagttaagttatcatcaaaataactacgttttataccacaatcgaattaataagataccaaatacaaaaacaagcaagcaaactaaccttttcaattaaagccaaatgcgcttttctttctctgattaatcgttgtaagttcactcttttttcactttcttctctttcctctttttctttttcactccttgtcttttcgaatatttcccgcggccttttcttcaatttctcatcgacttcgatctttgtagcttggtaacttgagttggcatgcatagattttgcatcaagaataactttcttgagatgacattctgtttctttatttaaaaaaatatataggttaataatttatcattaactctacatatatatgtatataaattaatattaattaaataaattaaattaaccaattacctttttgaaatgacgaagatggaattacagtctttgcagaaactattgatttacgatatagagttgacgttttagaaatttgggatttctcgttagtaaattttttcatttcagatttgtt

SEQ ID NO: 103001 - DNA, 614 bp, Cannabis sativa
ttggaattggagccatacttaggaactctaatggagatgttatagcatgctttcaaagcctatgtttggaagttttacagttatagaagcagaatgtaacacaattgttgtggttgtggattgcattgtctcttcaggatttgaaatctaatgttgttgaatctgattgcttaacagttgtatctggtatttaataatagatattcttactttaatgactttagttcattaactgttagagaatattgcaagctaattttttaaattttcaagaatgttcctaatccatgtatgacgggcgattaatacggctgcacatggattagatatgcatgttcttcggatgaatagacaacttgtttgactagatgattttttttcttgtggattgtatagtctttttagcttgtacgacactatttggttttcaataatattgatcattgttttcaataacacatgtcatcaaggattttgcctcaaaagcgaaataatgcaagttttatctaatttaaattagcaaacctccaaccatagtcaagcatataaaaatagaatccaaaaatattgcattttcaaaatatattatcaattttccacaaatattgcaatta

SEQ ID NO: 103002 - DNA, 1221 bp, Cannabis sativa
  modified_base (724)..(728): a, c, t, g, unknown or other
  modified_base (895)..(899): a, c, t, g, unknown or other
cagggatactaaaaatttggaggggaccccttggatccctcatatcaaagattttatctcgaaacctaatggtggtcccaccaatgaacgatgcaaagttgccgatctcttagcttccaatgatggttgggcaaaagttgtacagcctctttaatcaagacactgtgcctgcaatcttaaaagggggtactccctctgatcagggcaatgataagtgggtttagaatcttgagagtaatggccagttctcgagtaaatctgcctaccttgctcaacgctggaaagggctcctcactgtgagatagcgccgtcactttggaacaagctctagaacagtagaattctagagccccattaagtactttggtggagtatcctgtccagtgcgctccttgttcggtctgtgatcaggaatagattttatattgaagatacgagctgttctctctgtgggatgagggaggaatctttagaacacctatttctttcttgcaatgtggcttttcacttttggcgggcgtctccgtggggtatttatcctatttgtgatatcggtattcgcatgtgggaatgggtcaaattcatttgggacctcaaacataggggaattcctgaggggaatatctttctttatgcttcgattgttgttgacaccatctagaggatccgtaatgataaggtacacaataatagtccaatttgatgtgaagaagtgtattgactnnnnntgtacttcttttgtagatttacatacttcgttttcctttcccttgctctgtgcttaaaggaggcttggaatccacctccacatgattggattaagttgaattgcaatgttagtgtaacaccctaacttattaggcatgttagcgtgattttaaacatactgtgcagnnnnntgctaatcaacgagattaatgaaaagcgtgattaattaaatttttcttatttaattaggaacataaagtaatacttttgtaaaatctcgggatcccgtttacaaaatacatttacaaaaatttaatattcatattcaaaagtttgtcccctagcgactatacagtaaaagccctgatgtcccaaagatcgtacgctccaggcctaaccgcccggacatgtgcaatcttcatctgttcgccctcacggttgctcggccttagccttgcccttacctacatatggaaatagcactgtgagtcgacagactcagtaagaaaagca

SEQ ID NO: 103003 - DNA, 664 bp, Cannabis sativa
caaggttggcctcgagaatcgtgcaaaccgatttcagtaagaaagagaagtacctggacgggttaaatgcaaaaatcagacatgacctaatgattactaacgatgacaacaccacctacgctaatatggttgataaggcattgcgagctgagggtgtagtgaagtgcaccttagaatctcgagagactccggttgttggcggggctcctactcttcctacatcaggttttagtaggggaggtagtggctcggccactgatcagaaaagaaaggcacctactgcatccagtggcttaggtcagaacaagaggttctgagggaaccagggtcgaggtagtggacaaggtagctctgagactcgatacacttacccagagttccctagttttaaaaagcaccatctgggggagtgcagagggtagggatgtttttagttcggtatgccagggcattataaaagggattgtccccaactctagactgaagcacataagactgcatcaaaacccactccagcaagggtgttcgcgataactaaggctgacgtagaagccagccctttagtggtaccaggtcagctctcggtcaataactcttatttctctgtgtagtttgactctggggcaactcattcctctgtggtagccaaaatttttagtaaatt

SEQ ID NO: 103004 - DNA, 572 bp, Cannabis sativa
gatgattgatcacaatatgcgagagtgctagattgatcggctacgagatcaccataaccatttatgcaacaacttggtaatatggaacaatggaattgccacggaagtatggaggatggatcaaaatacgtaaaagtatgcactgtatcggctttcaatgtccgaatggacatggaatgttctgtaagaattcgctggccctactagctagtagaagaaacctatccttaatacccactggttttggatataaaaattttttaggtgttgatagttgttcaacgcgacatacggtgttcatgctgaccttaacaaagcatggatgattgatcacaatatgcgaaagtactagattgatctgctacgagatcagcatacctattgatgcagcaacttggttatatggaacattggaatgaacatgaaagtttggagtattgatcagaatatgcaaaagtctggactgtattgtccgaatgcacatggaaggttctctaagaattcgctggccctactaggtagtggaagaaacctatccttaacacgcattggttttggatataaaaatcgtt

SEQ ID NO: 103005 - DNA, 523 bp, Cannabis sativa
  modified_base (397)..(408): a, c, t, g, unknown or other
catgggaataccataaatatcgaggaaataaaaaaattaaggctcttaaaattgctaaaatcggtaaactggatttccaaaatggtaaattattttctgggaattgcttcggaaaatggttaactatttctggagaactggttaaccgttttggtgactcataaatttagactagacttttaagccacaactgctcgctagattaacgagaatgaaaaaagtagttaagtaattaagagagacacaataaatttatagtcgctcaccccctatatcgtgatagtaatggggctacatcttcttcgagtttttatttctcacgagatagtaattatagcaatagaataagtgtcaaaagctccaaataaagacagaaaatctagagagagaagctctnnnnnnnnnnnnagttttctgaatgtgaaaaatgatctaagggaactctccttttataggtgaaggaggaccataaaaataggggaaaattcaaataagatgcttttaaccgttgatgatgatctaa

SEQ ID NO: 103006 - DNA, 789 bp, Cannabis sativa
tttgctaaggcattatggaaggaaacattcaaggccaattgtatgattaaattagaccttcagaaagcatatgatactcttaagtggggtttcctagaggagatgctaagtgctatacagtttcctaagaagtttatacagtttatcatgcaaagtgtgtctaccccgaggttctcccttcttttcagtggctctcttcatggaatttttgaagccaagagggggctaaggaagggagatcccatgtccccgctcctatttgtacttggaatggagtatttgagcagaataatgggagtagtgggaaagaagaaggaatttggcaatcatgaaagatgcagatacatgaagctaacacatttaatttttgcagatgacgtgttattattttgtaagggtcactttagcagtattcatctcatgctacagggtttgaagttgttttctcagacttctggtttgcttcctaataaaagcaaatcggtaatctattgtagtggcatggaggagaaagagattcaaagagtagttaatgtctcggggttcactaagcaagaggtacctttcaagaatctttgaattcctatatgtgccaagaaaattccagcagtagagtgcaagatacatgttcaaaagatgactggaaaattaaaacatggagttcttggaatttgtccttcgcagggagaagtgtgttgattagttctgttcttatgaccatacatacatactggagccaaatattgcttcttccaacacaagtagttcatcaaatagagggtacatgta

SEQ ID NO: 103007 - DNA, 947 bp, Cannabis sativa
  modified_base (289)..(291): a, c, t, g, unknown or other
tgacttcttcttgcttgtgctgtgcggtccgggcatacctctcctgagctttgcctgaatctccagcaatgtgcgggcctccaataatgacttgtaggtgtccctctactgctggaggtagcaaatcttggttgttctgaccttggttggtgttgacatacttctgtaagagcggattgtttttctttattagaaattcaatttcccgctttagattgtaacattcgttagtgtcgtgcatgtagtctctgttgaattgacaaaacttcgtcatgtcccttttgttggnnnctttcttcatgggcccgagcttcttgtacgggattaacgactgagtcgccatatacatactttctatatcttcaatcagaatagtgaatgcagtgtatttggcatgattctctcggggagtctgtccgaatttatcagtgaactttcctttcttcctgtttccttgcttgtggttgttgcttgaacgcttgccacttgagcttgaattattggaatagttgggaagttgggtggatgtcccagtggaagtagccttcgacttgcccggcttttgttcaccttctgctcgttgaatggcttcttcgaccttgatgaagccttcgactcggtcaaggaaatcactcattgagtctaccggcccgatcttccttatatctttccaaagttcaccgaggacttcattgtccccagtatcgcagataactttccatcctcggctacccgcaaaactttagttgcttccgtcacgaatctgctgatgtatgcccagagtagctcacctggtcgttgctttacttcgaccaaatctcccaaatgccatcagagctggcgcgaggaggagaattgcgcatggaattccaaagagaaggttttccatgaactaaactttcaaggagccaacttgaaataccattgttgtgcggcttccgacagag

SEQ ID NO: 103008 - DNA, 608 bp, Cannabis sativa
ttttttttttatcatctaacttgccactatttattatcacatagtaggcagttaattacaaagttgactatgatctttataatgtttttccctagaatcatggggtttgattacatatcacgtattataaatgcggttattatttgaaaatcaaacagttgtgatttttcctgcttttactgggtcaaagatgatcgtgtgtttaaacacgtctttaattgcaacattctaagatgtttcgacaggaactcagttccaatgaccttgatagcgaattggagctagccttttcccctatctttctgaggtcaataatgtactcatcgttgcttctttgtttgaaagcttaacgcttcattgtgacaatcgtagttcttattaacagagagtttcttggttttggttattgtctgcttgggcggtcctttgattctggtcagccttgacatacttctgtaagtgcgggttattctttctgattaaaaattcaattaccttcttcaaattattacattcatttgtgttgtggccgtaatctgcatgaaagcggtaaaacttggttgtatctcttttacttacaacctttttcattggagatggcttcttgt

SEQ ID NO: 103009 - DNA, 516 bp, Cannabis sativa
ttctattcaaattgagtttgaatgtccgactaagtgttcgaactgtggtggttttggccatcagattgatcaatgtagaaaagaaaagaagtggaccaaagaagattcacttctgactaaattagatactcaggtagaaagtgagatgaaggaattgttgctttgcctgaggaaattaatgtaaaagggaagagtttaatggtagaggaagctattgatcatcctgaagtgggatttgcgaaagactctgcttgaagcagggatagtttcagctgcagtgacttgtacagaaaaggctaagtctgataattgggagattcccaaaaggaaaaatggaagaatacatcagagagttgctactcaaagaggtaatacctttcgagttttgcaagattaggtcaatgatgatgttactcaattcgctaatggatagttgtaatattttattatggaatatggctttaatcgccaaaataaatatgaggctgatcgcagtcttttaaaaatgaataaagt

SEQ ID NO: 103010 - DNA, 861 bp, Cannabis sativa
cccaaccggaagtccggttccagggaccaaccggtcgaccggttgccacaggctcccaggaaccggaattccggttccggactgggaaccaaaaatccaacctccacacctcaatttaaacccaaactttctaaaatctcctagaatacctgtatatactatattaaaccaatcccaagcattagaattcaacaatccccacaaatttccaattcaccattaaagagctaggtttgagttctcaaactctaacttagctcaaatctcaaattagcaaataaattcagttcaaataaacttaaacaatatcaaataatctccagattatcaaatcaaacctctcttagatcctacagcaacttaaatatcaaaactcaagctatatgcaacctaacttttaactaaagctcaattagtaaaacctagggattcttaccttgattgaagtttaaatccttgctggaacttagagaatcacagcaatgaaatccctcttcctttgctatgctttaaggttaaaaaggaaagggaagaaagacttacgaaaaatctaggtttctctcaatttttctattcaagaaaatggtttcctttttttttctttttcttttaaaattactaagttatatattcagcatatattttcataaaagacaaaatagagattaagtccaaaagactactatacccttctagctatttaccaagtagctaataacccacaagggtaattaagtcatttgtggacccccagaaaaccaacaacactaatatctaacaacgataccccgatagcattctaaatcttataagatacaactctctaaaggcccaacgtcactttccacagcttccgaacac

SEQ ID NO: 103011 - DNA, 1151 bp, Cannabis sativa
gagcttctgatcaatccaaactaaaggtaccctgttgatcgttattggcaatcctcacaagtgattcttcagggtaagtattatcccttgtgaatggtggtttgaactggattatacatattattattttttgttgctccattgatcttttatctttgtctccacaggaatggacatagattttccgagtgatcatgtcttccttaggctgagaaggaatctaggaggaaagttggcgtggtttcagattctactaaagaacccaaccaacccaagacccaagcttgcacaagaagaccgttgtgccaacctctctttggtttgagaaatttcttgaggctaggaatgaggtcttgggtgtaggaaatgggatcttctaatatggagaatgaggcctatgtagaggtcgatcttctacgtgtagacggtctttctcaagctatgtgtagccggtctttcttcaagctatgtatagacggtctttctccgagctatatgtagacggtctttctcgagttaatcaaccccctagtattctttgtttaggaagatgacttagtggtttgcccctagtggcattttttgtgaagataagtttataaaccaacttgggttttcttttatcttaaatgccttgtactcttttcattcgaacttaatataattgtgttcacttgcatttttatccacaatgtaaacaactatattttaatcaaatgtaaattacttttgaatttttccattgctcgtaatctttatgtttaagtagttagttatctaccaaattttttgattttcgagcagttgtcagttctacctggctatggcagttataatctaccttaagcaaacttgaatatacttttaatgattttatcactttgtacattttagatttgctcgtatgaatagttaggttatctatccattttctagattcaaggacttttatcaagacgtcttgatgtctcgtttaacactttcctagctcgcgcgaaccgttaatattttgctttatacgcgagttctaacttttgattttcctttcctgtcaaatacgtttttaatcaaaaattatagttgtttgatccgttctttgttagaaaggtttgatcaggatgctacaacaattcgacccctctttcgtcaaa

SEQ ID NO: 103012 - DNA, 698 bp, Cannabis sativa
tttgacactaaatttggtgatagtgtgacaccaaatttagtgtactccttggagatgctcttagagtagtttagccgccaatattcttttttaaaataaccaatcaagtacactatataagatattatgtcaaaacttagcataatataattataataatcttctgtagaggaataatataaatttttaacttatgcaaaaaaataaataaataaataaataaataataaattatatttaaataagaattatgtttattgtccataaaatataaatacatatatcatattttcaaaataaaagaaaattattaacttatttaaattttaagatgttcttttaaaattactaaaatatttaatagtaaatttaatttaatataatatataattcatatactacgtaatcgcacgtaaaatttcactatttcactagtttttattaaatctgatatggtctttgaaattaaaagagtcaaaacataacaataaggccagccgccagcaacaatacattattgaaagaaaaagaaaaattgtaatttgatattatacatcatcatgatatatatatatatgctttctgtatagaaacttttatttatttactgtatatgtgtaaatgaaatcttatagaaatctaagtttagttggtcctctcctttagcatctttagcccaagataactgaaaaaagaaa

SEQ ID NO: 103013 - DNA, 533 bp, Cannabis sativa
gatgttttcgcttagtagagacgcgaattcttaagatggatggatgaccattagtacatccttcgatctcaccaagcagaattagatcgccgtaattgagagtccagcgatctaatgaggcagttcaatcaaagaatcaacaaaagaggccaagatctccttaggtatccacttcaaggaaaactattgctaagttcctcaggaactaggatagatcttcccctgctagaaggagaatagacctttcctcaaaggtcaaacagcgagaataaccatatctcggcaactagcggcttggggggccagccagggatctattgcttaacaacaaatgtagcctctagccggccagccattaacaggagtacccatggccggtcagggtacatcacttcctccccaaggagagcgaggtgcacagagatcgatctttgatagacgaggactcagagtgggtggaaacacccaaaatggtgatttaagaagtgaaattgatcacatcaggaatatggatccaccaaactctagcaatt

SEQ ID NO: 103014 - DNA, 834 bp, Cannabis sativa
  modified_base (515)..(519): a, c, t, g, unknown or other
  modified_base (711)..(750): a, c, t, g, unknown or other
  modified_base (797)..(798): a, c, t, g, unknown or other
ggccagccagacctcatcctccaggtgtatggtccgccagtttctccctggcaggacattgatgtgcatttttcacctgtggacaacaaactaagcttcgagttgagccttgacaacccaataagatgctacgaaaaatatctaatttcaaggggtaacttagtcatttgtatttattaattttatatgtaaatatctatgattttatctgctaattagggtttatgctctcctatgtaaagggtctcaaccctagaaatctaagtcactctaagtctcatttaggccataaagctctaagtctgaaaccctaggtctttctttctctctctctctctctctctctgtctctctctcttatacatgcccaaagggctctctacctctttctctctcacaggactccaaggcttcatctctctctcattagagatttgcctactgagctatatcaaatctcacttatagtgatttgaatagtattattctaagtataaatacaactaaaaggggannnnntcattacccgctaactaaggagacggaacctctataaaaatacttatcttatttactttattattcttgttgtgtactacgtggcaaacatcaaattgctacgatcctactgtcagttggccactttttgaggtcaacaatttggtgcttttatagagagcgagtcgatatcatattgttgggttttatgcnnnnnnnnnnnnnnnnnnnnnnnnnnnnnnnnnnnnnnnntaatatagatcagaaataacaattaatgtttcatggttcacatgatnnatttcatgattatatatatacataatgtatgaattc

SEQ ID NO: 103015 - DNA, 578 bp, Cannabis sativa
aaaaaaacactatatatgatatcacgttattattattaatattaattaattaattaattaattaatcatcaatatatttatatatatatctatataaactagtgacatgacacactaaaatcatacgttattattattattattattatttatacttcaaaatagttttttttttttttgcatttttacggaattccatatagaaatctccatagcaacggaacaactaaattgcaaccaaaattcacatagcaacccatatagaaatcatcggagcaacccaaaccgtaaattaaaaaaaattaaaaaaaaaatggtatatggagtaattttcctaaaatagatacctctatttattttttctttaatttttcattttattttttttaaaaataataactccaaaaatctattaccacttttttaatgttttagtaagtcaaaatgatagcgagttagtgagatacggtaatgaaaacaagtgatacgcaatggtgctaacaattttgaatgatcgagatatacggaaaagtgttatatgaaccatgtcgagctttcattataaaaaaaaaaaaaaa

SEQ ID NO: 103016 - DNA, 654 bp, Cannabis sativa
ttagtgtcatttactactttttatgctttttatgtcattatgtcatatttatcataaccttaataattttttcctttcaaaataaccctttgctatatcttaagcttcaaaatattaatttatcttttctaacaatactccttttttcaaaactttgttatatatataataataataactatagctctcattatacgcacaacttattagttgtagccttagccttacactaataagtaaaccttgcttatttaatttggttatcaaatcaaggtatatattaagacatagatcaattgacaaactaattcaaacataaatgttaaaggtcataattatatggtgttgtcgttactgacctaatgtaatattgaggtcttacttattttatttcaataataataattaaattaattaacatttgaaataataatattattatttgaattagaaacgtttaattgatgatgaagtgagaaaatataaatagatgatgagaagagaagaggccagcttgcaaggtgtgtaagactgataattaccaaggtttaatgactgacttcacacagtattggaaaacacactatgtcagtagtcataataaacatggacatttccatgccctcttcttataatttttttttattaaaaaaa

SEQ ID NO: 103017 - DNA, 759 bp, Cannabis sativa
atcaaaattcctcattttccctcattttcttaacttccctcttccctccttctcagagacttcaaagagattttcacaccttgcccagatttctacctttctctccaaaattttctcaaccttaggagttatcgagagtaatcgcaggaacaatttttccaaaactaaaggttagtttcgagttttattgcattttcattttttgttttgaagaaaaatgctttttctgggttttgggtattttgagggtttttaggaatgtatgtttgtaggaaatacatataggactatgctttttggtatggaactgggtaatcttagggaaaatgacctgaaattcgtataaccgtggactttaggaagaatgtttgactagtcgcaactatattttttgaatacacgcgggtattcggatgaaaacttcgaatgctcgcatgtccgttcatcctaggtttcacagagattttgtcattcctagtcgttgcttaaaactttaggattttgtactctgtatgttttattgtgggaacatttgttaagcctttcaaatggtgggcgtgtcacagtattctaatgctcatatacgcgattatatgttccttgaagtactgttaaacgcccatccatttgcggcatgcgctaatgttctgataagcgcatttttcggctggcagatttgctcgaaacggtgggggtatcccagtaacttcagggtcatgcttgggaatgcatgccccttgagtcactgggatacaccca

SEQ ID NO: 103018 - DNA, 570 bp, Cannabis sativa
gcatcatatattatgtgagaaagtgcataatatgaacaatctgatggaatttttataccttcaacttcatagtcaacgtatgttgttctgtcaacccaagttctattgtaaaaaagaaacactattctaacatctatattcctgcgtgattttttttgtaaattttagtttactcatgttatgtttagtatacagtaaaaaaattatttatggtatacaatctggaaaaataaaataataaacatgtgcgtagcatgaataaattaagatttatgttatactataaagaggagcgattacaattataatggattatagtttattgttaatgtaagagtacttagtactgtaggtgttaattagttaagttgttcagtcgaaaataataatgattaacaaagtttacatgattgcacatagtgatttcattttaatatgatgcattttaactgtttttagtaatcgaaatgtataatgtgttatagtataatgtgaattcattttaatatgatgcattcatgattatttgtatattttacatttttcagtaattttgagatccaatttttg

SEQ ID NO: 103019 - DNA, 595 bp, Cannabis sativa
cacatattgcatagcctaaccaggcaagcccgtaccataacttggcacccatatatcgcatcacttaatcaggtgagcctgtgccataacctggcactcatgtatcacatcgctttatcaatcgagcccgtatatcatattgccattgcttaacaagacaatcaacgatcaagtaacttgtcatgccatatggtacattatacttttcttaccttaagtctcgcttcaagtatgttggccgacctgttaggagaacgatcgactatcccgggcccttgccataataacaaaagaacaattaaccaagtaatctaaccttgttccaggtccaacaattcattcccaaggtttccctgtagttctctagggtatccctacctcaaattttgagaaaatacaaaaatggggttcaaaatcatcaccaaaaacggtctgccatttgtgaaacggttaaccgtttccctggggttccctagcaagaaacggttaatcgtttactcccaaacggtggatcgttttttgtaggaaacaggaatctcgagttttgcactctcctaaatgccatcgaaataattattccaaactttatatgaca

SEQ ID NO: 103020 - DNA, 791 bp, Cannabis sativa
aatatatattaactagtaaataggctgcgcttttcatgcggttgtttataaatttttaaaattatatatataaatattaattgaacaataaaattatcaaataatttcaaaatttatttttatgtgtaatttttctttaaaaaatattaattaaatatgataaatttatataaaaactctaaaagaattataaaaaaaaatatcatacaatttcttatgaaaaaacatacacagaaacatctttaaataaaacaattgttatcaccgttctttcaccttgtcatgccgctattttaccttgactactacattagtatgatatataatgtccgaccaccggagtaggtggaacacttatatccaaggcaactcttgtctattcttcgaatgtaagacttaggttaataccccaacagtcaccacttatgtcatcatcgtatctcacttttaatatctttcctaataagtttgttatctacatatattttatttgtttgtaactatttattaatttttttttaataaaggtgtttatttaatttgaatttataaattttggcttattattaattaataatattataaaataatgatatagatttgcttgaacaaatatagaataaaaagtaaaaataaaataaatatatatatagggcaagattatgataggactaacaaaagtttcctacccgtagagaactctttttgaccattaattttagataatgtggtgttgcccctaattttgcccaatatatgtggaccaatcagacagggacacgtggatcaag

SEQ ID NO: 103021 - DNA, 877 bp, Cannabis sativa
acagagtaaataggtagagggataggagtaaataggtggagggatagtctccgaccaataacaagtctcatccacccctaacgcaaacttagccaagccatgaacaaccacattagctgtacgcttgacatgagaaatagttacattaggaaaaaaggacaaaagacaagaaacatcaacaatcagatcatgaaaagtagaaattgaattgaaaggagctttcaatgcattaacaaccataagtgcgtccgtctcaatgtgtgaaactgggagatcgtgttgtaatgtccattaaggctatggaaaagtgctttggcctccatttcatgggaagaaaaattcccaatagctggcattgaaagagcagccttaacaagaccatttgaatcacgaattaaagcacctactcccagcacattgttgttgacgtctacagcgacatcgacatttaatttaaacccatcaccaagcggcgacttccatggagcaggggcagggacaacttgtggaggtggctgcgtttgggcttgagaagcaacaggatggtactttgtggttgcagcaagaaaattctggcagtaggtgtgagcatatgaggctaaatctcttgctggttttggtctttgtccatgcacaactttgttcatttcactccaaatcgaccacaacgtacaaaatatttgttcaatttcagatttagaatgaattgaatggagatgcagtaagtaatcaccttttttcattgaagagcaagcataccagtcgaaagaaagctttgagtaagaccacaccttcttggcatatttacaagtgaaaagtgcatcgcaatggtttcccaagcttgacgacatactgaacatgtcgaatcggtgataat

SEQ ID NO: 103022 - DNA, 635 bp, Cannabis sativa
  modified_base (577)..(588): a, c, t, g, unknown or other
gcgcggacaccgagtttcactcggtcagcagcgtgttcggacactgcgtgtccgaagaaacacgcacggggttgtctgaattcccctatccgcgcacggaaaggctacatgcagcctccagggccgtgatttctcggctagatcccccttgtgcacgctatgtaatgcataccatccgcaccaaatgcaatttttttcattttttatgctttttcatggaattaatttcgaattttttgtgtagttttgtattttgatttttacttttcgaaattcaaatctaattatcagcattaaattattaattttttaaaaaaattaatttaagatattagtgaaatttgaatttgagaataggtaaaaatctatcttttttgcttaatgtattatcttatttttaaaatttgattattttgtcttattttaaaatttaaggtcagatatttaaatattttttttttaaattatttaattttttaataattagaccttatttgaaatttaaaataagattattttattcatgaaattttaaatagaaatgggatattttgctaacttttaaatttgttatttnnnnnnnnnnnnttaaattataaaatcagaaaaataatattaaattatcattttatttt

SEQ ID NO: 103023 - DNA, 566 bp, Cannabis sativa
aaaatattacaaaagatgtcattatactattttaacaaaatacaattcaaattttagaacatcgtaaaacatggatcccaacaactcagctcaagttgtcagataagataatatgtacatttgttggagaagattcattactcatggttgccaaatatttcatatcacttacttgcaccacatagcacctatgagtcacaaagactcaacaagaaaagaaataatataatatcacaaattagtacataaatatcatccactcaaattcagataaatcacaatcaagtagtcacactcacacattcacaagtatataaacattcatataactaatgttgcctcataagaaaatcctaatacctatctcaacttccatatgtcaccttcattacctaatgagataactgacaagtaagaaacctaacaataatttccatcaatagtcatgatcgacttagagttatccaataaaataatattttttaccattatctaaagagacaaccttttcattacataacggtaattaccatatcttaatctcgataactaatgattcataaacg

SEQ ID NO: 103024 - DNA, 661 bp, Cannabis sativa
aaaatcacgtgatacgcctatgctagttagggtgttacatttttaaagtatttttagtgagttttagttgtgtttttgtataattttacacttttagttagtatttttagttatacaattttacagttttaattgttaatgtttaaagtcgagaaaaaatgtataaaaatgatggattaagttaagtcttgttgctagagcacaaggagatgaattcaagaaaaaaatccagaagattcgatgtgattggagctttcgaaattgaagaactgaaaattttgaaatagcgccacgacataaaaattcaatgtcaatgtgttaaaaggtaaaaatttggtagtaaaatcgtgtttagaaggttcagaagcgggcctcaacattgggatttaatgttgaggcatggaatccttggttgttttgttttgttttatgttattttttatttgtttttcaatttatatttttttctaagatcaaaaatgaaaaaaagaaaaaaaaaagtaaagaataaaattgcaacaataaattccataaaaaaataatgcaataatacaaaaaaataaatcaagttgtcaaaatttaaaaaaaaatcgtaatacaaaaatatattgaggagttgatattattttgcttattgcaattatgtcaatattttgttatt

SEQ ID NO: 103025 - DNA, 776 bp, Cannabis sativa
  modified_base (581)..(583): a, c, t, g, unknown or other
tttcttgaaatccttggacagctgctcccaggaaattattgaatgacgagtgaacttgttaaaccagctactcactgctccaacaagcgagaaatacaacaaagattgttcatcacgttacttgctcgcattatcgtgttaaagttatttaaatgcgagactagatatgtggttctgtcataggatgacacatgtgggctcttgaatcctgaaggaaaaggggtattcataatatttgggtgatacagctcaagctcctcgtgagagtcgtatctatatgatttccctatttcccccacttgatatctcctgaacttgtccttcaactcgtttatccgtaattggattggatcctcttgctttggaccaagctgttggtgaaggtcaggtttcttccaattcaagtgctcttgcaaatttggttgggagtaattgttggcggatctcgtcttactcattgaccgcatcctacttatagactttgtctttcagtggctcgtggatttacttgttcccatactctctcgagcattagctcgttgagtactttttcctcttcgagttgatcggctatgagttcnnnatcgcctcgaagtcacacttgcctcttcacgctcagttctttcctcccgagagaagtttgtcatatttcccccattagggtacgtaggagtccttgctccatgggtttgggaagaacgctgctaattcatagtaggtgatctccgttctcccagctgagttccaagatcttcatgagggatttctcgttcatc

SEQ ID NO: 103026 - DNA, 932 bp, Cannabis sativa
acaagtggagtaaaggcttcttcgggtttgtaagtatcattctctattacatttgagaaattgatttagaattttggaaattttttgtgaagatagtgattattttagaaattctttgttgatagtgggattattgggtttatattgtgattttggactgtgagtgtgtttatctgaattgttctagtgtaatttagaaatttgggaaagtaaaaatttaaggggaggtactgcccaatttttattagaattatttttgtgaaaacaactgtcattgagatattatggggcctaaaagaacaagacacattgaagaagggggaacatcatcaaacccaccatctacgagttttgatcgaacccgtttgtaagtgaggcggcacaaatccggttcatgagccttaaggttaggccatacatcgatgatcggggtattgaattccttgaaaatcctttaaggcgtcaaccaaggtttgaaacaatttgagcccaaattcaaagaatgaagtgggacaattaagtggatcctaggggccgggccaatgtcaccatggcatgtgaatttctcgccaattggcccgagcgtagaaatggggaagttaaggtgtggggtaagaaggttcccgctacagctgatgctttcaatgctatgttcgctgtcccggactactcaagagaagaacagcgcctccgaattattgaggaggaagaacagtttgacatggtggatgtggctgaaactgtgggatttctagggctgagattccatgacaatgatgggcaagacgggtcgcccaatattctgcaccgatgtgaaatcaacccggtgacaaaaacctagctatactttgtgagtgctcggttggtgccgagcaaacatttctctgatgtccgaatagataaacccaaatatgtatacgtcatcatgaagg

SEQ ID NO: 103027 - DNA, 507 bp, Cannabis sativa
ctcaaaagtctagctcatattcaattcaaaaagtaaaatccaagctaaaaaactatcatccatggatgctgcccagttttacaatctcacaaagtttttaaaaactatgtacaacaacaagaaaagagaaaggagaaaaactattaagagaggctaaaagaaaaagcaaacactaaatcttggtccccccttcttcctcctttgttgtactattctgcagttatttctcttccaaaaaaaaaaaatgcagcaactctccttcattacataatggaagatgaagatatgtactttatttttttttcttttagttgtttggttcctaaggtacaaaatcactccccgaaatgagaagcccaattttttttgcattttggcccactaggtttagtccccttccttccacagcagccagctagtgtattttggtgattgggacgaatctgttgatgtggataagtgaaactcgtgtttctacgtcgttgccagaatgctgaattcacttca

SEQ ID NO: 103028 - DNA, 503 bp, Cannabis sativa
  modified_base (68)..(68): a, c, t, g, unknown or other
atgcaaacataaatcacttcagatttcttatattgataactaatcaaattgtaaagagttttatttanggcataaaacccaacaaatacttgtctgatgacaagtgtaagcatgtcactgtattctggtttatactcttcatcttctacagaaacatcttctaattgtggcatatcaataaactcttcttcatcttcagaatctacctcaccattttcacgaatcaccgtaactctcttatttggacattggctagctatgtgtcctctcccctaacattcgaaacactttatctcactagaacgagatgaaatagggttgtttttcgttgaggggttgtagttacagtagctagtttgggtgtggaggatgaactaggttgatcccctttcttttggaagtttgacctccaaggtgttgtatttggattgtgtggacttggccttggctttgagctcgaactacccttcttaagttggctttcaactttgattgccatatgc

SEQ ID NO: 103029 - DNA, 706 bp, Cannabis sativa
  modified_base (388)..(392): a, c, t, g, unknown or other
tatttgggcaaatattagggtttacgcaatacgtaagtcttacaaaacctccaattcaccaccttctggtttgataaaattctttccaaggattgggattgccttcttcttacagtaatgttccaatctggtttagaagtttatcttccagaagatatagaaattgagtttccaatagaaattgtcgtcccttataaacccaacctttcaaaacccacatccaaattagagttaaacgatgatagggttagggaacacttagtgaaggtccaccaggaagataatgctagtcaacacaggcacttcttgcaagaaataactgaaggcaaataccgtttcttgcgagatgcagcttggcctgaacccacagtgtgtcctctataccttnnnnnaagcctttatttttacccaaagtcacgattttttttgaactaggtgacttggactttgaaataatgtctcttaagccacgtaaatcaaagactcctcaggatcctaacatcacctttaaggccgagttaatagaatcgaaggtgcgaactatctcaggctacacaggcgattcactgaggacatgtggaatcgattataggcaagtatgccgagttaggtcagtaagagctggtgaatttagctgttacttgcctgtgcatctcacaggcgagacgtctaagggggccaatggagagaccagtacgagtggctc

SEQ ID NO: 103030 - DNA, 646 bp, Cannabis sativa
ttctctgctactcaaccatcggcctatagagatgtttggcaccccctccgcttgactggatcaaactaaataaccattgattaattgacatactataattaacaaacttatgtacttatttagaggtaattcaaaataattaattttattaattggaatattaaagtggaaaatacaacattaaacttatatgctttattaggaattttttttttttttgataaatttaattatatcaaatatttacccaattattaaaataaactatgattagttatgtataaaaattgaacacaaaaatatgatatattattttgaagaaaaaaaatgtaaaattactaatatatatgtatcatttatttgtcataaattaatccaatcacacaaaacacattatttaatatttacccaattattaatatataaaatttattgtattataattgttgtgaatgtatagacagtactactttctaaaaagaatttaaaattactgtattaagcaatgcccattttcatatgtagtaataatttttcaaatttgagaagagaaaaaccttataaatcatcatcagatcctcatactataagaatacatatatattataccaaacagtccttagtatagaattagatactcttcatc

SEQ ID NO: 103031 - DNA, 726 bp, Cannabis sativa
ctagcaaagtctcgaatcataacgctggcttcatcatccccgagaaagttgttcgagggaagaaaccagctggaacataggtgggctgaatggtccaagggaataggcgccagaggtccagaacccatccgggatcgacctaaataatggcctaaataggaaaaataatactctttggcatggttcccccaccgggtagaaggcattctaaacctacgaaggcgctcatcgaaccctataagcctaaaacgggtatactctcggacgggaggaacgtaatgtattattaaaggagacttaccagagcccgaagtgctggcatcgcgagcaccagtgttggggaccgggaccacatgcttgggcctgggggtcctccgctccggcggagcttccaagcgaagggtcctcccggcagccgcttgggccttggtataggccagctcctgttccctcttaaagaggtacttctgatatcggccctccgccgtggcaataatgtctacccagagtgccctttctgctgccggagtcctcgcattcgtgcagatgactttggagagggtgaagtcatccaccgactggttccccgatattagcttggccttccgacagttctctgtcatgaccaactccccaaaatcgagggccttcttgtcatacgtggagaaggtcttggctcgctgaagaaacacttgggtaggcgcggtccgcatgtaaggagggatc

SEQ ID NO: 103032 - DNA, 720 bp, Cannabis sativa
aaaatagcttcagagaacaccaccaaagtgcaaagatcaattaaggggcagagagctttcattgataaatgacctcagccaagataaggttccgaatacaatttggataattagatcactaaattgtatttgcagtagctgttaaaataaatttagcaaaagtatcagctactacattagtagttttggagcaaaaggtaaacgtaaagtatacctcacaacattaaaatgattacatatatctaatatcatcaataattaaacccaaaaagataaatctaaaactatatgcatattaagtttatgaattaatctttggcaatttaattcaaaatatgcattgcgaaacagtttgtctaacggcgagggcctttgcccactcaagttaagggagggactcacgtttctacactgttgacgcaaacaccactcctcttgaatcccaaatgaacatacctagaccacaagaaccaccgttaacgagagcgacatcggtattggctttgaggattatagttgctgggggagtccaacgaggtgggggttcttctaactaataatcaggagcagcaggaaaaaaagaaagtaacttgggtgttttcttaatgatattatggttccgtttggataaggctctatttttacttagagttagaagtataagataaatataagatttaacttatttttaccgtttggataactattaatgattctttt

SEQ ID NO: 103033 - DNA, 500 bp, Cannabis sativa
caagatgagatcaccaacttcaaatgcctggctcttgactttgttttcctctagttttctctaccctattgtttacataaaaggcatggcacacccatggcgagtcagtgtcctcgatcagtccttgtgattgaagttgctggcattcttagctcgccattttctgatgttctagattcatttcggggtggcttacttttgtcggattaacatcttcattttgtttgaatgggagagagatgtagaattcttcattttttcataataggtggttgcattttgctgagaattcagagtgagagtttgcacatgacttttgaatcaacctttctttgattggtaagaatacgtcttgagccatgtgaaaataattcgagatttgctcccattgggtgaagaaattcttgtagaccaatccttgtggaagtattctaagccctttcttttttgtgtaaaggtcgaatcccactatgaggtcctttcctggaagttttgatcca

SEQ ID NO: 103034 - DNA, 597 bp, Cannabis sativa
agagcctatgatagtattatttatgcaatttgttgcccaaacatggcccgtagacaatttattatttgagatacattcttcatatcttcatgcgtcttacacaatacattatctatgcttacaagcatgaagtatttcgctttgttgttggattaaatccaagtattatatctctcccaagtatttggctttgttgttggattgaatttttaacttaaaattaattatatatattttattcaaaactgtttttgaaaaaataaatatcccacaaaattatattattttgtcttaattattaaaaaaaataataatttttttttatttaatataaaataattaagatagttattaatctgaatttgaatttcaaattaataatcttaatatttattttgaatttaaaactaaaaaaatatccaaaataacaattatctatattaaataattaaatgataaatttatagtgtatatacagtatatatacacaatatatacactatataatatatatacctaaatatatatatacaatagtgttcgggtgaagggacggccaccatgaccttatcatggttggcggctacagtagccacc

SEQ ID NO: 103035 - DNA, 519 bp, Cannabis sativa
tttttttagaaaaatgttaaaagaaaacatggggaaaacaatttatatgttttaattactttttttttttaagtttgataatatatatatatttttaaaaaataattatatttttacacaaaaagtataaaagttaataaatttttaatatttttccatcttcaacaacaaaggtttggatctcgggttcgggtatgagtttgggttcgttataagtagtccatgaactattcacaatattataaattaatcattttgtgaagtttttttacacgtggcaaacaaaatgatgacatgactacttacctaattactacatcacgtgatgtgcgacttcttgctttttcaaataaccatatcgacattgagataaactctcccaatctccctgtatggcgtttaactggtctctatggagaaccaaatcgcagccttcgtttcaagacttggcagcttattaccactctttcctctgaatcccagcttccatggtgcataatcggcgacattaataacata

SEQ ID NO: 103036 - DNA, 1011 bp, Cannabis sativa
atggatttgggtttgtccttttgtttgatttgttgattcaatttaaaagtacacaaggaacccattaattctttcaccttcattgtgctaaaatattttgcttcctctattgccaaaagttttgtatcgaatctctttggaagaactctaacaatttttctcacaagaacggaatcattaagcttttcactaagagcaaaatattcattagctatatcagatagccattcatagaattcagttaggatttcattttcaaacatcctaagctcatcaaattttgtttgaagcataataaatctagagcgcttaacatctgatgttccttcaaactaagtttgaaggatctgccaagcttccttagcagattcacacgatgatattagcttaataaaaccttcacctataccattaaatatagcatgcaatgctttgctattgtaggtagaaagtttattatcttcaatcgactattccagttcatattttattttagaattaccttcggaatctgtctcaactggagaagaccaacctgataggaccatcctccaagctctctcatcttgagatttgatgaagacccttattctaattttcctataaggatgattagaatcattgagcatcgaacttccttccgcaaaaaatgacattttacacaaaaacacatgaaaccgttaaaaggaccacactaagagtttagtgtcccgctctgataccaattgaaaaactaagtttttgcaaattccaataataaatacgaaaatataaaaatgtatacgtttgtagaagtagaatgtaattctgtttctgtaaaaatcagttttgcagcaacaaaacagaacagagagaatatacaaataattgcaaaaaattaatacacttgacataagagatttgtacgtagtatcaatgttctttctaacactcttagtccacggggccacgcccagagaatgaaataaattaataaagtatcaacaattacaaagacaattgacttaaaca

SEQ ID NO: 103037 - DNA, 821 bp, Cannabis sativa
gtaaatttcaaagacgaaaattctctaaggagggaatagttgtaatattcaaaaaaattataattatgttaaattggacatattttattaaatatacaattatatgaacaagtaagcgtaatttattaattgcggagattttattagattatgtaagtattttatataccatttttgaaataaaatattttttgggtttttgggttcaacgaccatagaaactcgacggattggttagaaatgtcatgctgataaataatgagatatattgaaaatatatcggactagtttagaaagttgagttgtcagtttagttggataagttaaaaatgacccaaatacccttagcttatgtttttagtttaagtgttttaagatgggtaaaatagtcttttactaagttttattatttttgttttatgtgaaggcatagaaattactagctgagaatttagttatctctttagttttattattaattggttagataattaagttagtaacttagaaaaaaatcaagaaaacatacaattttcatttctctctctctttccttcgaagccctaggagccagtaggaatcaaagcatttttttcttcacaatcaacaaattataagctgaattagctaaccctaggtgatgttcaagctttgaggtaagttctccctctgtgtcttattgattttaagatttaggttgagttttggttagggtttttgtggtttcgaggttgtggtgtaaaagtgagttcaggatatgtttctagatttaatttaagttttttttttatgtgtgtattgatcatctccttggctgctag

SEQ ID NO: 103038 - DNA, 533 bp, Cannabis sativa
tgtagaagctcaaccagcaaaagcttaaaaggtaaaatccagaaaacaagagagaatctcagggagaaggaaaacagaggaatttgctgaaaagcttgactcaaaactgagccaataacctttttatttatatgacagtattacaaggcaaaactaagagttagttaagaaactaacagaactaactaactaagtaaaacagaaaacagaaaacacacagttagttaatagggataattccccttaaaaaaattgagaaatgttaaagaacactcatagtgcctagcacacttattaagtgtaatatcgttattagtgtaacttaataaaaaataataaaaggaataactcatggtgcttggtacctttataaggtgtaatattgttataattcaatatcaggtcagatttattttacttaattgaagattatacaaaaatgctaactaattataagacgtcacctcatagtagtattaggtacctagtactccatagcaatgctcagctcaatatcgggtctcactttgttt

SEQ ID NO: 103039 - DNA, 634 bp, Cannabis sativa
tgaagaagaaggtgggaagcttggatagtctacacgacacaagaatcccaagaagatgatgcttgtgggtttggccctttagagagaaggaagagctttttccaaagcaagtttctagtgagagaaagtgaaaagtaaaaactgagaagtgacaaaaggtttttccccaaatagtcacttatgtaatgcatgttggccccttttcttcacttacctcacctacacatcataaaggcaactaaagcagctatttctctacagcaatgagattagatagtgaagacaaagtgctacaaaaggctaaaaaatgcatcaacttttattcagcaaaggctacaacaggctcgaccgcaccaacacaggtggtaaagtctctatccgtacaaacatctgcatagggacttaggggacaaatgttatcccgatttttatcctcctgacgtggcatacttacgtggacaaaattagtaccacgtggcagtaacactcattaggaagaaggcaaactcaacacctaagcaaacggagaccccagcactaaaacgggcattaagtgtcaaactaacttcctcacaagagctagccaaccacccctgcttggacctatggtcggccagccttgggactgcaccat

SEQ ID NO: 103040 - DNA, 529 bp, Cannabis sativa
aaggaaagaaatttcatgttgactttccttattctcgggcctaaaacaccttgtaaggacatggatgtatttttgaggccattggtggacgagctgaacgaattgtggactaatggggttgaaacaaaagatgctacaagcaagtcaatgtttaagatgcacgcaactcttctttggacaattaatgattttctcacctgtaataggtcgcctagatggagtggacagagatataaaacttgtcctacatgaaacgaggatactagttctgttcgagtgattggtaaggcctcttatgttggccatagacatttcttctcatccaatcatcgtgtgagaaaggaccatgaatttgatggaaatattaataagagacatcctccgagacgatttacttgttcaaaaatattagaacaagtgaatgctttatcataacgagctccagggaaaccaaaaagaggtgagactgaaagtaacaggaggaaaaaatattttttttatgaacttgagtatgttgggttttatgccc

SEQ ID NO: 103041 - DNA, 717 bp, Cannabis sativa
ttggatactaggaatccctatagacactcactctgaggacatgcttatttggcctttcacgaaggatgggaactacattgtaaaaagcgggtatcgagtggctagggagataaaccttactcctacccgaagctctaatatggatcaaactcatgcttggtggaagatgtggtggagtctgaatttgcctccccgaatgaagctcttcggttggaaaatgtgtcgaaattggctcccggcaaaaactaatcttgttcatagaagtatgaaaattaatccaatttgtactaactgtggcagatttgaagaaactctctcccatgctctatggaattgtgaaaaggtgaaaaaagtttggaagcttatgccttcttacaaaatcattaaagatagtagagggaattcaatgatggacttgttggtagaattcagacataagcttgctaaggaagagtttgaagatgttgtcaaggttctttgggctatttgggagaatcgaaatagacaatggaccaatcaacattctatgcatggtgctcgtttgctggaatgggtgtttaatagctacctgagagagattcatggacaagaaagtctagcaaagatgcaccctgctgccgagaataatcagtggcaaactcccccggttggcacatattgtgtgcattgtgatgcagctcttaaactgaaccaagaaggggtggggattggctatgt

SEQ ID NO: 103042 - DNA, 614 bp, Cannabis sativa
tttatgctattttatgaaaattttatgctattttatgaaaattttatgcgattaatatattaatttttttaatttgctaagtttcttatttataaattattttatcattttatatttaatttgtattattattatttcatgttttatatataattattatttattatgttttttatttataaattaaattattatcttatattttgatttgcattattattatttcatgttttatatataattattatttactatatttttttatttataaataaaattatcattttatatttgatttacattattattatatcatgtttcagatataattattatttactatgtatcttatttacaaattaagtcatcattttatatttgatttgtattattatcatttcacgttttatattaccatattacttaatgttttatatataattattattataaaactttttttaattaatcaaggttaatagttgaaattgtatttaagtgtactaaaattattttcttaaatatacaaaaaaaaaaagtaatttagttaaatgtattttttttaaaacatatagtatatttaagtatacttaaaaaaattatttataaaaatt

SEQ ID NO: 103043 - DNA, 864 bp, Cannabis sativa
taaatattattaaatattaaatatttaatttttagaaagctaaatcaaatattatttgaaataattttatgattagccaatatccttaaattaattttatagaagcaattaaaaaaattacaattatattacaaaaatattttaaaaattttccatgtgttaacaagttaataaatctaactacaagttaacttaaaaaaataagctaggaaaaaataatcttatacatttcagcatcaatcgcccaagccttcgtcaatcaccgccagcaatcgttccatccattgtctctgtaatggtaacaattcaatttttggattgtatgtctgcttttccccaaattgcaaaaagaaataaaatttatattagttaatatatattattctttgttaatataataaattcgataataaataattaagacttacagctgtttgattgtgtgtataacagttagggtttgcatgtgcgacaatgacaataatgtatttcaaagcataaaaaccacattcttagtttttaggttgtcttggacaatttgatagtaaattttctggccgcgactcaagatatgcatttgatgcccctataatctcctatgctcttttttaaaaattatattaatatttcaattcattaacataaatatatataacttagttaattaaaagattgttacattaagtgttgacagtgagaactcgtcaactaagttagtagtcggaaaatgcaaggttacccaaaaatgtgttaaagataagataaagatgacagtaaaaaaatgtttgaatattcttttctatattgaatttaatatctgagttacacaaaattattttccaacccccctcacatctgagatgg

SEQ ID NO: 103044 - DNA, 567 bp, Cannabis sativa
aggtacaagaaaaaataatatacacataccaatctaacaattgattatgagctagtatttgttttgtatgtttaacatcaataaactaataaactaaatttcaagtaatttataattgttaaataaacaatcctattgcaaccatatatgtaatcagtcacataaataaattattttaaaaagagagcagattgtgattgaagggagacatttacaacaatttgtatagttcaagagaatcttcacaacaagaaaaagtttaggagataactctacaaggattgtagttgtgggaaaaaattcaaaattattcttttcaatatcattggtttaatttatgcataaaaagacatttttgttattgctagtagaaaaaaaaaaatcagtatgtaaaatagtcaataagaaaaagtcatgttagctgaaattattcagcatgatattccaataattgaagcaaaagtttattgatgaaataatgtcggtagcttacagaaaactatatgggttatgctgatattccaaccagaatatcatactgtcttcaaattaatttagatttgtaat

SEQ ID NO: 103045 - DNA, 570 bp, Cannabis sativa
gcacagcatattaggacttgtttcacatcccttttgaagattggctccataatttgtccccagctctcaatctcatttgaactattatttgccaacctttgaaaatcagtgtcatagctgtcctgaatgcttaaatcaggacccagcatggcactctcgagctctttcagcttgtacttccagtcactcatgtcatcagttatgcaggagccactgattggagaaccataagtattttcaggcgaattgcgctgatcagggaggtaggaatgagaatcttgctgcgaaatcgggcttccactgggagagaagctaactgtcgatggagaaatgtacatgttacaattttcattcgccggggacgattccaaggtggagtaaagatggaaagaattcttagccaagacttgggcgccaccctggctgcggctgctgttgctgtaacaaacttccccatctaaagaacgaaactgtggtaagcagtaggattctacatcttgtattggtggctgatagtataatctgttggccatgtttgaagtcctgcgcttttgtgatctttgcattgaa

SEQ ID NO: 103046 - DNA, 582 bp, Cannabis sativa
acacttattggggagggactagggaggtattgattggtttatagagaagaatatgattagatgtttttatgagtattgggtaagaggatctcaaaagtttggggtgttgggtttggcaggcatgagatttatcaccaatcccataagtgtagttgttttaatttatccaagtgattttgtaattctaatttctataacaattctgagctaattggatgtgaatacacttatttgggggagagttatagggatggaagaatatgactagatgttttaacgagtattaggtaagagaatctcaaaaatatggggtatatattggggttggcaggcatgagatttatcaccaatcccacaagtgtagcttatttgatttatcagtgatttctaattttctatattaattctaagctaataagaaattattttgtgtaggttggcatatgtgaactctgtagtagaagaagagaacagggccacaatagaatacaaccctaggaaacttgagcttcatatccaatgtcagcagttatacctccgccactaccggatgtcatcatcccaagcctcccaaacgatctg

SEQ ID NO: 103047 - DNA, 807 bp, Cannabis sativa
cctagggtatggctagattgcccctatttttttcagaatctgcagcctcctcaaggagggccagtcaatcaagtccccacagcagcagattcttctgtgcaagcacagttggaccaatccagggacatgatccagggcatagctggcctaaagcctttagaccttgaacttgatcggtcaaggggatcaacattctcggcatatataaataccttacccttgccgaagttcaaaattttattatggaagatgtatagcggacgagaggacccgctggctcacattaaatactttaagatgcagctcgacctccagaaggtcactggtgatgtgcgttgtcgcatatttccagccacactgtcggagacagcccacaatggtactttaaactcaccccggggagatttaactcctaagctgagttctcacgagaatttcatgcataattctcatcctcgagacttgtaccatcatagttcgaaaaccttgtcaaagtcaaatagcgataaggggagcctctgaaggattatgtttagagatttatggccgaagctaccaaagtcaaaggtcttactaaagaaggccgatatacggccatactggggggcatactcctactaagagacttttggaatgatatttggaggatatccactaacaacatgaaggagatccttgatagagcagacgactttatcaaacttgaagaagccatacgacatgcccctatggggcatgtcaatagcaggcagtcgcgaggcacccagcagcctcatgttcttgatctgcatgtcacgagaagatcca

SEQ ID NO: 103048 - DNA, 758 bp, Cannabis sativa
tctctctctctctctctaaactcagtctgatcgttctgtctaaaaagataagtgatggttatatttataggcttagaatcaagatcctaaagtcggtagctgcaagaagttaagttgttaagttagttaggacttagcaaactctattatgagaaagatctccacgtcagcttaagtataggtgcttccgggagcgtgtatgagagctttcagaatcacgaaccaaagcactcgtaggaggagcttctcggataggaaagagctagctggagtcgactatttggaactaatttttaggagaaacaactagccatttataacttctttttggaggaatgctagctttcctgaggacccttcctggaaggacaagaaagccttccaggacctacttaggcgagttaaaaaatttctaggaaaaacttttggagaccttataatttggaggaactattccacaactttcacatagtttcttcaaattaaaagtatgacgatgatgaagaaagaatgcatccatcatggttggtgttccaggaatctcattatactagcttctgagattgaccaagcccaagcaatgtttgaacttctttacagttaataccttactcccaacatcagtaggattatcttcagatccgaccttttctaatttaaccaatctttctatcttctctctaatctagtagagtcctatatttatatgtttgctcttttcatgataaacctggttcttacaaagattgatggatgac

SEQ ID NO: 103049 - DNA, 604 bp, Cannabis sativa
acacacacacacacacacacttccttttattacaagaacacaacaaactaaacacaattacatactgtagacattaattgctctacaatttagcttaaaattcaagcttaaagatgtcaaaataactctaaatctaaaagttatcgaaaatcctcataaattacttttaccacttttctcacgaagcaactttagagcaaaaagagttttctctctcgaatctgtcgtgggattctagcagaaagatctgaacagcttcattcgaacaacaccaaagcttcaaacagtgagtaagtttctcatcattctctcctttaattttgtatcttcaattttctggatttccattgtagaaaatacaatcgcttttgacttgttttaggagacatatagaaatctaggctcgatactcgtatgacttcattgtttgtgacattctggcttcaatcgcataatgttcgatttccaccttgcctattcaaagcttcatgaaaattaacccttaactcaaaaatttcaaactcctgggttacgaacttaatctttacacgtttttcatctttttaatctgtcgagtagacctggttggcatatttgcctattt

SEQ ID NO: 103050 - DNA, 634 bp, Cannabis sativa
tgaagggagttcagattgaagaaaagtgttgaagagagctcatcattcacacaaggggatcttgtgtctccaatcaaggatcttggttggtttggatatagattcattgtattttgtaaaagagagtattgtttacaatattatttacggttggtatttgtaagatacatctttgaatatagtgaaatttattaccttggtttggggaacccaagcactagccgcctagaatgagtttctagggcaggtgaagcttgtaaatttctaatgttgaatctttgattttgttttttatattcaagcataaatcaagataaaattaatccaaatataaaaaaagataggttagacaaaacttagggtttactctcctagagcttgtttggttcctaagattcctaatggtcgtgagaactatagagtatggtgtcgatccatgacagtggcattgatcataagaaacaagttcagatttgtcaatgggaagcttcctgctcctgatgaagacgatgatgactttgagctgtagaatcgatgtaatagtactgtgatatccgtgattcttcatgctgtatcaaatgatattgctaagcatttcatgtaaatggagaatgctacaacaatctggataaat

SEQ ID NO: 103051 - DNA, 808 bp, Cannabis sativa
  modified_base (77)..(91): a, c, t, g, unknown or other
ttttttatcaatttttttatgcatcttaaattttattttattctattcttattcttattcctattcccattctcatnnnnnnnnnnnnnnnttcattcctcccaaccaaatgccatttaagtgaaatagtataaaaggaataggatggtctcattctcatccaatgcacagtttacattctgtcagacaattagagtttttgagagcctcatttccttgttaatttcgaatccccctttattgttcttcataaatttcgaacctatagtgaaagagtacatgcccacccatagtaaatcaagtactcaatcatagtgtgtaagactgaagaatccaacccttgaaggagaatcgagctcagatcttgataatactctgcgacagaaagacacaagggttagagatctgagtgggaggagacatattattttgcttccatcaatgtaaggttacttaaactttatatgtgtttaattacattattttagagaattcatatttaaggtgttaatcaacatacttgttagtaaatctagcatcctggtaaaatatattccaataattccattgctgacaatcaacttaggttcatatatttgaagcaaaaaaaaaaagaagaggttcataggttattgacttttcattgcgataatataagtcagtcgaagtgtgataagtaggggatgttcatccaatccaatctgcactattttgctcataatgtatttgattaacaacaagtgcggatttcatatttcgaatgcaattcaatctgcataaaaactcatatccaatccaatccaattcg

SEQ ID NO: 103052 - DNA, 1104 bp, Cannabis sativa
gtacaaatgatgcattttgaatagcaaaatatcatcagcaaataattcccaaattttcatatcagaacaattaagagaacattattttcatataaatatttgtttcaaacattgttcattgaaagcaatcagtctcttgtattgctttctgttacagagtagagagtagagattcaggtcatattacaattgagaaacaaacaaaaggaaaatcaataaatctcattatatcacatgatcactcatatttatctgaatagggaaagaaaactcaacaaatatggtaaaacaataattcaaaacacataactgaaactaaatgaaataaattcagtgtctgtatttgagtccagttatggcattgttttcctttcatggtttcccaggtgacgcgtagtgttagtcaaaactaaagaagcacgccaggaacgtgaacgaacgaacgaacaaacgaacacacgtgtttttcattcattgtattaaatatgtcatcatatctcagattttgtccagataagaaaaaaaaaatctggtttctggattttgatcctattcaagcaaaatttccccgcaaatcgcggtatttctctccttttcttttgtcacccaccggaaatggtaggacacaggaaatgttagccttgtagtctctatataaagcctgtttgagggatagacaattcacactaaaaaattcttgtaaggtttttattgttcaaggaaaattcatctttcttataatcttttctattatctagttcttcattctacacactaaagaatctaaacaaagtacacataagaatataactcttgattttgtgttgtgttcaggtttgagtgaagaattaaaaatggcaccaacatacttgttacctagacaaatacgtgcaaataggggcgagaatctacctcagcgtaggaatccacccgggggagaattcaaccccgaaaccaacaccttcatgacatggaggaacaggctcactgcgcttgttgtggacagcgaatcgttctgcagaatgctcgaaaagagtttcctatctgcttatggagtggagactgaggatgtagagagtggtagtgctgctattgagctcatcc

SEQ ID NO: 103053 - DNA, 573 bp, Cannabis sativa
  modified_base (28)..(48): a, c, t, g, unknown or other
atctatattaataagtaaatatgattannnnnnnnnnnnnnnnnnnnngggcataaaacccaacaatcactagataacaataaacgccctatctgtccaaaagcttgtgtgctcttggtcaactacatgcgttttgatttggttttacccagagtaggaatccatgaaagacaagaacttgtattctgagataccatcgaccatctattctatccttagaagagggaagcaattactactacaaaattagcttttcccaacagtttataactgtcttttatactatttcccaacggttcctaaaaccgttggctatgtgggtgtcataaaaatatagaactttaaatgacgatttataactgttggaaaagttattttaaatgacagtttacaattataagaaaaaatctttttaaatgactgtgtataactgttggcaaaaatattatgtagattaaaaaataaatttaagctaatttattatatatgaattattatctaattacaataataatataaataaatttcaataaaaataataacgtaaagaaaaaataataaaataagaatcat

SEQ ID NO: 103054 - DNA, 593 bp, Cannabis sativa
ttggtctgaatgactaatgtgctcgacaactcgtcagggcttcgcatgttccacgttgtcaacgcatgggatatctgtttatgcgatcaaaagtaaacatagacatccaaacgataggccctaaggccatcctctgaatacaaacaccctagagcctgcgagctcttgtgttgaaatatgaacagaaaactcgcagcttaacaagtcgcatacgttgctatacttattgtacaaacaaattaaaatcgtcttttatttactctttcaacatttactttagttaatattgttatttaatgtaaaaaaaaaacgactctgaaactaatcagttatgcaaatctaaaggatacttactttctatataaaagagtgatccaaatcaaataaacgaagcgacaatctttgtaacagtggactaagcagaccaaactctaattaaagcactataattcttttgtgttctctttattttatgctttccttttagtatgagtactcatactaaatgagtactcttacgtttgaatattcttatttgctttgaataatcgtacgactaaattcctcccataacacttcctactaaatttgta

SEQ ID NO: 103055 - DNA, 629 bp, Cannabis sativa
attgatcattacttacataatacgttgcttattccaaacaagggaataagtgtggaaagtctttgttgggtcgaaccaaagatggaattgttgctctctattcccttttccttgggtgaacacatttgtatggagtgtgtaagggtctccagacaagtttcccaagaactcaaagtcaatctcatcatggtttggaccttcagaagataactgcattgtacaaatgattaattaatacacttaagtcagccacatatgaaaacttgattaattaataattaatgtatatctatgttcttaattacatagtacgcagtgactgttccagctgaatttccaggtacaagcttgatttgcatatcgattcgaccaaacaagtactcgttcttggacttgaaacccgagccggaagccttatcaagtgagagtgtgagaagctgacctcctttgagtatttgggctctgtgatctccccatgttatatcaaaatcttggtaaaagtttccagctgagactaaactcactagacaccaacttattactgtcaacacaacagaacaaaggagaggattgttatgagatggcatttcggtttgcttatggtagagaaagatgtaagtaatattttg

SEQ ID NO: 103056 - DNA, 686 bp, Cannabis sativa
  modified_base (169)..(170): a, c, t, g, unknown or other
atttaattaaatagaaaattatagttaagttggaaattttttaattttagatcaacataaattagaataatttttagagtatattttattttattttaataattatttttgcagatagattttgaaatgtattttgtttaaatgtagatattttgaaaattagattaannttgaaaattaattttagatcaactgaagtcaaataattttcattaatgatttaattaaaatagatagactaaaatatatttataattagtttatgaattatctagatagatattttctaggtagatttttggtacttttctcgatatatttaattcaattagaaaattaatatttaagttgattttgttcaagatacttaaatatttgatatttttcttaagagatttaattaaatgtgaaaattaatttatctaactttagacaaccataaattaaaataatttttccacttttattttattttattttaatgattatttcaaaaatgtatttttattacattgaatttcgaattctgtcatatatatttaaagaaaatcaaatttgagttaaaaattaattatttaattttggaccaaagtaattttaataatatttattaaaaatttttagtaaggatgaaaaacaaatttttttattttttagatcgtcctagggtataattttataaatat

SEQ ID NO: 103057 - DNA, 740 bp, Cannabis sativa
acgcttcatgctttgcaaccgcaaaagttggtccaagggcaatacgactcaacacatcagatactccatgattcggttcgttcaactttgctataatggtattccttaatcgcccaatgaaagtttgacgatgctggtccgcaacccatttttgtttatttttatgatttcttggaatcattgattgtaacagctttgtatggtcactgtaaaacaagtaaggtaaatcaagttattgtttcatcgttacttaagaaatgttaatcaaaggaaaagctgcttacgttatatggctgaacctctgcattattattcatcacgactaattgagcttgatctagttcaagcttggacattgtcaccatcgtccccttcccccttaatcctctatcaacctcaactccagccatgtaccctgaacaaaattccacagcctctttagaaatgtagcactcaaccatacatgcttctggccgatagtggttacgcacataacttttaagcaccttcatatttctttcaaatggatacatccatctcacccaaattgcccacataaccttacttctctcactagatgaaccattaaatgtatcatgatgtcaaaaaaagatggcgaaaaaaagttctccaggttgcataatgttttgactacatgttcatgtaatgcatctaacttatccaattctaattccttcccacacaacttattaaagaaatgcaaacatgtgtcaaacact

SEQ ID NO: 103058 - DNA, 719 bp, Cannabis sativa
tagtaatctaaaaagattttcattccaccacaggtgcaggtagtgattggttgaaattccttcaactcatcccagagggatttcattttagtgaaataggaagatacagattggtcaccttgttgtaatcgagtgagttgagtttgtaactaaaaaatctgagggccattgcctttgttaaatctctccgcaaggtcattccacatgtcaatggccaaatcaaaatacataatgctttgagcaatttcttgtgaaacagagttgactaaccatgacataaccatgttattgcatctaagctaagaattgagatagggattactaatttctggcagaggaagggagccgtcgatgaaggcaatcttgttcttggcaaccagaaccattgtgattcctcttttgcaggattgatagttgttgtcattgaggacggtggacacaagcacgagtccagggtgatcaccaatgctaagaaagaagggactgaaaagattggcattgacatgacgattggcttgaggagcagtggtgtgatgatcgtcaacaatggtggactgatcctgtgattgaacaatttctggtttcgagttatgtggaggttgaggcctggaagcttaatttctgtgaggaacgggaaatgaagtgagattgggagtagcatgaggatcaaacgtgatgtcagctgcttggttgttgaccgtggatggaggaccgccatc

SEQ ID NO: 103059 - DNA, 533 bp, Cannabis sativa
tggactgagcaacagctttgagtaaaacttccttaccccccacggagaacaatttttcttgccaaacagaaaggagattccacaacttgtcttttatttcaccaaaaagaatactcttgtctcgacccgaataagatggtaagcctaaatacctttcatgacatggctgagtttgcatatttaatagatgctggaatagaactttagccgattcccttgtgttaggagagaaggagagaactgatttctctgtattcaattgctgccccgatgcttggcaatatgtggtaattgctctttgaatagatcttgcagaggagctgttagcccgacagagaataagactatcatcagcaaaaaataaatgcgaaacagtgggaccatggcgagaaagctggaaaccatttaaagaaccattgcactcttcatgttgtaataatcgtgagaatccttcagcacaaatgatgaagagatatggagataagggatctccttgtcgtagaccacgctgaggaacaatattgccttggaca

SEQ ID NO: 103060 - DNA, 773 bp, Cannabis sativa
gcatgatttgtatttctaccaaaagcgcgtggtacggtataattgtgtttttgaatttaataattacggttcaaaccacacatcactatatattacaaagttactaacttttacaatgtgaattttattattattttttatataaagacaaatatatgtgtatattataattttttttagagaatttaatataatgacttgatgattagtatatatgttataatgttaaaattttaataagattttttttgagatttttacaaaaatattggattttgggtaaaagtttacaattttactgtcacaagaattttttattacaaaaatactgttttttttatataaaacaatcgtaaaacaacaaaaaagaacaattaaaataacagtggaacaactaaaaaataatcgtggaacaaccgtaagaacttaacacagtacacaatacacagtataaaacttacatagtattttttaaaaaaaattccatccacattaaaaaagtaaaagagttagaaatttcagtatgtggtgtaaaaattatatatatttttttgtattgttaaaattttattagattgatttttaaattttcattataatgtttgatagtgtaaaccgctcaaaccatactgcatcacactgtattttcgtaatgtggcttttgctattttaagatctcgccgtgtgattatggtttaaaaaatgggttaatttcacaaatgcacaaaaacaataaaaaaaaacaacaaaaatacggtttcacagaattttaa

SEQ ID NO: 103061 - DNA, 667 bp, Cannabis sativa
  modified_base (35)..(42): a, c, t, g, unknown or other
caaaattttctaattttacccattcatgggtaatnnnnnnnnagagtgcacccatatatatatgtatatatatatatataaaatgatcttatttcacattagaataataataaatttgaaaaataatttagatattttttaaaattcaaaccataagtatcaactttcaaaatttagttattttaatatattttactaattttaattatacaattaaaaaaagctaatcacttaccatttatcttattaaatatttattttattaatatatatatatttttttaaataacataaattttgatatttagttaaaaaaattttgaatagatacttaggtttgtaacagctctaatttttgggtttatttattttatttttttaattaaatataaaatgaaattaaattctttaaccaactatctttaattgttgcatgtttgtttgtttattcaattttttaataaacttattatttatttgatttaaatggctataattatcttattgatggatccaatgatctaaattaatcatagttaattttcaataaaccaaattgttgcccctatttttgcccaatatacgtggaccagccaaacagggacacgtggatcagaacgtattaaggcttgaattattagctgtctttgtggtataaggtagcatc

SEQ ID NO: 103062 - DNA, 666 bp, Cannabis sativa
tttttttttctttttgaaattaaaccattatttagtttcattaaataacgaaaattatatgaaataatataattataaaggaacacttattaaaaaaaaaatatttgtgttagtggtttattttctaattatagcatatagtatataaaaagaaactaaaaagttttatgaaattgtacatatagagatgttcatatttataaaggagagaaatataaatacataaataaataatgatagaaaaacattaaaacaatttgttggcatattatcttgtgtttgtgttttattaaacaataaaataaaaaatagttggctaggctacaaagaaagagaaaaaaatgaaaaagaaaaaaaaaatgatatgatgagtaaaacgggaagtgaataagaatggaagtggatgagtatagattaatttatactttcggtaaactaaggacgttacctgagttattaaaatagttgacgttatatacataaatattattagttttatgtatatatttaaaaattccccataaattatatcatcaaaattatgattaattacgtaatataatataatttgttaaaaaaagtagtgtaatataacattcataatataaatttattttctattttcttgataatatatgtatcaatttcacattttatattttatta

SEQ ID NO: 103063 - DNA, 696 bp, Cannabis sativa
aaaataaataagttattacttaaaagcgattaacaaactgaatcgttttcgtgagaataggaatgtttgatttgaaatattttaaaagcgttaaaaaataaacaaattggttaaactaaaaattttgttagatagacacttttaatatataaacatattttagtgcttttaaaatattatattttttctatttttttaaataataatagaaatacatattctgttttaaaaaataataataaaaagatttatctgtacatataagttattattacgtgcattcaacttaattatatttttaatttttaatttattatgcgatttttaaaattttatttattattttttttgaataaaattatttttaaaattatataaatgaaaggaaccaattaattttttactttagtgtttttttttttgttgaaatatttaaaattttaaaaaatttgaggaaaataaatataaaattttaaaatagtaaaattgaacatactgcccaatatttgttttttgaatgaaaaatgtagttttattaaccattaaaatcctttaccaaagaaggtaacaaattagttggaacaaactccaaccaaaacaacaatcagagtataaattagaagctcttgcgaaattatgagctactacatttgctcatcgtttgataaaaaatatcttaatattttccatctccaa

SEQ ID NO: 103064 - DNA, 701 bp, Cannabis sativa
aattctggggtctgtcattaccttaaagatccgaatcttcctttggcgtgcaataaatgagtgtttacctgttgcagaaatacttcacaccagacatattgcagcttcagcaaattcctccatttgcaaccgtgacaaagaaagtattactcatgctcttttcttttgcaaacgggctagacaagtatggcagctttctacatttggcctcgataaaattatatctcctcacatgtccttgaatgaaataatcctgcacttggctgctacttggtcttcttcaaagttggaacagtttgcaactctactttggagtatttggaatgaaaggaatagagaaatccatggctccaaaccgaaacctgctgatgttcttttttattttgctctttcttatcttgcagaattccattcagctaggaaagatcctgcaatcaattcattaactttaaggaaccagaactcatcagtttcaaaggattctccatggatgaatccaccttcgggtaggctgaagcttaatactgacgcggctgttgacaagatgaaacatctctctggttttggagctatccttcggaatagcaatggagatattgttgccgctatggcagccccctatcaaggttgctttaaaccagaaataatggaagccatggcactcatgcatagcttgaagtggttgcaagaacttgatctac

SEQ ID NO: 103065 - DNA, 782 bp, Cannabis sativa
  modified_base (328)..(328): a, c, t, g, unknown or other
attatcctaccataatcttgccctatatttgtatatattagaaaaaaaaagtatcttttattacaatattaagtacaagatccaaaagctaaaatacctattaaaaaattacaaaattaaatttctgtcaaacgagttaacttattttacataccttttacaaaaataaaggaaacatgctaaatatattttaggaaaattctataatgcacctccttaaaaggaatatatttatacatctttctctgttttagtatcagaaataattttttagtcaatttttttctcatggtcatgtaaatgatacttatttaagacatcctgcaanattttaagaaattcggaaaagtttaacacgccgaaaattacattcaagtagtgtgttgcacgcgtgactattttattttatacgcatgtaaaataaattgtttgaacattgttttctataatgtaaattattctgaatttcttaaaagtttgtaggatatcttaaataactataacatacatgaatatgaaaaaaatagactaaaaaactgttctgaatgtcgaaaaaagtagagggtacagcagtacatcccttttaaatgggtgcacggtagaatcatcctatattttatattattttaaaactttctatatttatatatgtagtacttttatattttattattatgaaatgaatcaaatttttctatatatatatatatactagaagaaagttacgtgcaaaacacgtatatttagttttatgttaggtgttctataatttaattgagaaa

SEQ ID NO: 103066 - DNA, 525 bp, Cannabis sativa
ttttcaattttaaaaacaaacaacgaaagtgtgttatgtgaatttcattttattttcatttgttgattttatttaagtcgggttcgaggtcgggaccgagggcgagtccaagtatggggttggtccgcgttcagtttccaaagtctaagttggagtcgaagttcaaaatattaattagaaaaaaacattctttaaataaaatttgaaagtaattttttttaaaaaaaaaaaatagattcttaattaaaaaattgaaaaataaaaacagttttttagaatataattttggaaaatatttttatttttctaattttaaaaataaaaaactgattgaaaaagtattatcaaacacactctaaaattatgattcaaacaatttatattgcatgtgtatattagcccatctcaagccaattagggatctttggtcaaaaaaatctaattaggtttttttcatatgaaaaaaattatatatatatatatattttgtatatatagcagtaaaacactaaaatatagtatttt

SEQ ID NO: 103067 - DNA, 979 bp, Cannabis sativa
aaaaaaagaatttttacatgttgataacctgctattacaggtaacaaaaatgtaatcatcatgattacaataaaaatgtagccattaagtagtcatccatgtttaaatatatatctatagctttagcccctctggtaaagatgaggaacgaagggacgttcccttagcgggaatccgattcgaaccattctctttatatgcttagagactcagcaagtgaactaggttttggtattccttctcgagcttctatttcgtccgttaaaggagattcgggaaaagatggaataggaagacgtgtttccataacaaacaacatatgtgcctttctttctcttctttcttttttggaattatttattaggagaatctttctaaaaaaaaatatcccttttttattcttatgtcattttcctctttccttcttacctgaacgtgaagatgataacatggcctggtctcgtgatgacggccccacgtcaattcgtagctgaatccctctcattctcagcggattcagttagtcataatcttggaaatggccttataaacaatctggggctaataggagaagaattccaaaacaaaaatgttatagtagtagatggacaggttttgctttcacctaattcagcacgtctagcgtattttttcacagcagctggatcattataattgattccattgagttcaccgccatagaactcaacagttacacctattggaagactagctcgctgctccatataactaatacaaagaaataaaaataagaatgaatgtcatgtacggcgctgtcgaacgagctcttaaaagagtccacctcggatactaaagaatttcaagggcgattaggtgtggtgtgacagtcagtagtcccgtgatccgtaaggggaaataccggataagctgcacaatcccacatcgcctggggaaggtcaagtgggatgattctgagactgtttaggtatgggactac

SEQ ID NO: 103068 - DNA, 572 bp, Cannabis sativa
ggctattactgaactgctcggggttgtacctctataaaattcctgtgtctttatattgctttattatatttcaatcgttataaactacttgtcacttattaaattagactcaccgtcgtttgctaaaagcaaggtcaaaattttggtgcttgtattgagagcacaatcaagaatggctcttcattctaaatctaatggtacaaactcgtaggggtatggttaattcagaaaatccacaggcggtggatcctgcattgcagaacccaggaaacacaagggttctgccagctattaatcctgaatagccgtcgaacgcaggtcatggtctgacgactcctgtggatgaaatcgtgcatggtgtacaagagactggtaataccagtttaccacctagccaggacattcataacagagtcgttatgcctgccaccaatgttcgaacgaccattggagataaactgagatccaaaacctccgcggtgctcttggactcatgcaaggtcatgccaacaccctacatcatgatcaggaggaactccgtgctgtggtaaatcttgcgttcgaggaacaaa

SEQ ID NO: 103069 - DNA, 667 bp, Cannabis sativa
aattataaggtcctactatgtagatatattttcgcttatttttttttttttcaaaataaagtcatttatacatcatttcagttatataagattacgcaaatcccattgcaaaacaagatttgtacaagaaatattaaccataatctacataatagtagctttgttaattaaaactcaattgactaatacataaactacccccattagcttcataaaatacccccattatcatataataacaagtttcgaatttggtctaaacactcttacagcctttctccttactttagactaaatggattgttagagagtcccacattgctaatctgtagaaagataataaaatatataagataaatgcgctactccttccattatcaattgattttgagataaaacctcacgctttatcccaaattctaacatggtatcagagcaaaaaaaaaaaacaaaaaaaccctctaacgactatccgaccaaaaaaagaaatcgatcaaagtagagccaaaaaaagccaccaaaaatctaaaaacaattgatccaaaagccaaagtcaaaaaagttatttgtgatttggggatagtaagccaaaaaaatagccaccaatccagaaagtagagcaaaagagagcaaaaaaaaagccgtttatgatcgagttgtccaagat

SEQ ID NO: 103070 - DNA, 557 bp, Cannabis sativa
agaagttttcacctgaatcttaggcaaaactcaatctctcttttctctgcacctctctctctacctatcaatctttctctctctaaatctctaaatctcatctcttttttgcgcatcatcgaaatgataagagaatgtagcattcataggcttaggatcaagatcctaaagtcagtggctacaagaaacgaggtagtgaagttagttagaaataactaacttaaccaactcctatttcagcaaagtctccacgtcagcattaagtattagagcctccgggaacatatatgagctcctggactcacaaaccacgaataattacttgaagacgcttccagataggatagagcctgctgtagtcgactatccggaactaccattccaggagggacaactagccagctggaactcctttccaggggagggctagctatcatgagatctggacccggagtggacatgacagtcatccgggaactcccttctggactagactatcattccacacaacccattcccggattgacaaccgtgaatgaacaactttccagaaatga

SEQ ID NO: 103071 - DNA, 624 bp, Cannabis sativa
tttttttatttaaaaaaaagtcacccaataatttctcataaactaaaaattctgttatatagtcacattttatatagaatagatatacatatatacacatacggatgccgatgttgtcacgcacaacatttttacgtgactagtgttgttgataatgacaggacagcctttagattggattgcattgtagatgaatggttatgatttgaaataattaaatagtaggcctattataattttattagagagtagtggcataaatactaagtttaacttacagttgtaaataaatatttaagtttaatttttgacataaataatatctaagttataattttagaacttctgtaggtacctaattatccttgattggtccaagtcattaaatttttattattttaaaaaaaattagtttaaatatgccaataagaaaatggcacgtggatttaatggcttaatatttaatggttaggtacctacagagtttcaaaaatataactcaggtattattactgctaaaaattaaacttaggtatttatttgtaattggaagttaaactaaggtatttatgctacaaattactcttttattatattgagataagggaaaatgattcaaggtaa

SEQ ID NO: 103072 - DNA, 861 bp, Cannabis sativa
gcaagtcaaaggctccttccactggaaattccgcccaactcccccaatacccaaataattcaagctcaaatggtaaatgttccaacaacaacaacacgcaatggaatgggaagaaaggaaagttcaccaacaaaaccgagcaagttcttggggagaatcaagaaaagtacactacatttaccatcttgactgaagacgtagaaagtgtttacatggccactcagtcactaaccccgtacaagaagctcgtgcccgtgaagaaagatgtcagcaagagagacatgacaaagttttgtcgtttgcacggagactacggccacgacagtaacgaatgcaacaacctgaagcgggaaattaaattcctgataaggaaaaacaacctgcatttacagaagtatgtcaagaccaatcagaatcagaggaatgacaataacaaagacttgctacctacaccggtagacggacatttgcaactcattattgggggaccgcacataggtggagattcgggcaaagcttgggaaaggtatgcccaaacagcgcagcacgagcaagaggaagttatcctaaaattccacgagtaggagggcctaccataaccttcagcgacgaagatgctgtcaaaatcagatttccacacaacaacccgttggtcatagaggtccagatagctaataagatggtggcaagaacaatgattcataacggtgcctcttccaatatcttgttcaaaaccacttatgaaaagatgggactccatctcaaggatcaagcctcgtgtctcctgtctgtctatggtttctccggccaaggagtggcacctctaggacaaattcgtctacccctcactgttagacaagc

SEQ ID NO: 103073 - DNA, 653 bp, Cannabis sativa
ttgctgattattaaatgttgtaaaagcatgttatgggttatgatgttcttaattgcatgtaaaaagaaatttgtgttgatcttcttaagtttgagtgttaattgcaagatattgttaagggttatattctttagttttgaatgagatttatgagtattttccaggttagaatttatgctttatttggtattttgctgctggaaaattattagagttgattggttttgtagctctagttcaagagcttgaattttgttatttagagctttatttcatatttttttgagcaatctgattttgagagtttgttgttgatgtttaatgcatgaaatggtgttttagactctctgtttaatgattgaaaactgatgtgatggttctaggtttttgtttgggtttggatgtgttttgggcataattttcgtagctgaaaactgagttttctgggtttttaaaccaagtggtcgcgactatcatcggtctggtcacgaccatgataatggcagtttgttatttttttttgggttttgttttcgccataacttgtgacttgggactccgttgggacattctttatatcgttggaaagctcttttggagctctatgtgattatttgaattttgaatgcaaattttatatttttgtggaagtg

SEQ ID NO: 103074 - DNA, 713 bp, Cannabis sativa
  modified_base (496)..(519): a, c, t, g, unknown or other
accccatgattctcaacatggtatcagagccatgtcccttgcgggcacagatagtgatcatgtcaactctgatacggttcaagattgatgaaaaaatagccatcatcttgaggggaaatattgtggacattgtcccacatagaaaaaaatggtagagaattgaaccatatataagaacatgggctactccactcattgccaattaattttgagatggaaccccataattctcaacaaaatatagttagatattgttaaatgtgggtacttaagttgaattgttagcacacttacttttatcgaaaatatttatttgatccaattggttacattagtatttaggagaaaacttaacataaatagtcattatagtacaactaataaaagttattataggttatttcttgagcaaccagcgatacacaacatgtttacaagcaatgaccagactcaaaatttaaagtgagtgggacataaatttttttataaggcatgnnnnnnnnnnnnnnnnnnnnnnnnatctaaaattatgtttataaatatcatctatcataactaactaaaatgtatatacattttttcctcgattttttttcaaggaacgactgcaccccctcgtttttatgtgggtctgcccttatttgcgaaaaaatctttagtaggggttacccatttgttgcttggttgaccccgccaattattttctaccaatc

SEQ ID NO: 103075 - DNA, 543 bp, Cannabis sativa
aaaccttaactaaagaaagacatgtctgcgggtcttcaaattactgggtggcctgcacatgattctgccataagctctattctctttggacccgatgaaaccagcattttcagtttgggagcggaaggaaaggtaagtatcatcgtaactgtgttgaaaaataatgatgtcggtgaatccaagtatataattaaaatttcccttttttttacagctttaacctcatagttttggctttttcatgccagattttagaatggagcttgcacaatcaaggtcaagtcctttggtcaaaaaattgtagcaggtcctccatttcttggcacaacataaccttatcaactaccttgcttattttacaagatttgcttagtaaattttgtgtgctttccttgtgtaggttctgtgatcctgagatctcaaaacagtgtagacatgaaatggcattagatgctaatgggagaagactattgacaacatctggtttagtaagagcgcccatttatcaggtcaatctctttacccttgtggttcctttttaat

SEQ ID NO: 103076 - DNA, 665 bp, Cannabis sativa
catgagatttgctaaattgacaactttcataaaagttttctttagcacgaggattttttataaacatgttttaaaagaagattgagtacactatgttagaaccaagcatataaaattggatgtacactttgttagagacaaagtcttgaaaaaagagttggaagtgcgatatgtaccgtctcacgatcaaatagctgactgcttgacagagtcccactcatcgcatattttattttctaagtgacaaacttagagtggtaattaaagacccctcttaatttgacaaggagagttagaaaataaatttatttccacgttttgttctactgtattatagcgccgttggggttatggtcccaatacaattttattactgaatagtgtcagaaatcgattagaatatattttttacattgcattttgtaaaatctttttcatgttgtgtgtaccctttaaaatattcttatatcaccacaaatgtgatataaatacaagcctctctattcttgagcagaggttttttattttctgtgttttgtttgcttttcaaactatagtgacggcttgatacctaaacttgacctagctggcaactttacagtcctaaaacaaggttaaaaagaagcatagaagacataaagatcactaaatgctatttattttat

SEQ ID NO: 103077 - DNA, 689 bp, Cannabis sativa
  modified_base (49)..(65): a, c, t, g, unknown or other
ttttaatataataaaaaatacctatcataaaatttagtatacgtgcctnnnnnnnnnnnnnnnnntagtatatatatatacatatataatttttaaaatttggtaaagtcggaaagaacaaaaaataactaattaataggtactatagcaaatttcttgtctcataactttttctttttgattttatatataatgatataaaaattattaattagtagcacattaactctataatattagttttttctcaaataaaaaattaataatttacctaattgttatggtatgaaatgtaaaatagtcttaaatttgaaaattaaattgataaatgtctactttttaaaaaaaaaaaaaattaagaaaataaccataaattagctaataaaaattataaaaatatatttactacatattattttttgaaaaatatataataataaaattaaattatataattttttacgtattacatattattattttgtagcaaaaataaataaatatattagatcattaaatatatacaagagtatttgatagtatatcgtataactgaaaattaatataccgtaataataaaattatatactacaaagatattacaacaatactaaattaatactctaaaaatatatattatgctaataaaattatatataccactattcaaatatatatacataccataa

SEQ ID NO: 103078 - DNA, 705 bp, Cannabis sativa
aaaaaaaaaaaaaaaaagtgtaggctactaggataaagtgtatatgaagttcttgtatatatctcattacatgtgcaagaacaatttcttatgtgataaagagtaaaaagcttgtggtaaaaaccctttctaggctttcaaaaaagttacgtgaaaaattctattccaagacttatgttcagtttttattatacggtatattcaaataaacttaacgaatatttcatttaattaactatttacaaatttatttattgaatcttattttattattcgaataaataatacacattaattcagttatagatatttatatctaatagccgattgagggaacactactacaatatgggcctttagcttctcttattttaacccattttataaaaatgaaagctaaagggtgtgaaaacacccacctggttcgaaattgacatttagaggcgattttttagtaaaaactgtaagtatatatattaataaaccctatgccatcggttggaaattgagaaattttaagggttttggtgagaccctatgccgccgattcctatatgccgacggttcttttctaggaaccgacgacatagggtttaactaaaaacccttatatcgtcttctttttccccatgatattagcagccacaccactacaccagacccttgaaaacccacgaaaccctccccaacaaacactaaaaacca

SEQ ID NO: 103079 - DNA, 634 bp, Cannabis sativa
gcttttacttgtaattccttttctgtcctttgtattaagtgtattgagtctaatatcagtgtaagtggaggtttaatccaacaaatagttattgtggtacaatatttgatctattttatattttgtgctaaattttataaaaattttagcatgtaccgaagatcacattatacatcacccttagagtttaattttaagtgcaaattcttcatttgaaaattattaagtgtaatatatatttcacaaattattcacacaagcaatatatgacaattgataagtactattaggtgcccttattataataatacttatttataatggggttaatattattttaaatcctatattttgtaaaagttaccgtttggattatttattttgttaaatgataaattagaccttatatgtttcacaatagtataaaatagtattttgagctcaattttttacaatttttttaatatgaccaacttaaagacaatttctaacaaatgcacaaaatataaccaaacttgttataggacctctaaatcaaattatcattaagttttattttgataaaaaatcagttcaggttactgttttttttttttcatcaaaaaaaaaattctaatttattaaatatcgaatc

SEQ ID NO: 103080 - DNA, 559 bp, Cannabis sativa
aggtggcagatcaggtgtaaaagtggctgggaggggggctggccgaaggagtttcaggcttggaaaaactggttggtgatcagcagcaaaaacaagaattccagaatttttactgctgtcatggcagccacgatttacaggctgtggttaaacagaaataattgtgttttcaatggttactcgagcacaatcacaagcattgtacaggatattaaaaaaatcatgttttatagattaacaatagcttagagagggagcctgaatagacataagaggaacttcatagagcatttattttgtaaaaaatagttgagtttgtagctggttttttcctcctcagctgggcattgtttgtaattgcttgttgattaatgaagttgttccttcttgatcaaaaaaaaattttactacctaaacgtagctgtacaacccactttaggtatttacaataaaacatgtgctatctattatttctacagtaccctttgtattgtactgcaattcccatacaaaatgcaagcatactatgatttgataatttattattattcttcttcat

SEQ ID NO: 103081 - DNA, 609 bp, Cannabis sativa
atttactttttgatcttgtctaggctttatgttcgaatttttataatgcttttccccaactctgtagggagaatttccctttaaaggtgtagtaattagagctactcttctttctttttgccttctcttgttctcaagttctttcttttttttgttcttcttccatgatctcgaaaactccatcaaatttttctattacttagtcatggttcttggcttggaaaggatgagttggtcactgagaaagatcctttgagcagtttgcaatgaagtatcttttcgcatcctttgtagttacttcgcttaattgatacatcacattcaagaatctctgtaaaaactactgaggatgctctccttcttttggttttgtttgatacaaatccttggaaaatttgcatggcatactgacttttgttattttttttacaaaaatattgcaaggtaatattttttacttttttactgtgtatttttataaatttcatactacagtattaagtgtttatttttttagttttttttttgtttgttttagtgttgttttacagttgtttttcataatttatttttttaacgtcgatttcactgttcttgctccatcttgct

SEQ ID NO: 103082 - DNA, 513 bp, Cannabis sativa
agggaaataccacaggaaccttgcaatatgtcttcatttagtggtcggattagaccaccgaaagtccaacttttccatttctagtgggcagctccaacaacgagagagaaagagagggctgcattttttttttaatagagggaggcgcatggagatagaaaggagaaaggaaaagtttgtattagggtttcttaggagggaggcgctgatgttatgttaggaaagaaaaagagttattaggtttattaggttaggaaagagaagataataggtttttctttatttttttttttaaaaaaaaaataccatgtgtcagctgacatgatagggcaggtttttatattctattaaatatgaattttgtttttttttttatatttttaattaattattccagttgtatttttttaaatagtattatcatatagtgacacgctaagtgtgtcgggaaacatttatccaatcgcatctagcgcgtcactataggctatagatttttaaattaataaaaat

SEQ ID NO: 103083 - DNA, 623 bp, Cannabis sativa
acttcccttttaacttttcacacttagctccatatgctgacctttttctttgtgcaggccggtttgaagttggcttacagttactcacaggctaaatttgctacttctaagagtgcggctctgtccgacaccttgagggcagaggcggacttggccaagaaggaagctgaggaggctagggcggaaactggagctgtcctgcatgagctgggtgaagccaacaagaagttgtttgctgccgagaagaagatctccgtgctaacaaaggacctcgagactgctgatcgctttcaagagacaatcgagatcttatctgctgaagttaacagtcttcaggatgagaggagttctctgcggtaagttcttcttcggctaaaggaggagagggacgccaaggtgaccgaggcggaccaattgaaggaggaggtcaatgctttggagattgccagcctcgagctcttctttaatttctggaaggctaatcccctggccaatttcgactacttgggaaacgctaaggacatgtaccttgagtactgcgcggcccaagttgcctatggtgggaaagaggcagctgcttcaacttctggccaagcttctgaccaggctgctgatgcttctcc

SEQ ID NO: 103084 - DNA, 534 bp, Cannabis sativa
gattaatgatatttgatagtgtgtgtatagttggtcatattttaaaagtatatatgagatatttgtttaaaaactggtgacatgtgaatgtgatagagtatagtttttagttgtgttattttggtcgttggtgctgggcacgagatggtacttactggtattggtgttactacttggcggagacttttttcttgaatgaaaattataatttattaaacatataattctgctaatacaatagactgcagagcataaagaacattactcttagtaaaaagacagtcacaccaataacaagcaccacgtgtcataccgtgcacgactttattagcaaaccatttaacatgacaaataaaaatattatctaaaaaagaaatcataagctgacatttttgaacaatttactaatcttccgtccctattgcaagccacgaagctagtaccaacctggtttgtagcttcaaaaacagctccatcaacaataattttgagcttacctactgctggtttgatccaataatcgttgctgtcaac

SEQ ID NO: 103085 - DNA, 624 bp, Cannabis sativa
catgttagcgtgatttttaacttgttgtgcagcttgttgctaatcaacaaggttatcaaaaatcgtgattaattaaaattttgattatgtaattaaaaagataaagtaacatacatttaaaattctgggatcccatttaccaaacatttataaaagtttaactatatataaacaaaagtctatcgcctaacgactatacaacaaaaccctgattccaggcctaaccgccctaacatgtacaatcttcatctgcttgctctcacggctgctcagccttagccttgcccttacctacacatggaaatagcaactgtgagtcaacagactcagtaagaaaagcataacacaaaacataatgcccatacacctaatcataaccctgtgtcccacacggtactgattctagaacgttcaaacggcaagactatcgatcataatgtcatcctatactcaatatgccagtcatactctagccatattgatgtgacaacatcgatcagtatttcagccaacatatctaatcataattcaatctcaaaaaacatatactaacaacaacagtaaccacagaactcaaaaacccaactcatgcaaaaatctttaacttaaaactcaagaaaccaa

SEQ ID NO: 103086 - DNA, 951 bp, Cannabis sativa
aactgtgtagtcccatacctacacagtctcaggatcatcacacatgaccttccccatcatgcgatgtgggattgtacagctcccggtctttttttcttcggatcacggggccctgactgtcacaaagcacgcgatactgaattgggtgatcgcagtatccttgattaaaggcatgccacaacacaaattcaaggataatataaagtaaatatgggattcagttacccctgaattatgcagtttttttttgttgtacagctaaacttattcaatgaaactctaatttcaatattttctcatatttatgtgtactttaatttcatctaagaaaattatcgtaagagaattcgcttaagtacattgccacattgttatgtaacaaaaatatcgtaatacatgaaagataatactcaccataaaatgaggacatatcgccatgattcatgtgtttgttatatagcaaggataatcgttgagtttaagtgataaatctaaatgctaaccaagtggggagaatattagaataatttctattttaagaatagaatcaacaaattaatttaagatatatgaatattttatattttatattttattgaatttggacacaattaattaattgatattctatatatatatggtcagattacgatttatcaaatatttgatttctccatttaatatcctgaattaattgtcaaaatattctgataattaatgtggcagaaacttttgatggaatgtctcatctatataaatataggatatcagtctttgagctcactactcattctgtgaaaatataatgactatacgtatttccatgctaatcagtttccttatttatttcgattctatagttatatagtgtatatgtttattttatttcctattttatatacatatttatatatttcatctattcatataaaatgtctaacatttctgtcc

SEQ ID NO: 103087 - DNA, 955 bp, Cannabis sativa
ctctccttaggttgggcctccatgctttcccaactgcccatttcctttgggttatttacataagtataataataagaaatttagtttacataaatatgttaagtaaactttataggaaaaaaatatagtatttaaaataaaaaaaacttaacatatataacatatgttatttatattaccataaaaaatattaaaatttccttcatatttttttttcaaaaaaataaaacaaatgaaactgcaataatcaccggagttgtcaatggtgccagaaaagtcaccgaagtttgctgtcggtgccgaaaaagtcgctggagtagctgtcggtgtcggaaaagcctttggagttgctgtcgacaccgaaaaagtcatcagaattagcactgtcgcaagagaaatcaccaaaaaactgatttcttaggtttgattatataaaagtaaaatttataataaaaaaaaacctataaatccaattttaaagcaacccattacagtaaaatttatcaagaaactaatttttttcattaagaaattagtttctttattaaaaaattagtttcttcatgaaagaattagttttttcatcaaataaaacggcataaaaaataaaaatattaaatataggctttgaaaacctaatttatatatgtgacatattaaataccataaaaatacttaaaaacaaaaaattcatataaattggtcaaaaataaaaagatcatatttaactaaataacttttaaaatttcataagtaatttttagtttctttttgaatagtctttggatctcatacaattgggcttgacacttgggttaccatatcacaacataaaatatttagacatataataaagggaaatttttattaatataccaaattaacatattaatcttacacttaccgaaaaaaacaaaaataccatatatacgtatatccctaccgaaatttagga

SEQ ID NO: 103088 - DNA, 624 bp, Cannabis sativa
agctttactagctaagaaagcttggcgaattttgcaaacgcccaactctttacttagcaggttgctgaaagcttgttatttttcgacaaatagcttccttgatgcccaactaggacacactccttctttgacttggcaaggattattatggggtcgagatttattacaacttattttgcgctggaaggttggtgaacgtagataaattaggtgtgggtttgatccttggattcctggctgcaattcctttcacccaattctttatactactgatggtgttgtggcatgcttaattatagatgaatgtcagtggaacttggaactactaaatcaattttcccctttggatgtggaacgaattatgaccctgcctttgagttctttcccaagtgaagattcactaatttggcattatgatgaatctagggtataaacagtcaaaacaggataccacttggctgcttctcttgatgaaatggttcaccctttgccctcatcttcatcagacacacggtggccatttctgtggtctttaaaacttcctccaaaggtaaatttttttaactggtgtgttgttcatgatgccctccttgtagcgacaaatctagttcagaggaaagttat

SEQ ID NO: 103089 - DNA, 574 bp, Cannabis sativa
tgacttataacattttttgtccaaattttgagtattttttcttcaaaattttaaataatttttaaaatgctctactaactaaatcctactcatgtgtgatgcattaattatgaaaaaaaatgtgctatattggttgatgtgtaatacgtttactggaaagtgtacttattgattgactttttagagtcacatgactcaaatcatatcgtattctcaatcacaatttctcgtgacacccgaactaaaacttaaaaatacatacattactaacgtaaaaataatatacacatttttaaaataaaattaaaaagaagaaaagaataaataattttattttcaggcatatctatttggactaaattaaattcaatatttgtgatcttcatcttcaatacgtacaatgccattatgtttcttctttttccaagataattcattttttttatattggggagggtggatttgaacttagacttcaatcactaaactatacctatgaccatccaatataattcatttaagatttttatatatatattttttgaagtttttatgtttctttcatttaagattt

SEQ ID NO: 103090 - DNA, 506 bp, Cannabis sativa
ctaatacggcgttccaaacgaaaaaaaaaaaacatatataaaatgtaaataaatgaattctcttccctctacatatttatcaataataaattaataaaatgagaattttataacatctagggttgttatgtgacacaaaaagaaagaggaatcactctattattctttttaactttttttttttatgatttttttttttaatttttataatttagattgctgcgtagatggcgatttgaatttagttgtaatttaaattatttcgtaaactgcacgtataaatgaaaaaaaaacactcatataataataagtttttacatgttttattataaatttaaatataataaaatatctatactaagtaatcactataccccacatcataatatgtcttcggccttgcgtgtataatgtattacaatttgcaaaatattattccaaagtcttatttgatcgaataatcattccataattagtgtcttagtgttatttttatatattcatta

SEQ ID NO: 103091 - DNA, 598 bp, Cannabis sativa
aaaatttaagtgcaacccgctcaatttaaaaaaaaaaaaaaaattataaaccgaccaacggtttgtacggtttggtcgggttaacccgtccaaactaggcaaactttttttttccaaagtcaaagtcaataaaatttaaaaagataaattaaaaatatcaaattttaccaaaacacaacacaatacataatatacatatgactttaaaactaacaattaagtatataactttatattattatatatttaattatttaaaatatatataataaaaactaaaaggtaaaaaaaaaatttaaagttgggttggtcgggttatttggtttaattgggcgggttggacttattttcaacccgcccaattaacagattggacggtttgtaattttttcaagttatttcggtttgtaatttttatcggttttttcagtttagtttgggtgtgttattcgattttggcggtgcggtttacgtttacgaatttttttgtacaaccctaattggagggattctaaattggggatttgagtagatttagtatcctctcacttttcatttctctcttttgtgatgtaagtttgtgtgtgacgtgttgatc

SEQ ID NO: 103092 - DNA, 643 bp, Cannabis sativa
tttaccatattcatgcacgatcaattaaattcaatataattagattttcacaatacaatagcaatgaaatattttaacaaactttttttttaacttttattttcaaaaaaaagtatgaaaacaaaatgtaaaaatacctcatcgttttccaataaaagcaaagatagtatatctaatatttatttgtatttactcatttatatggttaaggacgtatacttatttttgttttcggaaaaaatgtttacatagatatggataacacgttaggaattaaagctaaatgtatcttcttagcattacgtggaattaaaagtccagactacagagcgacttcaaagtagcataaaaaaaatctctggataaaagaagtgtatttgatttttataggacaaattcataccaagcgcaaatattacagaaatttttatatcaaaaacacaacatactaattttattattaaaatatcactacacggttaaatgaacatttatacactttagttttagtttattacatttttaccacatgcacacacaatacatgaagctgacacatcagtgattgatgtattacatcaatcgttctatacatcattttcctcctttttttctcttatttttcttattattttccatttct

SEQ ID NO: 103093 - DNA, 534 bp, Cannabis sativa
  modified_base (27)..(33): a, c, t, g, unknown or other
gttaaaccaagaaatgccgttagatannnnnnnttaatatataaagatatatgtgtgcatattatatagtatatataattatatatgatctacaatttttcattgagtgaaaaacataatttataacaaaaattttaagaaaaataatataaaaaatatgatgcttacctcctacactcaaagctagatgaatgaatatattattaaatattacataatctctctaattttatagaagtatatattataattatatatagaggtatatatataaagttatatatattataattatatccagctaatatatatatatgtgtgcatattacatagtatatataattgtatatgatctataattttttattgagtgaatttacaacaaaaattttaagaaaaataatataaaaatatgatgattacctcctatactcaaagttaaatgaatgaatatattattaaatattacataacaataataacaataaaatctctctaattttatagaagcatatatagaggtatatataataa

SEQ ID NO: 103094 - DNA, 633 bp, Cannabis sativa
tgtttttacttttcattatttattttatctaattattttatttagactcactgtcgttggctgttggctagaagtgaagttaacaataccaatcatctctaaactcattcaatggaatacaaaactttgtgaaaaacaacaacattgaagacatgatgaagaatttgcaactttcggaggtaaacaaatcctcaataacatattatatttgcaatatttttgagaagtccaatatgcaagtcagacgagcccatcattaatggatccaataatagtgggcccaataagacagacagacggactcactaagccttgaaatagacaaacaagtgagcctatgggccataagtcggatcaccccgcaaccgggttcgagtttggccagtcaaccaaatgggtggatattgtaaaggtaaaaatttgcttaatatttgcgatatttttgagaagtccaatatgcaagtcaaacgagcccatcaataatggatccaataatattgggcccaataaggcagtcagacggactcactaggccttgaaatagacaaacgagtgagcctatgggccataagacggatcacttcgcaaccgggtccaagttcggccagtcaaacgggtggaaccaagtagata

SEQ ID NO: 103095 - DNA, 918 bp, Cannabis sativa
gtaaaataatttccaacagaaatttcaatattaataaatattcttgatatgattgggtgtaaaataatgttaaaaacataattaaaattataataaaatactaagaaatgcatttagtatagtgtgagcccgtaatttttttttcttgaatttgtgagcccttaaattgttaaagagaaaatgtagggttcaaattctaacccctctacgtcttttaataaaaggtaattatatttgcaccccaaataataataagtacaccccatgtttatgttgaccccatttaataaattaaaatattattttttgataaaaacacctcatctatttacaattataggctttgaatcaaaaatacaccccactccacctacctttactatttttattccccttttctttcatcaattttttttttctcaatctccatctatcttactattaaacatagtatcaattttgttatataaattgttatcattggaatataaagaatataaagcctacgagtcttcaattatgttcaacaaaaaaatcattaaaaaaaatacaaattaattacagagttacagtaacataaaattaaaagaattaatttttttaaggaagtttacagtaacataaaccacaacaaggagagataaatctccattaacataagaggaagtcattggggaacccatccctaaaatcgaaactcttatacaactaaattaatatcatacatgtctttctcaaaaaaaaaaaaaatatcatacatatcattatattaatgtttcacaatccatataaactctttgtaattgtaatgttgaattgatgatttatttaaggttgaataaaatagttgaattttaataagttggggtgtatttattaagaataaattttatgagaaacttcattttagaattgtct

SEQ ID NO: 103096 - DNA, 610 bp, Cannabis sativa
actgtttactttcaaaattagtgaaaattacacatgtttcattattttttaaaccatttgtctaaagaaatataaggtttttttttaaaaaaattattttatgagaattcaaaaaaagtttgaaaaagtataaagtaacacaaatagtttttcctataaattcaaaggtaactggtcagtaactagttattctaaattatttttcctatattttttaacttttttctttaatttttctggcaacataattttttatgaaaattaaaaaaaaatataagaaaaacaatataaagtaactagttactctaagaagtaacttattactctaaggtggtagctagttactctaaaagttattaaaaaataattagttatcctaaactgtttttcctataattttatttttttgaattttttcatagaatatatatattttttttaaaacaaaatcatattttcgtaaacttaataataataataataataaaaatcttaaaattaaaattgcactgcaaaatttggtgatactcaaaatttggtttgggctatgtctcttcacaaaataattgttttaacaaaaattattattactatcatcaaacaccttata

SEQ ID NO: 103097 - DNA, 502 bp, Cannabis sativa
cttcttcattcccggatggcttcatatcatcatgggtattttggtcttaactcttggtcaggacttgcccgatgggaaccttggtgccttacaaaagaagggtgatgttgccaaagacaaattctccagggttggtttaatttagtttgtctttatattttcttttctatatttatattgacaaagatctattaatttcttagctaattgtatatataaatactgatgttgatggctttgtccaatgcttcaggtgttatggtatgccgtcacaaactacaggacatggatctttgtccttctctacggatactccatgggtgttgaattgtccactgataatgttattgctgaatatttctatgataggtttgtacttttctccctaacattttcttatataagttattattaaagaaaatacttgtttcatctttctttcttttaatactaatcatttttaaaataataataatatataggttcaatctgaagctacaca

SEQ ID NO: 103098 - DNA, 886 bp, Cannabis sativa
  modified_base (629)..(629): a, c, t, g, unknown or other
attataatttttatctatttataattgataaatacattattgttattattattatgtcgagtcatactttctagaatattgagtgtcgtgtcttttaagcttatgtttttgtgttgtatttttatattttatatttaaactcatatctttcggttaaaaaattcaaatcatatttacaactaaaactattaatgttcttatacttttatcttttttagatattcatttctattttacaataataatgacagcaacctaataggtaactttgagaaagaataattagtaatttttaactaatttttacttaattttactccctaaaatatatgacttattaaatattctccctaaaatataatagttacataattatgtctattttttttaccgttaaaaattagcatttttatccctaaacttttgaccaatacaaaattttgccccctttcattaaaaaattaattttaaaaattataatattttatccatttcttaaagcaattataatattatattaattcaaaaaaaaaattataaaaattattaaaaaattggataaaaatattaaattaattaaaaaaatattaattttacttaaaaaaatattttcaaactttatttgtatntatcaacacgtattttaaaaaatcaaaccaaaattattgagaatctaataaataatttaaatgaactaagaattttttaagaaaaaatcaaacttataatttatatttataaactcatacattaacaaataaagaaagctaattaaaaattcaataaaaatataaaattattttaaaaaaggttataaatttaattaaaaaaatattatgtttacttaaataaatctacattttttgaaaaaaaaaataaaatatat

SEQ ID NO: 103099 - DNA, 634 bp, Cannabis sativa
tttttccatttaaaaaattctcgagatttttctgctaaaaaacctcccttgaagtctcaaaaccttgcatgcccaccttgtcgttgacatatttcctctacgtctattcagatttattgtccaacttcacgattccacagaggtcatcacgccgtttattttatccttagttttagagttcttctttgtgtgacaactcgagtttgaacggtaagtgatccatcctctttcttctgatctttttcattttcatgggttataattattattctgttatttgcactttgtcattccatttggttttagcgattttgatttgaattttttgggtaacttttagggtttaggcagagtaaaaatttaggtttattgtatttatatgtttctgatttgataaatttcatccaggaattgggattgctcttttggtaaaaatgtcccaatctagttctaaagtttatcctccagagtccttagaaatagaatgtcctaaagaattttccctcctgttcaaacctaaaaattcaaaacctcagtccaaactggagataaatgatacaaaaattagagaccatttaaaaaccaacctatgaaaatacatattgatgttctgaaatcaaacttgtatttgttg

SEQ ID NO: 103100 - DNA, 785 bp, Cannabis sativa
acttgaaagaagagaattctgacaatagtaaagatcaaaacagaagaggacgcgaatgtggacatggtttaggaaaacaaaaaaaaggaaggggtggctttaataacaacttcatcaatgaagaacagaagcgaaattcagaagcagcaagagggcacggaagaggaaactcattgtcttggagcgataaatcgcacatcaagtgctacaattacaacaaatttgatcattttgcctcagagtgtagatcaaggagggttgaataaagagccaatttcatcaaagacaaaggtggagaagaaggaactttgccgcttgcttacaaaccaatgttagcaatcatatgtgtggaaaagaaagaatatttgttgagctcaatcaaatggtaaaatagaatgtctcttttttagagatttaatcaaaaatacttgtgaaaagtaaagataagcttcttatatgctagaaaaatggaagccatcaattcatctcaaatgtttactttgtgctcaacatgaaaaataatattttgagtttgggtcaattactacagaaaggttatgatattgacttaaaataaaataacattttcttaagatatgataaaagtaattttatagccaaggttcccatgacaaataatagaatgtttctcttgaatattcaatacgatgttaaaaagtgtttaaaggcttgctacaatgagtcatcatgactttggcatctacgctttggatatctcaactttggtacgcttatacttttggacaagaaggagatgatcagag

SEQ ID NO: 103101 - DNA, 584 bp, Cannabis sativa
agtagtttatgctttggttagcgatgagaacggagcactggtatccgaaacaaaaggcgaaaacatcaaaccactggtgtctgaaacgataattgaagacaatgaaccactggtggaatccatttgagggatgatgtatcattgttcaaatgaagttttggtgagaattaattgccatggtcatcctctcctctggctcatccgaacgacctcatcttgtatatttttttgctaataattctagtggagtgtcccttaaaagtttcattgccaagcaatccatagtcagaagaagaacatgcacactagactttctaatcgtgtgcgttatcgagagctaagaggaggacaacaactctctactaggaggtagtgtattgtaaagactagttttcgtgaactcttattttgtaagtagaagatcttaataaaactcgaatgagttggagaatctagttatagatttcatctgtacagcacgctggattgagctaattctggattttcttttcttttccagttgaactgagaaattaagatgagaaaactgacgcaactatgattttattttttgaaaataaaat

SEQ ID NO: 103102 - DNA, 1013 bp, Cannabis sativa
tataagaatctccttaccacacttaaagagaaactttgaatcccaattttagacccttttcctcagattttccttcagatatcctagaaaaacatttttattccttcccattgtacttgcaaggccaaggtaagtactattagcatctaaagaaagtttcatagttgaagcttcaatgaattgtctgtataaacactataaaagatagaggatttccttaaattgacttgttgtcccaaggcatgctcaaaaagatgaagaagttattgaacacggactgcctcagtcatggtagatttacaataaaggtaactatcatcagcgaaaagcatatgaaaagtttttggagctccattttccactttacaaccatgaagccaccattttaccttgaacttttgaatcaacgttaaaagaccctcagcacataaaataaatatgtaaggagacaaaggatctcattgacaaatgcctctattaggaaaaactagacccatttctcatccaccgtgaacgattgtatattgggcgggcacgggagtgggcgtgggcacaagagcagcgcgcggggagctccacagggggaaaagactgacgtgacaagggggattaagacaaaggaggtggggaccaccatggaccataggaatacttactttttgaatcttcgcgtttaacagtagtgtattaaagtacggaactttaatatagaataatcaagtacggtttactaagtgctatactagtgcgtgtgattttaattcgaaacacatatgtggatagacatttagtatatgtactgtgtataatttgattatacatgattgacccgatatgaactaacatattttatcaacatattgtttatcataaaagatttattcatattaaaatgatgatcatcagtagatcagtctgaatcctgagtattcatgaactcgtatttgtgttcattaggttctcagagaagatgattcttacaacttctgttttgggaacctaataacataagt

SEQ ID NO: 103103 - DNA, 540 bp, Cannabis sativa
aatatatataattattatttatcctaatttttgcactatgactgacattggcacccacctgactgactggatgacacgtgtcttacatttctcaacctggcggaccattttactcctagaggcccttgaagattaatatgatgatccaagttgtacatacatagtaggatgtccgagcagagtcattggtggacatccgaccagctcgatcgtgtgatcaactcgcatgcaccgaccaagagatgtgagttggcgattccagcagtgatcaacactatctccaaacttgcataacacgaagcgaaccctatttttgtgggaatgatttgcacattaagagaataaaggcaatcaactaagaaattgcccaatttcttcattgtaattatagaaacatgttaatttcctattttatttcttatagattaagggaaactattcctacgtaatgagctcttataaatagtggtctcatctcactatttagggatagaaaattaattagagagaacaactaagagagaaattacgatctaagtg

SEQ ID NO: 103104 - DNA, 547 bp, Cannabis sativa
tctcgcacattattatttaattttgtagcaacagtaattttttattaaaaaataatgataacatcaatgctactgtataacattcacacatattcttagaataatattttttttttcttttaatggtatagcatctcaacattttactactttatctatccacctaagctagcatcacttaattttttttactattggagatactcttataaagtacggtggtacgagtaatgttattggacaccaatgatgtttactgtctagtattttttagatgtgttgccttataattaattagcgatattctctaaaaattattacattaaactatatgagactcgatatttagttagaccaatagcaatattaagtactattagtatcttttaacatttctctagtagtatttagtatcatttattggtattgctttaaaacttaattaataatattctataacaattattaaattaaattaagtgagactcaatacttaattttaccaacaataatattatattttaaatagtgcttttagcatttctct

SEQ ID NO: 103105 - DNA, 532 bp, Cannabis sativa
taagttcttctatttatatttttaatttctagagtaagttttattatattttttttaacaaaatgatgatgtggatgaatgagaaatggatccgtggtttcattccatgatgggacaataatggtagttaattgagaaaaaggaagaacactttaaaagtgagttttatttatatctcataaaattataactacatcataatattaaaaaaaacaaataattaatttttaaaaatcattctttaacatttttaattttttatgttattttgtgttaattttaatatttactttaattttttttatatatatttttaaaaaaagtatacttttttttttaaataaaatttcatcactttttatttattttcttaatatttaaagtatatttttaatttttatgttacatgtatattattttaagaatatgagaaatgaaaaaaattaatataaactaaagatatatatttcatataaaataatttgcttttaaaattaagtctctttataaattttaccatgcaaataaaaag

SEQ ID NO: 103106 - DNA, 1155 bp, Cannabis sativa
cttggttttctttttcggttttaaaatttccttattattttagagcattcataacaattgttttaaaataaagaaattttaaaatatttaaagaactgtactaaaaacatactacgtagatgtgttatatttatagaatattatttattgttttaaatgtactttattatttgttttgagttttattacttatttttgtatgaagatatatgtatatattaatattataaatttaaaatgaatagagtatactaaaattaaaaaaaaaaagtaaagttttggtgatgtattttttttaaaaaaattgagactatttttattgaaagatttgaaatttatgttaaatttagcacaaaaatgagtttgtgctatatttggccattatttaatatttataattgcattgtgcttcaatgcgcaatatgtaaaataataaaaaaaattaattaaatatattgatgtatttaatattttattgagaatatacaaaaattattactttttattccttattatttaaataaatggtaatatgataaataaagaatttaaagtttagtaaaagtcaataaattataatatttagaagcattataatataataaacaaaaataacaattattgtggattaaatttgacacaatgttatatcttgcgtcaaatttatcacaatttttaacatgtgttaaatttagcacattttttagaacatcattggagtattagttttttttaagatcatatctaatgggtggtgtaattttgaattaaatttagctcaatttttgtatttgtgctccaatgcataagatgtaaattagaagtcaatactatcattgatgctcattgaaaatataaaaaataattaattttatttaaattattttaatatcttataaaaatattagttaattaaaaaagtttgtatttattgtgggctaaaatttgacccaaactatctttcgtgccgaattggcacacattttacatcactattggattcaagttttagcaaaatattttaaaaatggcaatacaccatatttatatctctccataagtgtgctaaaatatagcaatacattacctttttgacactccattggagatgctctaatgtatggtgtaaattaaaagtgtgttgtaaaatagaga

SEQ ID NO: 103107 - DNA, 658 bp, Cannabis sativa
aaaaattatattaatttctaaaaaagttttattaaatattttaattgaaaaattaatttagttaagtctaaaaatagaaaatttatctgttatagtaggttataaaaaagtataaccatcgtgattacatttttattgtaaccattgaatactcaaccttatatatatttatttatataagtgagaaaaaaaaaagacacccttagtctttacctttccttaccaataaaggcttttccttttgggcatatattaatatcatcatattatcacttcttctctagtggatatatcactcactcactctcccctgtcatcatctctacctacttctaacccactcaactttatcagaatcttattccaataaattcaaaattatatatttttggaggaaaataaatagtggatcagaataaatccaaactccacactttatcttctaaattaaaatcaataaaatgaaaataatttcctctttctttgtcatccaatgactatgaggtttatcattatttaaataatgaaagaaattaaaggtttttttttttggataaggagaaagaaattggtaaaatactaaaaataatttttagtgaatagcttattcttataaatagtaattatatcctaatgccacaaactaaagatataattt

SEQ ID NO: 103108 - DNA, 806 bp, Cannabis sativa
ggtaaaatatttccaacagtgtggtatccaataccactgccaaaaaccctagacatccatcttgtaataattctctagctttcaataccgagattattggaattcgagatcccttaaatgatcccttaaatacaaatggttcctcacccttgggttggaagatcaccatcttctgcttacaatcaatactacctgaatatttggacaagaaatccattacaattatgatatcaaaatctgctaagcccaattctaccaaatcaacactcaactccttatcctcaattctgatcgacatagaccaaacccaccttttggagataactaattctccgccaagcagtaaggttccaaaccctttctcataactatcatacggtctacccaatttatcaaaaattctgggcgccaactaggaatgagtagccccagattcaaacaatacagagaagtaagagttgttgactaagagctgacttgtaacaattgagggattggcttctgcgtcgtccgagtaagaggaaacacccttgctagagcgggctttggtgctaccttctattcttctttcttgagctgcggacaatctctcttatagtgtccaggcaaaccatactagaaacatcctcgcccactacactcacccagatgatgcttcttacaacggggacattctaggtaagtatattgggtttcagaaccaccttgatggttgcctcgaccctggttgtctcggaacctcttgttctgatttgagccaccaagtgcagatggtgcccttcttttctggtcagtggtcgaatcac

SEQ ID NO: 103109 - DNA, 542 bp, Cannabis sativa
aaaaaaaaaaaaaagatgaaaattgttataaaaatctttgtacatgaaagtaaaagggaaggtgagaggttttcgatgtaattggttcttattcttgaagtaattcatcaagactcgtttggtacgccgtataaaagtcgtattatattaaataacaaataacactatgtttggataaaataatgtattgtattaattattacgaccaaaatttttaatacaatgtatgctgtattatttaatacataacaaatggtcagtattataatatttacaaaggatttggggtcagcacaaatctttgacccaaactcaaattcaagacccggaccctgaaccagaacccgagaccaggacctggacccagactcggacccagacagggacttgaacccagactcaaacttggacccgggaccaagacccgggacctggaccgagagccggacctgggacacgaggcccaagcttggatcgagaccggagacctggacccggacctggacttgaactcggagcccgacccgaacttggacccggac

SEQ ID NO: 103110 - DNA, 520 bp, Cannabis sativa
aatattttcaatgtgggctgtataaatgttgattgggccggcccatagtaatattgtaatattttaccctttttgaaattttcctattttttttccctattattaaagttcattacgaaaaaattcatatcaggtattaaataattaactacttattatatttatatctctataatcatatgagaaaaatacttaacatgatgtatgcattttagagaacaatatctgcaaaattattttaggttagtatatatatacctctataaacacaattcaaatattaaattgattaaaatctaaacaaataaataaattaataaaagttggaaaaaaaaatatgtgatttgttgaatgcttactggaattgcttgatcacttctcataaaaataaaaaacttgttatactctatattatactcataaaaaaataaagattggatctttagcttaaatcaataatttataaagtaaagagaacatatagttaaatcaaaaaataagagcaacatgaatcgaaatg

SEQ ID NO: 103111 - DNA, 555 bp, Cannabis sativa
  modified_base (193)..(193): a, c, t, g, unknown or other
gatactcacttctcaaatatcgcgtcgaaatcataaagcagttaattaatggctaggcaattaaaagtaattaagcacaaatgaaatagaatacatagaaattaaggggaaaataaatcatattaaaaccataaagcaatgtcaaacaacatccatctagaccctaagcaagtgtttagctacacatgttcanggaagcaaaatcacacatattaacattaagaaagagaaaaagatagagaatatattgaggttatttgagatgttataagttgttcttgttgattgttgtggtgattgagcaaggtttcagtttatgaactcaagctttgttctctaatggtggatttagtttctagttgttatggttggttttattgcatgatttctctttgtcataatgtaattaggtattctggaagttattgtaaggtttgggtttgaattgaggtgtgtagaaggatttgtgtgtttcttgcactgaaccggaattccagttcagggggacctgtgttggaaattattttaccatgatctatttactatcatgtatgt

SEQ ID NO: 103112 - DNA, 569 bp, Cannabis sativa
tttctagacttgcgttagtgctagaaaatctactgatgagatggtgattactctggggttggagcagtgattttggagaagtgtaaaaaccgatctgaaatctctacacttactactacaaaaatgacaattcacgacggtcctaaaaatgatttttttcgaggaccgtcgctaaaaaaattgagccacaatttaaaatcgttgagaaaaatgagtattcccgacagtttggaaccgtagcaacaaaaatagaagatatttttggttaaaaaagaaaaattaaataaaattaaaaataccccctatacccgacaatttaaaactgtcaggtataccccttatatatatatatttatactgaatattaagtattccccccaattctcatttcagcaacctaataatttttagcaaacccacatttcagctctctctcttgctgccccctctctcctccctctctctcttgctcgagcaccaccaccacgacgacgcctctttcgtcctccctctcacgagcaccaccaccacgaagggaccgcgcctccgtcgtccctctctctctctct

SEQ ID NO: 103113 - DNA, 592 bp, Cannabis sativa
gatttatatcattgcgagatagaagatctggaatttggtcatctgcgccactcatttttatagaagaaagtagagtgacatcattagtaaatgatttgtaaaccttcttctccaatgatatatattaagcaatttcttaatgacaaaagctaagagaaaaactaaaaaaaatatctattcaaataagaatataatgatgtcccagtaggtgagagtcaaggttattcttattttataaattctttattgtttcagctttgtaaacactagtctaagttgtcatcgttagaatgagtcaactagattttgcatttacaaaatacttatttgtcgagatctaatactattatgttgtctaacagatgacaatctattaggaattgttccattaaaagtaacaaatcaagttatactaacaatggaaattcaaaattgtaactacatgatcaataacaaaaaataatataggttcaatataaattcatacacaattcaaaaatttgtaaacatttatcaagtaatgaagacaagaaaatacaaaacaaacatatctcaaatatttctaaaattttcaactagtttttgctaagct

SEQ ID NO: 103114 - DNA, 622 bp, Cannabis sativa
atattttttttgatgaataagaatttttattgctccaaaccaatctttcacatcactaatctttacattttgctgacaattttacacttacaacttagcatttttttcataatcacgctatcaaaatccatgttttatcttcttccttggccttcttggggagcaaccccttaattaattctgagcttgctcatttgctgagatttcttcaccgtagtattaatgagccacacttgttgattccatagtacttcattcctagcattccatatgtaatacacaagacttgcaagaacagttttcaccatactttttcttgctgcagagaacctcttcgtattttgacatgcttgcagcagctgtttgatgtttgttgctggtgtgttccattgcagaaactgttttatctcttgtagacattatctgctatagtcacactcaaaaaacaggtggactatggattcatcttcttttccacacaataaacattttgtatccatgttatgagtgtatttgatgattctctctttcgtgttaagtctttcccaaagcaccagccaaagaataaacctatatctaggaataatgagtctatcctaaactagattaatccaaggcaatt

SEQ ID NO: 103115 - DNA, 690 bp, Cannabis sativa
gagaaataatactactcagatcactagaggtgggacctaaagtagctctcttaaggttacaatgtaagaattagacatgaaaaatctctagttaagagagaagcaatggtgggcgtgtgtgtgagagagaaagagttcatacttagcttaggatttgccacttatgacttagaattcagcttagggtcttagggtttagttaaggctctttatgtaagagcgcttaaatcctttaattaggtaaattaagcatatatttacatattaaattagtaaaatataaatgactaaaatgccccttaaaaatagatattttctctctatttttgtgaactgttaaggcccaattcgcagtctaggttgttaaccacgcatgaagttgtacaccaaagtcctactaggccaatgtttggtcagccatgcatctgtaggatgtaggctacctggccttgtgttgtccagaagttggccggcctatgctggccatagggctgagaagctggccggccagcctccttcaggtggttagtttgtcattcgtcgtctcgtttgagtgtcgagactgcctattagttgaagtgctgagtggatgatttagccttcttattgctgagctgtactacacgtggcactgatattggccacgtagacatgccacgccagttgggaaaaaattggaataacatttgc

SEQ ID NO: 103116 - DNA, 528 bp, Cannabis sativa
  modified_base (501)..(503): a, c, t, g, unknown or other
ttttttgcctaaaatttattatttttgtaaaaaccccattaactaaaccaatggtctcttacaatagttgatgaccaagttggaaccattaatgcctatataaaaggcctaaactttataattcaggtaacacaatgttggttcaacttacttaagacaatgattaattcaagtaacacaatttaaattgaattcacttgatcaccattgtctcgagtgagttcaaaaataaagttgtgcttctcgatagactgtacaactcattgtgtacggaatacggattgtactttgtgaatcttcattgttatcatctcaataaaggcttcaagcccttatgactgttctggcccaaggaataggcaagttgactcattatcactcttgttcgaacctcgtaatctctgtgttcaagttcttatttgaaaaatttatataatatactaagttttgctatttttttataaaaatactgttaggctgtattttttacttttttactgnnnttttttataagtttcatactgcact

SEQ ID NO: 103117 - DNA, 609 bp, Cannabis sativa
tttttaaaataatatataagattcatatactcaaccaaacaacgggaatatgattatatatattattctacacaaccaaacacagtttacacaattctctataatgatattctccttcataatattccttataatcaatttattttgaacatctcataccaaacgctcactaatagtaatattacaactcactactagacactataaatattaaataccctttaaataattctcatctttttcatttggtttctaataatttttgcatattattaaattactttgtatcatgtattttttttctaccccataatctcaataatttgacacactttgtctgccagtgccaccatatatatatatatatatatatattactatttattagtctcttgttcataattcccttaaacagattcctgattacagggggcttctattaaatggttctatcattgtctatcgatctcagttttgtccaaaatgaaggaactttaagcttttgtgatgtcgtgttagatgtttgtgtggtcatatatatatatatatatatactagattaaagttacgtgcaattgcacatatttaattatattttttatttttatt

SEQ ID NO: 103118 - DNA, 918 bp, Cannabis sativa
aaacggtctgctaacaaagtcgcgcactgtatggcacgtagtgcttgttattggtcaggtcatcgttttactgagagcgatgctcctgtttctcttcaggcctttgtattagcgaatgttactgtctaataaaggttattttcattcaaaaaaatatttaaattttaattaattttttatataattaagagtaaagtatttttgaaaaattatgtaaaaaataattaaaactataaaaaatacatataatttaatgattaactcaatgattgtaaaaagtaataaaaaagtgaagttagagttcaacccgtttaagaaaacaggttgatccatttatgaaaacagatcaacctgaaaaaaacacgacacgagttcgagcacgatacgaaaatgtgagcttataggccatatcgagtttaccctttaaaatattgacacagcacgacacgacacgacttatatctttttatgggtcgttacgatacaactcatattttgtaggcttttcataatatgggtcgggttggcactatacacatatatgtatatatatacagctatatcactattgatttaattaagtatcatgtgttatataatttaatgtaggagaattctatttgcaccctataaatgataatgacactccaatattaaaaaaaaacttaaaaataatttttaaaaatcactattattatttatttttttcctcacattcttttgtattatttttgttgatgctgaaaaaatggccaacaccactagattggtgagatgaatatagtagttcactatccatgtcgcgatagttatagagctacgtttacttcgagatttaatttatttttcatgagatagtaattacagaaaaaaaaggctaagtgtttaagctcttgtttgtagagagagagagagaga

SEQ ID NO: 103119 - DNA, 534 bp, Cannabis sativa
agagaagatataaattagatttaaatagggagctaataattaggtgtagctaggcattaattttgtctttagtctatataaatatattttgtttccattattggaaaaattatatattcgtaattagaacattgttattaggcaccagtagtgtctagcaccttctcgacatgtctcgtagcgattggctagcgatacttcttaaaaactattatattaaattatatgagacccaatacttagttggaccaatagcgatattcacacataagaaggttctaggcactaccggtgccttttagttgtaattattataaatataactccaattagaaaaagttgtgacaaaagtaatttatattatgattttgtttcaatcctaagtccttctagctggtaaatatttgtttattattaataaaaaaaaaaactaatttactctatctattcaaatttatatatttttaattaaaaaataagataaataataattattttatatgtagtttaataatatgttaatagacaaaagaa

SEQ ID NO: 103120 - DNA, 536 bp, Cannabis sativa
attaaattttcacacatattataatttataataaataaaatatatagctctctaaatagtttctaatattacaaaaatatgtattttttttagaaaggaatctagttgtgaggatatttttttggctgaatatataaatatatatttatattgtttgattaaattttcacacatatcataaaatataaactatataaaaaaaatattttttatcataataaaatttgtgactaaaaattaaaaaaattgtgattaattataaattattattctatatcgtgactaaaatatccgttacaaaaatcacaatttattatgaataagcatatttttagtaagaatatttgttatgactaaaactaaattagtaacaagttgtatctaaatcctatatatattttagtcacaagtattttttaataaaaaaaaattatattataactaaaaaattataattaaatattaaagcaatatatatatagggatatgattttgttctgttattgtactttcactgattgtaattcgtgatgtac

SEQ ID NO: 103121 - DNA, 604 bp, Cannabis sativa
ggtcggttctcattggattggatcaatttatgcacacccctaattaaaagtatatcaaaaaatatatctttttacattatatcaaaaagtatattaaaaatatataattcaaacttgactttttttatctgtcttcaacacattaatataaaaatgagattttttttaattagatagcaaaattaaatatagaaactcaatttattcaaatagtactcattcatgggtaatacccattaataatgcacctacatatttatatataaaaattaattaatgacatattaataaaaatttgcaaaaatatggcttttcgatctcaaaaaaaaaaaaagttatttcatgagaaaattttagaaaaagttaaaaaatataggaaaaacattataacgtaactggttaccctagggtatgtagttacccttacggtttttctttttctttattttattttcaacttttttttttttgaattttttacataaaataacttttgcaaaacaagccatatttttacacaaatagtgtaaaaaatcgtaaaatctgtaatttcttcttaatataatgtaactaattccattcatatatataaagcttaattaat

SEQ ID NO: 103122 - DNA, 1012 bp, Cannabis sativa
gaaaaatggagagagatgaaatcacaattcaaatgatactacaatttttttttttttaaatcacaacactaaaaaaaaattattattaattatataaatcatcattcttacgttgtaactaaaaagttcgtacgtgactaaaagttttcatcacaaaaattataatttattgtaactaaatatatttttagtcacaatacgtattgtgactaaaactaaattaatgacaacttatatctaaatgctatgttttagtcataaataaaataagttacaaaaatttatattgtaactaaaaaaattatcacttataaaggtaacttttttttgtagggtgagcctgtgtgtgaaatgcttcatttatattagtcgtatattgctaattctgagccctgattttttacatgataatattttagtacgtagcacaattattaggcaactgatatacaacgtaagtgcaattatgcatgctcaattatgtgattggatatcattaagaaaaatttaacaaaattttattgcactgatgaataattaataacttgtacgttaagaatattttatgaagaaacaatattaagaacaatgtaaaccaatgtgtgatatcaatcaatgttaaaatatgaacatactaaccatattagaaatatgttttctctacaactaacataattgtagcagtactatcagtttgtaattattaatacatcaattatcgaagagttaataaaacgaatgaccaactgtattgcaactatatatataaaataatgtttccaaatctgtgttaaaaaataaatgatgaatgcaatcagaattcaataaatttagtattaaaattttgaaagaaaaaaaaaacgttaatgtaacagttataatattgtagtgatatatatatatatctaatcattataccttgaaattccttattttaatattttcagtttaattatttaattaagtgaataattaaatgcggaataatgaaactagtactgaaaacagtttt

SEQ ID NO: 103123 - DNA, 632 bp, Cannabis sativa
tgacaccaaataagggtacgaggtgcaagaccaccttatgcacctgcggtttgcaactcaaaagcgacaacttgtctctttgggaccactatgtaactcaagctattaaaacctataaataccccattctgaagtgtgagagggggttggaaaatcaatcttgtaactcatatagtggatgcaatagaaagaagccctcacttactcaagaaatctctgccattaaaacttgtattttagtttatcctcatcttgtttctgagttttacatttagattttggttttccagccacatagttagttgatgagttcttatcgtcaacatttttttattattattttttttttgctatttttatactatttatatatataatttgaaactttaaaataatatttttaaaaatattgagtaagtaaaaattgaaaaaatatagggtcatcgagtgtgttaatcgaccttcggcttaaactatttgggttagagtttcaatttaataatgactaagagcatctctaaataaatgattaattgcaaaatataacttattttattaaaaatttactctaatagtgcgctaaattatgatgtaaatatatcacataataaaaagtgatttaaatttagatc

SEQ ID NO: 103124 - DNA, 620 bp, Cannabis sativa
  modified_base (31)..(31): a, c, t, g, unknown or other
atttgagagatgtttatgtcaattttattanacgttctgcaaatagtgttgctcagttcttagctcgaacatcttatttagttgctgatcgtgttatcaggaataataatattactcaagattttaattggatatggattttaattaataaagacgatgattttatttctaaaaaaataataattttggttgaaacatagacttttcaacgtgtattttagggccaaaagattagagagtatggtcttgtttacgtgtttttggttggttgacttaataaacgtgcctcagtaacgaaatttaaggtggtggtcctgctccataatctatgtcacgggtgagcgcactgggcatgccccacttacttataacaaaataaaattaaaaattatatattcattggacattttcaaatacgtgtatttataaatatttttaataataacctgggattaagtattgcctctggcgccgattcaattatatttagaaaaatttatatgatatactaatttttgttatttttttacaaaaaaatactctaaggcggtatttttttacttttctactgtgttttttttataagtttcatacttcagtatactgtgttaagttttcac

SEQ ID NO: 103125 - DNA, 514 bp, Cannabis sativa
ccacaaggcccattaattattctgataacacttcttctcatttcattcacaaaacaaaatgctgacaattactgcggtaagtgttttaattttttttttagttatcaaaaaaataaaaaaaaaataataaaaaagagtttaatttttttaaaaatattatttattagcttagcttttctatgtggtggattatgctgagtcagagcttaatacaaaataaactcttatcactttgtgatttaattatatgacaatcaacttctactttaatcattattaatattattaatttgttattattattaggagatagtggcatcagatatcccaattacttggattaacagtttttatgattaggaaaaatatttaaagcatatcatttcatttgcagtcgccataacattattatctcatgattgatcattatcttctacactggaataattattctgttatgattttgggaagctatgatcaacttttgtcagtcagtcaattttttttttttttt

SEQ ID NO: 103126 - DNA, 632 bp, Cannabis sativa
tattgtatagaatataattcattacaatattatacaatacaatacggggtaatacgacataccaaacgaaccctcagactttaatatctaccaatcatgcttattacactttaacataaactaaatcatatcccccaaattttcatctatgttagacttttcttattaaaattgaacaaagtccttaaattcaacaatctcaataatttaggaaagacttttaacgactttaaaagtttaaaaaacataatttagtacatatcaagattcgggaatcaaaattctccaaaaactacttttaaaaaattattttaaaaataaattatataatttttaatgtactcatttttttttaaaatataatattcaaacaatttcaaaaagtatctttcattaaaaaaaaaatcacataatagttataaaaaaaaaaaccaaaatttatacttattttatatttttaattataaataaaactataagtaaaattaaaaattttgccaaaaaatatgaacaccaagattccaagtaactataagcctataaccatatctattgaaagagaaaaagttgaatgtgattattggtcaagttggtggactaaattaattattttactttttatagtttatata

SEQ ID NO: 103127 - DNA, 746 bp, Cannabis sativa
  modified_base (98)..(99): a, c, t, g, unknown or other
  modified_base (224)..(227): a, c, t, g, unknown or other
tgagaagactataaattaccatagtaaacctgctattgcataaaaattgataataggaagataatcatattaggtcataatcaatagaaacaattganntcgaagccctagtttttattaacaatagaaatttttattaactgttaatttccttaaattgtttctcctttcactgtttttattattttctagttttaacctattcttaatttttatttaaccannnngaagtaaaagtttaattttaaagtacttaactacaatccctgtgggatcgatctcactcctggtgattttactacttgttaatcatatgtacactcgcgtgtgcaaaatatcacaacaagtttttggcgccgttgtcggggattgatagttaatattagtaaaaattaaattttgttctaatttggcttttttcttttcaattatagtactaactctgtttgtttcaagatctttttttttcttcaagttcactagtttatgagaagtcaaggtgcaactgacatattacatgttgatcctgaaatagagaaaacttataaaaaagagtagaagaaggaagaaattggaaagcgctgcaatcaagattgaacaagaaggagtcatggctgacaacgccaataatggcaacaatggaggagtggtagaagaccaggttgatggtcacaacaacaacgaccgtagcctaagggactatttgcttcctaacttgacaggggccagatcttgtataagaccac

SEQ ID NO: 103128 - DNA, 660 bp, Cannabis sativa
cttgtcacatatgattttttcatcgcgattgtataaatctattttcttatgacatgcgtcacatgacatgtaataaaaattctggagagtatcagttatattaaatgtgaaaatatatctcaattaaatacgactttaagatgagtaggatcaggatggaactcagctgatgctatcacctttgcaaggtatataacaacagatcaaagtaattccaatatattaatgaaacaataacacaaatagttattaatatcataaaatatcccactttattttctaactacattaaaaaaataaagtatacttttaaaaattttaaaatatttttataatatttttttacatttttttaagaaaaaaaaattaattaaaaaaataaattaaatagaatagaattacctatatgtttgttgatatgataaacaaaatagtaaccttcatcatcacagttgatccatagaaagacgtgacaaggaaaacttgtgtgatattttgacaaacaaagtaatgtttagagcttatgaaaatacaaatacatcatggaaaaaaatcttcctctaactaatatataatatgacaaacttcttcaaaagaaaccatagatgaacctttatcatagcagaatagaagcagagtacaaaaatgctgctaggctaa

SEQ ID NO: 103129 - DNA, 544 bp, Cannabis sativa
cattggtttttttttttcttcacaaatcatatatcttttttgaatatatatgatgatgtctaaaagtgaagacattattatttttttcttttgggataattacataaaaaacgtttaaagaatttttttacaatttttcaaagaaataatataaaaacaaaaaaaaaattatataaaagtaatatgaatataatatttaaataatagtaaaaatagcatacaaataataaaaaaaatcaacaacaaattaataaaagtataacataaaaatactttattttctgtaaataaaatcaaaaaattgtaaaaatatttaaaattctgtaaaactatatttttataattttttatttttttatttgtgaaattaaaaatatcaaaattattcataaaaaatgaactacaaagacttgtttcagaaacttattaaagattgacagggaatctcgggaagcatttacgctactaagttatacaataatattaatatatatttctttgatataaataatacaataatatattaatgtaataagttatacct

SEQ ID NO: 103130 - DNA, 527 bp, Cannabis sativa
tgatgagtatgggatcaagttctttgaaactgtaagtgctgtacagcttgtgaaaatctgatgtgcaaattttgagtttatgtattgtgttactgatagtctaaattgtacatatattgcagagtgccaaaacgaatttaaatgttgaacaagttttcttttcgatagcaagagatataaaacaaaggctcgctgatactgacaacaaagccgaggtacatttccaaagttttgtttctggtcctgtttgtggagcacatatatatcttaatacacatttggggttctaatataatatattgattgtgtgatgacagccctcaacaatcaggatcaaccaaccagaccagggtactgggactagtagtttagctgtacaaaaatcagcatgctgtggttcttaagctgactaatattatttagaaagtgggggaatgcattattattgcattatgctttggaaattggaaagaggaaagaaaactaactgtatgacaatatgatggatgcttgtagtctaattgtca

SEQ ID NO: 103131 - DNA, 510 bp, Cannabis sativa
  modified_base (477)..(485): a, c, t, g, unknown or other
atacatttagtcacaacaaattttaattttgtgactaataattttacccacggatcttttaataacaacacaataatagtaatttataattagccacaacttttttttatctttagtcacaaaattaattgtgactataattaaaattttttatagtggatggtgattgaaaatcaagtaaacgttcctaacctttaattttaatttgaaaatattttttttttatagattttattgttgaaaaacctattaatattacatataagcaagcgtaggattaagtgggtttataattaaaaaaaaataattgtttaattttaaggttttgtgggttttggggcttggctgcgacaatgttaaaggatagtttcaatttagggtaaaaatattaatttttttttttaaaaaaaaataatacaacttcggttattgttattagagcaatttgtggcgaaacccccttatgttttaattttnnnnnnnnnaacccccttatctttttttttggtg

SEQ ID NO: 103132 - DNA, 531 bp, Cannabis sativa
  modified_base (358)..(359): a, c, t, g, unknown or other
gtcagttgaaagataagatagaaggtctcatatcacaaggacaccttcagcaatatataaaggggcaagatgatgcatatgatcagttcgatctgcccaataactcgagcgactgaagattataaccctctttcgtgagaagaagggatgctttggttatctcgagagggagcgggtcacaagaatacaaggggcagttactctagtaaagaaattgtgtaaaagaattgcgatgcgagtagatatcggtccattgtggttgtcatatcaagctgacacgtggaacgctggacgtcaaccagtagcagtcgaagacatacaactaaaaccatttacctggaaccccggtatatgtcanngattgaccctggatattgaaacaattgtgggagaatgttggggattgaccctagacaccaaaactcgtttttatcaaaactagatgctcctggaagattggtaagataagcaattgaactggggaagttattttgagattaatgattttaaatcacattactgatgaaatat

SEQ ID NO: 103133 - DNA, 653 bp, Cannabis sativa
tccctatgatattagggtttaaagtatatctttgtcttttagtaagggaaaatgtagagttagtataatctactaattgattcagggtcaatttatgttaatccttataaatttcatttttattcatccatatttaaatcaagttaacaatctttaggtttcattttatttatccttattcaaattaagttaacagttcaattcgtaagaagaaaatatgtataacatacaacattaaaaaaaatgtatatacaattataattaaccctaaatgtctccaacaaggacaccagaactaattcagtaaaaaaccagaaacagaatgatagtcaaagaaacccttctacccactgtgtgcaataaaattgcattaccaaagcctcccaacacagtttcttaatcttgaccaaagctcttgtagattaacactgagccggtttaaagttgaactctctcacaacttggatgttatgggaagctgaccttcctatagcttttaagcaccaccaagttaactgctgcagcttcaagagtagaggcctctcccagcgccgctgctccaacagagtagttgccatcccggcggaggctgtagtcatcggggagtcgctgctcgaagatgaatagcatagtgtatgtgatccattatctac

SEQ ID NO: 103134 - DNA, 589 bp, Cannabis sativa
cacatttgtagctatggaaagcaagagcaaaaatcccaatacaatactaatactcatattcattctcacacatcacacactataagataatatttgaaatttgtgggttttgccttaactgatagctagtattctatttatagcataacatgatgagttatttaatatttttaataacaagaggaaacttttgatgattcttttcacatgaaaaaaatttccagctatttgattgacacataaaatgaccaattatataacttatattttggggttggataattcttctcaaccatctacgtacgtatacgtctacttatttagatttttgaattatattatggtttaatattaggggaattattctatatacgtctacgtacttatacgtttacaaataaaaaagcgccttaatattaataggaggaaatgtatataaaataattctaatattcgaaatttggttttattattgttcgatgtgtaccacaaaattaataattttgaatcttcttcttatatgttatttcacatcaaaatatgtttattcacaaataattgaagaaaatgaattttcctatcattattg

SEQ ID NO: 103135 - DNA, 691 bp, Cannabis sativa
tgttgcctatgtcaaagtggtttaacacttcttggtgaaatctctattatgtttacctcctttgaacattggaggtggcttcctgtaatggatagtgttgcaagttgccaaatagatattttctcttgtatgtatctggtgagtatattcaatatactaggattcgtatccctccttcttttcatggatgactctattttgctttggaatttattgtttctttttcccttagcttgctttaccctttatttgggaacctacgtttgttgttgtggtagagtttttctggtagcaacattgaatctagtttgtgtttccccgtagctgaagaaaatagtctacgaatgggcatacccttaggcaatctatccatagcctgtaggtctagcaaactgcattatgagagcacaatcagcaatgatagataaaagttagtagagaaataatacaatacatctgaatgctatctcagttgtagcaagtgcttcaagagccacctgaactcttgaagataagcctcttctagttttatgattccttaagcctatgccaagaagccaaagagtgactcaactctctttcgttgtatttcattccaaagtaaggatctggatctaatccctacttgtagggccactagcttttgttcatctgactttcttcttcgatgttgcttccgtgaatgttggat

SEQ ID NO: 103136 - DNA, 531 bp, Cannabis sativa
tctcgcgagtctgactggattccttgcatccttgcacagaagcacagaacaacctattcccctattccagcgggagtagggaacttcatcgtgagatgatagattgacgtcacaatcttcatcccttttagaattgaccgaccgatcacagcattgtgtgctgagtatcggtcgattactgcaaagtcagccatcgacttggctactacaagggcagttcccaaggtgatagggagcttgatcatcccttttgatgcaatgacgtcgccagtaaaactgtatatactcgatgttataggtcgcagatccttctcatgcaaccccatctgtttgaaggcttggaagttcaagagattcacagaacttctgttgtccacgagtatacggtggacgttataatctcgcatgactttccatgaacgtgatgtcgtcaaacttccgatgaccaatgcgtcagaatgtgggtggcggacccttcccgcatcactttccatgaacgtgatgtcgtcgcactctctcttgaacaacttc

SEQ ID NO: 103137 - DNA, 518 bp, Cannabis sativa
tgctatggtcttaggatgtttaatctatgtgatggtgagcactaaaccggacatagctcacactctaagcatcctaagccaattcatgtccaatctaagcattgaacactggaaggccctcaaatggttattgagatacttaaagggaacttgggattatggtctaacctatgagtaagttaaaggagaattataattcaaagggtttgtggatgttgactatgcctcgaacagagataccaaaaagatcaaccacttcctacatttttttacaaaacagaactgtacatgttggaaagcccagttatagtctgtggttgccctttccaccacgaaagcagaatttatggtgccacggaagcattaaaggaagcgttatggcttcaaggaatttttttgaattgaagcaattaaaaggtggagtgactatgtactcggatatctagtcttccatccacctctgcaagaattcggtttatcatgaaagagaaaaaatatagacataagactctactgga

SEQ ID NO: 103138 - DNA, 572 bp, Cannabis sativa
tgcaaggattctgtaggtgtccatatttcatggtgggtcactcctttatatacaaagcaagtgtccgattgtttacacaaggattgcattcattgtcaagccgtttgtacattgattaataattaaactaaaaaacgtaaacatcaataaatgaagaacaatttctattcactaaatacaacaacgtatgcgacttataatgtgcgagttggttgttcttattcttgcataagctagcgggcttagaatacttaacacttagttgagtctaagatgtctgcgttcttatatagtcgcacttacggacatcgtataacgagctgatagaaccaagacatgcgagtatatattggtttatcgaggatgtgagtcattaggaccagctcgcatcatagagaatcgatctctattgcaggaggattaaagggatactcgcatatatcctggtatatgcgagttaaacccgttccttggtcatgcataatgcgggtcgtacaaatgcggctagacccggtcatatccacatcatctcgctgagtctagttcaagcgaggtttatactcaagtggtct

SEQ ID NO: 103139 - DNA, 1018 bp, Cannabis sativa
gtgcaagggccaaacagtatgctcatgagcccttgaatcctaaagatgaggctgaggaagagcatgtgactctgctcaaaagcaagaaaaaacttccggcccaatccaggcctgttgaacatgcaattcgcattagggagcccatttcacctgctcggccatctcctcccgtgctgggaaaagggaaagccatcctggcagaggcgaaagacttgtcacgggatggtggactgtcgagtcttgttggaaaaattgttttgcaagatatttcatcttgtttttaaactctttggctatcatgctttatgcttctgatgccttttatctctaaccatgctgtttttatttcgtgcagacatgtctcagaagatgcttgatgccctgaagaagagacttggtggaagctcaagctcgtctccaccggccaagaaatctaaaggtggtgaggcgacgccttccgaggaaaaggcaccagctggagaggttattgaccttttcgaagagctgattgttgcggacccttccactccaaaagttgcgaagtccaaggattctcgaggaggaagctcgaacaggcctgagtaatcaaagggcggatctgagctagccaagagtggacctgagcaggtgcaggctcctactccaccttttctggtgcttccagaggccaagaaaggcagagagatgcttgctcattacatgaactagttggttcctgaggtaagtgagcagctggccggtgctgataacgagtcttgcctggagttgctaatgggaggagtcttgaaggaatttaccagggtaagcctttgttgatagtttcctttaattcttctttatttggttcagaccttaaagtttttcctctatgttggctggtctgaagttggcttacacatattcctgagctaagtctgctacttcccgtaacggggctttttccaagaccatgagggcgaaggtggacttggccaagaaggatgctgatgatgccagggtggaactgttgggttttatg

SEQ ID NO: 103140 - DNA, 521 bp, Cannabis sativa
ctggtgctctcttgtatctccacggctacatttcaattcaacttaaacggtaaagttgcgggccgtgtttccccctctagaggaattcgccaaggtgatcctctctcgccctaccttttccttctctgtgcagaaggattctcttctctcctgcgtcagaaagagcgggataagtccctccctggtattaaagtagcaaggcgggccccggccatctcccaccttctttttgcggatgacagttttcttttctgtcaagcttccattagatcttgtaacgtcatcaaggaggttttggacgtgtacgaaagggccactgggcaaaaagttaacttccaaaaatcctctctgtacttctcgcctaacgtagaactgagggaccaaaccttgatttctgacttcctgcggattcccgttcgcccatctttcgaaaaatatctggggctccctcagcacataggtcgaacaaaaaagcaactgtttcattaccttcatgacaaagtttggggccatcttcataa

SEQ ID NO: 103141 - DNA, 838 bp, Cannabis sativa
ctgacctgtcacagtagaaggaccagcatcagccttagcttgagttagtgcaaacagtcgggcaggagcaggtgtatcatccttcgtttgctctagtcgtagtagctgtgggcaattcctcttcatgtgacccactatcccacagtggaaacaggccctggcctgacactcaacctggtggcgcctttcacatcttgggcatttagggaaagtttgctagttttcgttcccaccacgacggaacccttggttaccctggaaccttttgtgtgggcctgcagctaatgattcactaggccttttcttgcggtcaccgagatcagtaccccttccagaacaaacacctcacgttttcttccacgaatctcttcaggcaatatttttctttcgtatctgatcttctgcaccctcaaaaactagggccagttcaactatttgggcataagttcgagcaacccccggttgtttagaagcaacaatcacatcccgcaggatatgttcatccaacactcggaaaaactttgctcttcaagcaacttcagtagccacctcatctgaagcaaattttgctagtcgatcgaacttagtggcatactctgtcactatcatgttgccctgagtcaatcgtataaactcttctgcctttgctactcgaataaactcattatagtacttctcttaaaacaaggtctggaaggcatcccaggtcatgttattcaggtcatgaccctaagacgcaatctcccaccaaataaaggcatcatctcccagcataaagatagcacacctgacccagtcattatcttcgacccgcataaaatcaaaaatggatgttatc

SEQ ID NO: 103142 - DNA, 1127 bp, Cannabis sativa
  modified_base (721)..(726): a, c, t, g, unknown or other
ttttttttgtgacaaaacctccttgtgttttaatttttggacacttcctccttatctttttttttggtggcgaaacccccttaattttacttttctttgcaaatgttaaattttagttagatattactgttaaatactaattggattactactgtatcgacttcgaggttttactgttacatatacacaggtgtatacagtggtcatccagttgatatttaatggtaatatttaactggcgtgtcaaatttgtaaaaaaaaataaacataaggtctgccataaaaaaaataaggaggttaagtgtataaaaattaaaacataagagggttttgccactaaaaaagataaggaggttaagtgtataaaaattaaaacataagggggttttgccacccaaaaaaagatgagagggttaagtgtataaaaattaaaatataagggggtttcgccgtaaattgttcttaattaaattaagttatataatttttttagtattgcatattaatatattgtaacaaaagcaaaaaaatatattacatcattaaatatatacaatgatatttgatatatcgtattaataaaaattaatatattgtaattatataccacaaagaaatgataacaatactaaattaatattcaaaaaatatatatattactaacaaaattatagatattactattaaaatatgcatacataccaaaaatttatatataatnnnnnnatataataaaataaaaactaaataccatcttaaataaatgatatactatatacagcaaaaattatataccatacagcaaaatatatatatgcttacaataaaaaataaaatcaaataatataatattattataaaaaattgtagatatcattgttatctgcattttcgcaaggatgacacgtggatactaattaaagaaggccaaggagtcattaagtcgcccaagtgcttcggttcgcactctgggacgataaaggcactaactattaggttttgtgttctaaataaaactttatttcaatgttatcttttatattcatttataagaaatagatttattttcattacttatttaatatgttatttgattcatgtggttatttatttatttatttgattta

SEQ ID NO: 103143 - DNA, 514 bp, Cannabis sativa
tcgaccaaactcctttaatttgtttgtgggctgagtagtagggtggggtcaaaacaaactccctaaataataataattatgattaaattgtgtctcttaaatttataatttctccaaattattgaaattattggaaaattaattgagtggtagtttttttaaaaatatatattaatcgtgagctagagtggcgttgaggacgtgaatcctttacgaccctagaattggagcaaatgtatgttgtaattcaagaaacaatccaacaacaaggggaacaaattagagaactaaggaaacagtaggtttggcttgctcatgatcctaatcctctgatacctttggttgtcactagatattggaaattatttggaattattgtatgaatggttctggaagcaaaatccttcagtgtttgagggggatccaaatccacttaaggcggaacagtagatgagtatgataacttctatttttgattttatgagggtttagggtaacgacagtgtatgttgtg

SEQ ID NO: 103144 - DNA, 700 bp, Cannabis sativa
  modified_base (355)..(362): a, c, t, g, unknown or other
  modified_base (394)..(397): a, c, t, g, unknown or other
tttatggaatctgatcattttactctgatcttaacttattcaaagcattacactttctataatgaattggagcctttacaaactaatttgaatatatgattttcaaaatttcttagtgatatattaaagaagttttttttttaaacttcaaaatagtttgttttttttgtttgtatttttacggaattctacatagaaattctcatagaaattaacggagcaacctaaatcgcaactaaaatccacataacgacccacatagaaactaccaaaataacctaaaccgtaaatttaaaaaaagttaaaaaacagtatatgaagtaatttttcaatagagtaaatactattttggacnnnnnnnnttgcaaaagttactaattggaccctctatttnnnnaaatgataaaatagaccctgtattttctaaaatagtacaaataagaccctgaattaattttttgtcaaaataaaatttaataataatctgatataaaggtgttatgaaaacactgtttatattttctgtatctgttcgtgttaggaattatcttcgagttggttgtattaaagaaatttgtcaaaaattaaattcgagatcctatttttaccatttaacaaaacagaaagtctaattaataacttttacaaaacacggggtggaaaataatatttacctttttcaatattaaactataattgg

SEQ ID NO: 103145 - DNA, 519 bp, Cannabis sativa
gcgaagccacataggatctgttttggtctttattgtatttatttgtatttctcttcttcttgtaaaactgtaataataaatattacagaaaggtctaattttaacagaaactaatatgtttaatctaaatcttggatatcacttctatatgacagaaagaattaaataattgatgatcataataaagttaaaatattaagcaagaaaacaatgtagctcaatattttatcgaaaataaaacttatctttgacaattccatgaccgactaacttccaatcgaaaaatccatccatatttttgaaggttttttgattaagattatcaccattatgtcgaaattaatttgtcaactaatgaaaaatattaatgaaatgataatataaattattgaaagaaagtcctcaaaatttattaaagtaaaaaccaaaacaaaagatttaaacttatacgtgaaaatctttaagtgctttctaaattgagccacttcacaaaaatagcctaataaaataacacaaatt

SEQ ID NO: 103146 - DNA, 1052 bp, Cannabis sativa
  modified_base (26)..(46): a, c, t, g, unknown or other
  modified_base (717)..(718): a, c, t, g, unknown or other
  modified_base (820)..(823): a, c, t, g, unknown or other
  modified_base (850)..(852): a, c, t, g, unknown or other
tctttattaataagtaaatatgattnnnnnnnnnnnnnnnnnnnnnagggcacaaaacccaacacatactagggggctagaggatcagatagtagcattaacaaaactcacggactgcttggcctggaaacaaagtggcaccgtatttgactcataagaagaggatcaagagccatgtgtaaagagaatcatcaaggcacaactgcaaaaaaaaattggaatactgcaaatggagttgtacgaaggaaaaacataccctacgtgttgtgctaaaattagatatatggaagtgcacgtagtcataaacaagtaatacaataataagtaaaagagtatcatctccacgtggattgattagaaattaattatgcaaaaatcaatattatataattttggtaaaacaaacaagaagtgatgatgatttgaactaggctaaaaattaaataagaaagtaaatagaatgagaaaggaaaatgagcaaagtgatgaactagaacaatcaaatccattaagaatgcaaattcaatgtaaatgtcatagatgaatgcattagtaattaaatttggtcaatcgaaaatataaataaacatataatttttccaaacctatatgttatgggctctcaagattaaattaacatattcctatgcaaatctagacttaaagaacacaaattaaacaccaatttcccttgggtcatacaaggtaaatagcatnntcctataccatctacaaatcacactttccaatgtgataatcttgtatcattcaagtatttctactaattttatttttttccaaaatcaagattagctagcannnnacaattggtgatcaagcaaaagtaggnnnacaaacattaggcatccttgaatgaacaaacctttattaccaaaaatattcattaaacatcaacaaaattcataatccaaggttcataaaagttctaactaagataaactagttcatgcttaaaaacacaaaattatccaaaattctatcatttattacaaagtttagaaatagaaaataaaatacaagaagagtaaaag

SEQ ID NO: 103147 - DNA, 593 bp, Cannabis sativa
aggacctaaatagattgattaatattacttatatcaatagggtgcatcttgttttctggtagcccatcacgaaaaaaagctccacagttaatcatgcttgacctaggataatttcaggatgggtcacctcctaagaagttttcttcgaaagtgtgcgagtgaggacaaagcatgctagaaatacttgtgttggtctgtagggcctgttgtcagtctaggaagtggccagagtgatgtacccgtgcataagagtcattagctcgtgggagaaggcctaatggaggctttgaagtggggacgttacaatggtattagagccttgacccatctaaaagtgtggtcgacgaggacatcggaccttgtaaaggagagtgattgtgacagtcagtagtcatgtgatctgtaagggaaaataccaggtaagttgtgcaatcccacatcgcttggggaaggtcaagtgtgatgattctgagactatataaatatagaactacacagttgaagagtgcctaaatggattaatttgtactacctatatcaacaagatgcatcttgttttctggtagcccatcacgaaaaaaactccacagtta

SEQ ID NO: 103148 - DNA, 657 bp, Cannabis sativa
taaaaaataaaaaatgtattttataacacttttatttttaaattttaaaaacagaaaacaaaaatatgttttacttattatttttatttttattttttgattttattttttgagaccgtggttgtagtccgtgtctaggattgaggctgaggctggaggtcgagtcccaaggaccaaattggagccagagtccaaaatattaattaagaaaaaaaaaagctatttaaaaaacttttaaaagtgatttttttttttttttttaaaatttttaatattttgattcccaattaaaaaattaaaaagtgaaccaaatatagttttacataaaaatattacctaaaatataattcaatacaatataatacaatacaatatgacctaatacaacgttccaaacgaacctatatatatagttatctttgaacaatttaataaacatgtataccttttattattatataatattttaaagttaattataggttaattaaattgattgatgaataatcatgatctatttatttatttatttattgcaatgaatgattttattgaaaaagaaaataaaatgtcatacaactttaaagtctatataagaatcccaacaaaagcaatcttacaatgttgtttatccccaaaagtatgctgagttaattt

SEQ ID NO: 103149 - DNA, 921 bp, Cannabis sativa
ctgcttcacacccgttctggcctataaaagcaagccttctcatttcatttggttactttcgctagtttgccaaatttcctcaaagcctttatagagagaaaattcagggcaacatagattttctgctactctcttccttcgcgccgttgtcagtcctcgttgcatcgtcgatgaacaccgacccccaactctcaaccttcatgtaagttttcagtatactctatgctcgtctactgtttgtttgtatagcatgattagaatgtctaggttgagtgctgaatttctgggaaataattttgactgaattttctgtgtaatgtgtagaatctctcttattcgtgtccttgctattttcctttattgcttttttatagttgagtctctttcgtcgagataatgcttttagggcatagggcgatccttgtttccaccctcggcgttttctccttctcttttttttttttttattttcctttcctctactgtcgctgcctttgggattttcgcacctgatgcttgttaaggaaagtccttggagtttcctttttttggcaagcatccggagggggcctctttcaagcggttaggggacccccattcccttttttaacattagggtttggtttggggcctaactgctggatttcttatttttttcagaataaaaatttctgctcatacctccggaacaaaatcttccaagaaggggacggccactgtggccactctggaggaggtcatgaagggcccttttgcccaggagaactacacttctcgcgccaacggttgggaggcggatgagctccactccaccttggtttgtgctcatcaactcgagaagatcgtgaccgttgctagcatcaagccgtctgcgtacggagtctttcaccgccttcttcgagacgaagagatgcccaatca

SEQ ID NO: 103150 - DNA, 552 bp, Cannabis sativa
aaaattgagaaaaaaaaaaagagacaaaaattatatattatctacccctatataattataagtatactagaatgaataatacgataattatattatttagttttttctttattttacttttaatcccaaacaacacgattactatcctttttatttatgatattcactactacttcctttctttctttccctaaaatccatatgtattgagatagtttcactaaagaaatgttactttcgccagtacatttttatactggcaaaaatttggtatcacgctgataaaatagaatttactttttatgtgttggcaaaaggaattgacaaatcaaaattggtattagaacttttatcagcacaaaatgaaaagcgctgaaaaaaataacttttcccagtgtgtaaatgcgctggtaaatctttgatctttttgccagcgcaatttacaaaatgcgctggtaaaaatcacagtttgctaaaagtgatattttttgtagtgtttgattcatccgttaggtatgaattatattggtgcaattgaattttttaacataa

SEQ ID NO: 103151 - DNA, 603 bp, Cannabis sativa
tatgtttatctttcatgtatgtaccctttgggatgattttttattttagtttttgttctttgacaaaaccctttatcatgatccttaggtgtgtgtagattctgctctatagtatgcaagataaaatctaataggtatcgttttgtgataaatcaccactacaacatactgtatttgatttctttagcctcattttcgcttattataagtcttaaattagtggtttataaatacaattcattgtttcttcttctgcatgtctcaccaatgtaaaaattgctttaaataagcaccaattaagtatccctttatcactctcagccttgtatcttaccttgtcttgtgttgaaccctttctagaacatcatgcattttgagtctcagagtaccaaaccaattccagtcactatatatttcttcaaacaagtccctatttggcatcttctggaatagcaaacagccttaaagtccaatgttttagatgctatcattacttatttcctttctcagacttggactgagattttcatcttcatcctcttctatttccatgtttcctctggtttatttttttggagcttcctctaacattgaaaaaaaaaa

SEQ ID NO: 103152 - DNA, 722 bp, Cannabis sativa
caaaggattagcaagcttctcaaccagctgggtcagcccacacttacgggatcgcgggggagggacccagtacgatgatccacgcctgaaggggagccaatcgggagcggatcgacgcacgataatacagtggatgtcgtcttcgagcttggtgagaaggggatcggaggaagaagatgaggagtcgtttatgtcggtgagatcgttgttgggttgagaaggcaaaagcaagcaagcagcaccactaacaccaacaccacccggacctgcgattggaatttatgttgtagggagtgtttaaagggtatatcaattgatgtggaatgggtaaaagatgtttgggattgggattgggattgagagtgagattatggcttagctttaggccatttgaaaagaatcgtgtgaagaaggggatagttaacgaacgtttaaaaaaaatagtggacggttcttttggcgttaaatttaacagaatattcttttatttgtaaagtatattctgttaaaccaaaaattgccgttagataggcacttttaatatataaagatattctaacattagttactagcttttccctactccttctagaaatttcgttggataaaaaaagaaatactcaatacatcactatatatgtatatactaagagactatataccccttagtacaaattcgtctaaactttttattgatttccaaatgtctccctttttttttt

SEQ ID NO: 103153 - DNA, 749 bp, Cannabis sativa
atgtggtgattaattgagctatagatgagattgtagggttcttctttaccttaaattcaagttgtttgagattaattgttgctgaaattatttggataggttgaatttaagctcaagtttgagagcttgaagtttataagtttaagcatgattttgagatgtttttacaatctgaatttttggatttattatgggattttgatgcatgaaatatattagttgagcatctattaattgctagtaattctatttgttaacttgtgagtttggttgtgaatttggggtaaaaaggttgaatttcttgctgaattttcgtgtttcaagcagctggtttctgggtttggaacccagatgccgcggcatgctctgagcatgccgcggcccgtcccttgttggtggaacttgggtttcgtcctaggtgccgcaacatggcttgggcatgccgcggcccgcccgtgtgtttttgggcaaattgagttcgaactttggaatttcgtaactttttattctgaactccgatttgggagttctttatatcgttggaaagctcgttctcagctctatatgattatctaaatttttaaataccatgattaaattttatgagttgaaaaccaggggttaaccctaagtgtgaaaaatttccaaatttgtgtgactaggattaccgggacctgatcggagcacccggggattcggaatctctgtctattgcaggacaacaggtaagatagtgattagcacataga

SEQ ID NO: 103154 - DNA, 669 bp, Cannabis sativa
  modified_base (347)..(367): a, c, t, g, unknown or other
  modified_base (460)..(461): a, c, t, g, unknown or other
atatgttgtacaaggtcgatcacgacgtaatgctcaagaaatgacaaatttacatcactttcgtgtggaattcttttatgctgttattgatatgaaacttcaagagctaaatgaatgtttcaacgaggtaaacactgaactacttatctctttagcttccttgtgccctagtgattcatttgaagcttttgacagaaaaaggttgatccgatttgctgagtaataccttagagatttttctacttttgagcttagcatgctcgataatcaacttgaaacttacattcttgatgtaagtaccactgaaaatttcttgggtttcaaaagtattggtgatctcgctgaannnnnnnnnnnnnnnnnnnnncatattgtttatcctctagtgtatcgactaattgcattagcactgattctacctgttgttaccgctatagtggagagagtattttcttctatnnatattttgaaaagtagattgcgcactcgaatgtgagatcaatttatgaatcattttttacttgtgtacattcagaaagacatcttcaatagtcttgacaatgaagtcatcatgtagcaatttcaaaacatgaaaagtcgtcgaggcagattctaatttttagtttattttttatgacaaagttttattttatttggttgaagatgaaa

SEQ ID NO: 103155 - DNA, 524 bp, Cannabis sativa
aagcttcattttcccataagctagctatgaaacccaaaaacttcccagagggattccaactgtgcattttgttgggttaagtttcattacatacttccgaataactatggagtattcctttaagttctcactatgttctatagaagttttggatttaacgagcatatcatctacgtatacctccatgtttctcccaagttgatctttgaacattttatggaccaactgctgataggtagctccaacattcttcaattcgaatgacataaccacgcaatatacacacctttatccatttagaagcatgtgtgttctttgtctgtgatatgcatcttaatctgattatagccaaagtaggcatccataaagcttagcaatttgtatcctgacgtggtatccaccatttgattgattcgcggaagggggaagcagtcttttgggaataccttgttgagatctttgaattaaatacacatcctccaggtgtcgttgggctttggaactaagaccaggttggccaacca

SEQ ID NO: 103156 - DNA, 502 bp, Cannabis sativa
gtaaaatggtctaaaatcataaccgtacttaaccctgataaacaaaaatcaaacttatgactgacccactagaacaaaggttctaagctaactcgtgcgactctaatgattgtccgtcacattttccatcgttaccgagcaaaaattacaagcataataattttcacatatagcataaataatacacttagagtttaataaaatcttcgaaactgagaaattataaatttaatgcccattcttgaaaatagggcccacaacatatatttgcatacataattataaaataaaagtaattaacactaattgcctttctaatccataatctaatcatgtagtcattacaattatctcgccgttaaaagtattttgtcctcaaaatctaacatgaataactatgaatattgagtcctcatgttggactctagttttgaggtggcttcctccaccttactattcctctagagtactttgaccaatgctatggtcttgtttcgaagaa

SEQ ID NO: 103157 - DNA, 801 bp, Cannabis sativa
atttttaaagatttaattatatatttaatctattattttcttttaattagtaccatttaaactcatgaaataattttaaaatttattacattaattctataacttttggcattctaaaaagcttttggcattctaaaaaatagtatatatagtgtacattcttgcaaccaaagacccaacaaaaatattattgtatacatttttttcttactttcctttattattcctatcaccaaagactttttcacgccatattattctaattccttcaataatcatcaaggcttcttaatcattgtcgaatttttaaacacaacgcaatctattagttttacaaatcttcgagcagcttgacaaggatatcatcatatattagccaaatccctccaacgccttattgttacatatgtatttctatattttttttgtccacaagcatcttattgatttttatcattttttgctttgttccaaacaaattaatgaaactaggaaggtgaattcatgattcatgagtttggtatacttttgagattgtatgtattcttcttatttttcaaaaagaattgttatatgttttgatgtatcatattgttgatctgttccaaggtagttaatgcataatattttattttttaaataataatagcaacaaaaattagtaaggtgtcctaattttaaatattaagaaaatttgagtaacattggatagtcttattttatatgagctcatgtccttcaataaattaagagcttactttaaaatttatattattttttattcattttatgagtatgaga

SEQ ID NO: 103158 - DNA, 847 bp, Cannabis sativa
aatggttggaggagaataataatatattagttattcaattgcctatgatttgtttcatcttaatgcacaaggttgaattaaacaagaaagcattttgcacaaggtctcctacactataactatatttacattattcaacatcatataaaaaaatatattaacaacaattattcatgcactaaaacaataccaagtaatcacaatacataaatcttagttgaagatgttgacagaagagacaccaacttaacttcatgaacttaatcactttagctaaacgaacagagcacctgtactcacacaaacacaaacatacatacatatattagcataacaaaaaaaaagtataatcatgataacatgtatgtaatgtatgtatacatgtatacatcaacaacaaaaatagatgtatacctcttcgttccttcccctcatgatgatcaaataatacggttgggaacatgagcaatcttatgccaatctgggcctacttcttgtttgcatgcttcctgtaatgcatcacaatttttaatcttcaaatgtgtgagggaagtgaggccttccatcccatcaggaagggacaacaattctgggcaattcctaatcacaagcttctcaagtgacgtgagttttggcagccactcaggcaatctcgataatttgggacaagcttcaatatgtaacttttgtagggtgttagcagcttgttggagccattggggcaattctgttgtctctggtaatcgatatataaaaaatgtgtggaggctcaactgaacatctttattaataaattcacttgctaagttgagttgatcacaacaacctattatgagagaacgtaatg

SEQ ID NO: 103159 - DNA, 576 bp, Cannabis sativa
aaaatattttgtcaactaacttgccaaaaaaagactttacaatcactaataattatttagtgacaaatttatttgttactaatacttctttagccacaacctacttaattttattattatcattaattcattttaagtcacaacagaagtttatgactagttcttatttattcacaatttttttattgtgagtaatattcttttattagaaactcattattaatacccaaaaaaagcaatacaacaaaataccaactaaaagtcttgtcttttgaaatgttgtgaaaagttccttagtttgtttgttccttagtctatttgtttcgttctggtgattatttgtaatagtgttgcggggcagtatggcttcaagcagtcaaaatgctagtaatctagcagatcagtatgctaaaatcaatattgaaggggaggaagaagggatattgattgaggatgaagctgaaggtgacgaattggtgttttgataactctaaaaattagagttatttttcacatttttttttaactaaaattggtttagttcttaagtttttaattaatttattaagtttttaa

SEQ ID NO: 103160 - DNA, 588 bp, Cannabis sativa
cttgggcaccaatacaggatttgcgacccaagctaggtagaaagcttcaattatgaaattattgttacgtagcttttctacttcttccttttgggctagtgctcggtttttatccaatagccttcgcttttgttgaactggccggaaattgggatcaatattcagaacgtgtaaaatgatagaaggatcaattctgaccatatccccatgtgactaggtgaaaacgtctaggtttgcgtaagaaccattattttctgtagtgacaaattatgtccagatgcgtctggaactcgtagtgttttgtctggggttcgtactgttagtgttagtccacgtcagcaaagatattttaggttttaattgttcagatggtaacaactgtctaattcaggtttcttggtttagttgggtataaatacgatctctgagtattatgttgaaaagttttttcatccgagattagggattacatttctttcttcttgtttcttctagatgatccatggcaggtgatctttgagcttggaggtattactccatagttgcagatcagagcttgaagatgttgagttcagactgaagggattt

SEQ ID NO: 103161 - DNA, 622 bp, Cannabis sativa
cacatccaaaaggcttgatgaaagaatagtcaggtttttgtccaagtaaagtctccattggagtgctgtagttaagaacaggtgttggcaacctgtttatgagaaatacaacagtgtgaaaggcatgtcaccagtagctgagatctaaactagactgagcaagaatagttaaccccatttctgtaatatgcctgtgtttacgctctgcacgcccattttgctcactggtttagggacatgggtgttgaaagtggattccttggtcactcaagaaccttgagaaaggtctatattctcctccccagtcagcctgtactttcttgataggtaaattgaactgtttctctaccattgctttgaatttgacaaagatgtctaaggactgagacttttgcgcaagtggataaatccaggtatatcgactataatcatcgaggaaatgaatatagtagagatatccatctttggatttgatgtgggatggtccccatagatctgtatgaatgagctcaagaggttgagtgactttggaatatgtgctagaaaatggttgtttatggctcttgccaagttgagaggcatggcaaaaggaaagaggttgtgtattggctttgtggttaat

SEQ ID NO: 103162 - DNA, 521 bp, Cannabis sativa
  modified_base (466)..(475): a, c, t, g, unknown or other
ccgttcagccaacatatccattcaactacaataatcaataggcaagcatgtactgagtacaggaaaaagaaaatgtaagcacaatagttatgatccacatcttgttctttatcattttgaaacatatcaccttccaagttaaggagatttagttttgttcataatagtatattttactttgagcttaaattagaattcatattgttatgtttggctacacatttgaattaccctcactcttggatcaaatcaacttactagctcggacatgtcataacagaactaattaacattctgttatgacagttatgtcaccaacacagtccaagacctataaaaggaaccctcacctatcgagcttcattgacggagatttagaccaagctacagagagagaattgagagagattgagagaaaaaccagagttgaaagagagagagacagagggagagagagagagagagnnnnnnnnnnagagagagagagagagatgagaatctctttgtaattgaagcaaagc

SEQ ID NO: 103163 - DNA, 542 bp, Cannabis sativa
ttgtatatgctatattacatacactatatatatagtctaacatatacatcatcatccttttcatattatcctttcattaacgacatataattgaaaagaactcgtatattataaacccaatatataattctgtaaattatgccaagtggagtattgcaattagcttaatcataatatatgtttaatttattcataattaatttaattaatacatgaattattcatttgtcttttaattagggtatctgagatgatcatcaccacctccactcgtgggctgtggtgggagttggtcgcatgttaatgttagtcaacttgtctatataaatatgtatatatatatatatatgtatacatcaaaatattatcttaaaatacttaataataatgcttatatattcatatattaaaccctaattaaaccgaaacaacaccacaagtcggtgatcccaactataaatattaatgatattatatttacactagtcttcatttaattacaaacaaaaacgatatcgttagtaatacaaatgtctttataa

SEQ ID NO: 103164 - DNA, 506 bp, Cannabis sativa
atttatttaatctctttgttggtccttgtattatattgcaatagagttataattttcttctattgcaataatatctctaacaagaatattatgagggtatactcatttcttcttaagctttggtcaagctagttgtgtattattctttttttcttctagcttttttgtaatcttgatgtattgtaatacttttatttatattttaagtattttgattgtattatcttattttgtcttgtgaatattgtagtggtgaaacaagaattggtgctaccactacttctcgtatattggtgatgaggtgacaagtagtcaccctcacaaataaaattatccataaaattttataagaattggatatataaatatgtaggatcttatgttgatggaaaaaagtataatatcacccgtaggaatattgaacaacattatatgatatatctataacctttataaaaaagagaatgttttaggcttccactaagtaaattacttaattaaccttt

SEQ ID NO: 103165 - DNA, 806 bp, Cannabis sativa
caagatgttctgaaaagctaagaaagagatctaaaactttcatgttgagctccaagtccaattatgcttctaagtttgtccgaatttgtaattaagttctgccttgtacaaacaaactcgctgacttccactattttccaccaaaatatgctaaaatctctccaaaagactcaaaatgcatgaatagtctttaaaatagcctaacaaataaaaatcacactaatcaataatttaaaaaatcaatttaagaatattaataaataaattaatcatatttataagataaatatgaactcatcattattcctttcaaagttgccataactaaaaccctgactactcggcactgccggccaaataagttgatatgtacatttactggaaaagatctttaactcatggctgacctagcttagtcctttccttacctacaccataaaatacatgtaagtcacaaagacccagtaaaaaaagtaaaagcatgcatcaaagtacaactataaccaaacataaccattaaataataccaaatattcacatacttaactcaaaagcaagaattcacattatctaatataaacaatcactataatcaaatatttataatataagacaaactaaacggttacttaataaaataacagtttctcacctttgcctaacaagataatctcatgtcactatcgtaatctaatgagacaaccatgttgttactgatatttcgcaacaccaaaaagtacaatttaactggaaaaagagagaattatttgagagatgacaaatgcgagtattcgacctagaatggc

SEQ ID NO: 103166 - DNA, 525 bp, Cannabis sativa
tccccgatgatctcgccctttaagctttctatttttaaagatttgttatcccgctacttctggagcttgaaatactaggtttaaggttaaaaatcgaagaaaatagattaaggagggagaggatttcgtcgcacaaagagaaatgagagtttcattctttgttcttctgtttatgtttcttaaaacataatatatattaacgtttttaatatatataatattaaactgataataataataatataatattaataaaaatttattattaatagttatctcattatttcttagttataagaaatctttaattctaggatatttggtcaatttcgagtaccccaaaatacttcggtatttctaaaattaacttatctcaataatctcatcaatatttctaactaaaattgttgtgacacatgacctccaatcaggtgtccagggtcgccaaacctgaaaatatttttatttcacaaatagctcacattacatttgcagatgctatataaatctccgtaattaataaat

SEQ ID NO: 103167 - DNA, 536 bp, Cannabis sativa
tttattttcgttctgaaaatattttatttggatttcttgtgaaaaaataagcaattttggtttttacagaactggattccgataaaaattgagagaattatgaaggttttaaaattgggtgaacatggtgtcgagatggtgcatcgagtgcaccaggcactcggacaaggcgcatgcacgtgcgcgttcacttggacaaccacgagcgttccttgcccaggctacatcacaccgagcaggaccctacacacgccgagaaacctcggcatagggaccctgctgttcctctctttcgcgcgccagggctgcttgctgcctttctaggctgcacgtggagccttcctcggcagccactcccctaatgcgatatttttgggatttttccttttttttttccgaatttttccaatttcaaatcataaaaatcaaaataaaatattatttataatatatttaagcttaaatttcaattttaaattaataatatttaatttttaatagattattattaatttatgatattttgaggtttaaat

SEQ ID NO: 103168 - DNA, 730 bp, Cannabis sativa
aataatggaattaatttgtataaattagtggagggtataaattttgaaatggagtattttattagggtcaattaatgaaatttcccttctataatctagcatcctaattatgaatttcccaaaataatgaattaaacacataaaagttatagaaaattttacattgatggcagcggaataatatgactcatgtcgttcagatctttaacccttgatcctttcagttgcataatatgatcaagatctgaacctgaaatctccttcaaatgaaaattggactacatagtcttccttactaagctgagtattgctttgaaatgtgtggataatttttcaacaccaaagagcacaaaatttgagagtaaaatcaaagagtatttccagttttatgaatagaataataatagctatgtttttcattcaacttgtcagacaaaagaaagtcaagagagaaacttgaatgaaagccatcttattctatctataaggagacaacagtgttaggtttagatgagacgtgcttaaaataaagacatgggtaaactcttaggcccgaattgcttatgagctttaaagttagatttatactactttattttttttaaatgaaagaatgtgtcttttcctatattatcacttatctcttttgattatttaaatactaattttaatttaataattataaataattatcaaataaaatacaatttaaatatttttattaattaga

SEQ ID NO: 103169 - DNA, 593 bp, Cannabis sativa
ctactataaataggagtctaatttaagaaatcagaagacctcttttcatactaaaatttcaaaatctattgagagaaaaaggaaactatttttttctcttagttgctcttgctcatgtgttgagaactcaacaagaacaaggttaaacaatttattgtaatagcccacactattccttgtgtgtggtggatcgatttggaagacactagtgtgagtccaaattgcatatttctcatcaactagattaagggatacagcatacagaagttttaaggataccctaataggcttcaagaggtatactttaaacttattatttttattattttaatttaatgtacacacatatggatatcctaggggctacggtacaatgataattagataatacaactcttccgatgcgtccttgatttagtaccataaaactaacatcaagctctgccacaagactttgtatcaccctcaaattgatgggaaaactgaggttgtcaaccattgccttaagatccatctatattgtttttcttcaaactatcccaaaggatgggccaagtggctagcttgtgcggaatattggtaaaacaccactt

SEQ ID NO: 103170 - DNA, 522 bp, Cannabis sativa
ttaaactttaattttcaataaaagccttcagacattaatggatgaacaaacttttctaatgattttggttttttttttgtttgttttttttaagaactttgaaacctatttcttaagcacataatcattagaaatataaacttgataatttcccatgtgatttagtttgaaaaataacgttgaaaaatatataaagtttgaacactatagccgaaattttcaaaaaataaataaataatttggacacatattcttagtcatatttgaattgcataaaacttaagggataaataaaataaagcaattccgtaatataaaatataatagatatacaattcaaatcaccaaagaaattaaatatatgacaaaatatattaaaatatataagaacgcatataatcaatctaaattacagaatatagttaattttattttagtttttagtttttttaatatcataattttaaaattaaaaatattcaatgcagtgataattattgaaatttaaaagcataatagtga

SEQ ID NO: 103171 - DNA, 658 bp, Cannabis sativa
tggttggaaggctgaccttggcttagagaagtcaaggtgccgcacgggtgttccgctgcctgaaaaggtgagcccgtgacacttagcattagaatttgaagataactttgtagttacatataaagtaattcaatacaaagaaatgtttaagcttattaattttgtcattttttttattattggttggaatgcattaggaattgaacgttatttagtccaaagcaagcttgtcctaacaaatatgaggtctaaaataaaataaaattttaagatcctatatgtagtaggaatttaaaaatacaatgagtctcattgtattttgtggatataaaaagagttcatggccactaaaatggggtatattgtaggagattgaaattgacttttaatatggtcccactcattatttaatgttatgtttgattgatgtaaaaaaatactcatttttctttttcgttttaaaaaaatttacacaataaattaaaacactcattttttttaaaaaaaaataaaaattaattaaaaaaatattttgatattttattatacttatgccattttaactaatcacttcactattttttttttagtaaagtgtgagataaaataatattttacaataatatatattttttttttatttaatttataataataa

SEQ ID NO: 103172 - DNA, 760 bp, Cannabis sativa
cgcggtgtttctacagaacctaaattggtataaacactaggagttcgactttgtgaggactaagaactagattaagcatcgtttacctcatttctcgactgagccctactgcacaggttgtgttgctctgggtcctcttcttgttgtacctcgcgattggagtttcgtgtgacttgatctctcggcgttggttgattcaagtcaagcccttcagtcctgcgttccctgcgagtgcggttagttcgtcgtctagtattaattacctgagggttgtctgagcgggtggttggtactcgaggacgacgtcgagtcctagtctgtccatcgacctcagcctgtaaagcccacatttggtcttgtaatgcgatatattgggaagtggtcaactggataatgccttgagataccacgacaggtgtgataggtgggaactgccccactgtggctgccggtgtagacgtttctccagcgtgagcggcagttttagggaatagattaagaggagcaatgtttgttcgtcctactactccattgattgtatcgacgggggtcgttccattacctgaaagtggaagattcatcattccgatattgattgatccattgttgttatctcctgtcgtctaatttccagccatagtgattttccttcaaaatcaacaaagtatttcgattccaactgacggcaccaaatgttgttgaaggaatttagacaacaccaaattaaatgatataataataatatgagtagaagaatcta

SEQ ID NO: 103173 - DNA, 631 bp, Cannabis sativa
ctttttactgaaatcagttggcacaattcgcgaggccaacctcgcaaagcgatcaaactgggtcgtatactcagtaacactcatgttttccttctgggtgaaatgggtgaattcatttatcttagcactcctaactgcttcattgtaatacttcacattgaaaagttcctggaacttttcccaggtcattgtcgtgacatcgtgaatcatggacaccatgtcccaccagtgacgcccataaaattcaacatactagtaatcactgttagccattgcttggctttcataacatccagacctcccagaaaaagtggaggtgctttcttgcggaacctttcatacagacgttccatctgattcaatgcaaccactggtttggccttgacagcaggggtaggtgccactggaatttctagagcaggcactacaggaacaccctattgtcttaactgtcaaatcacttcttcttgttggttgatcctagtttgcatttctgcaaacctgttttcccaattgtgagcttcttgagtagctttggcagcctgggcaacttgtggcgggttaacatcaccccgacaacgtgccctgcccctgtgacctctacctcggccccgaacaattggggcaaact

SEQ ID NO: 103174 - DNA, 575 bp, Cannabis sativa
tattattattattattatttatagcctgtcaaaagtgaagctgggtagaaaattaataaaactaacatttggagaaaatgaaaagaagaattaataatattatatatataataaataatgtataagaaattcgaagagatatagctcccaaatgaataactccaaaaacaactcaaaaagcttttgaaaaaacgttaaatttgcatgtcttataatgttatttcttgagactactcattaatagagaaaagtataattcatagcaaaataaatatatattattttaaaaaagaaaaataaatatatttgtataacagtattataaaaaataattattttattgataatttttttagttacaatgtaagtttgttatgactaaatgtgatttttaatcaaaataaaaagaacttgtgattaaaatataatatttaaatacaaattattactaatttatttttagtcacaataaatattattacaatatatttaatcacaataaattataatttttttgtactaatatatttaatcataaactttttaatcacaattaaaaataataatttataatt

SEQ ID NO: 103175 - DNA, 584 bp, Cannabis sativa
actagttacatcacttttatatattatagcatagataaaaagcatacattcatctacaaagttgttgaaattaaggcttctttaccgtattatacctttttatattgtattatatatatattataatatctaattttattttatacaatatttttatataaaagtatatatgtgtggaatttgctttgacaagtataaacatgtataataatttagtataaattaaatttctaccgtattataatataaaaataagatatataactcaattaatataatgtaatacaatagtaccataccacctaatataacgtcccaccaaacgagtcttaatacactactcaaagtcatagcagatatatcacacatgttaattaagaagatctataaagcatataattttctcatttcttgatggataattttcttttattaaatagtacaatgcatatgtttgactagctagaataccaaatgcatgtgttggaaaattatgctatattttaaaaaagtcttaagattttcaccaattctatcgtatgggccaagagtagtagcttattattaggtatagtgtactgtac

SEQ ID NO: 103176 - DNA, 529 bp, Cannabis sativa
tgagtaaagcttgtagggttggtcatgagataacttcagttgtttctttagtgagttcaacacttccacccacaaatccttagataaatggagaaagctgacacgtgtagcaccacccaagagcaatgatcaagaaggccaagggggatacaatatgacaagtgaccaatgaaggcacttccttcatcacttaggggaacatatgttatgttatgttatatgggagccatatgttgcacgagcattcaaatttttttgcacatatatgtaagtactctcgtggtaaagataactttaataagtagtgacattactcctagtgatcaagtttcttaagacatggtgtattgtgcaactgttaaacgatcaagcggtaatgggtaaagtaaataaaaaagcaaacaacagaataaaagtttattaagttagaaataatttctatttaactaaaataaattctgataatatctttactaaggcttatccacatcgaaaggccgtccgtgaacgaccaactaacacactaaag

SEQ ID NO: 103177 - DNA, 509 bp, Cannabis sativa
tggtttggttttataatagatacctataactgcattgtatgtccttaactatcatcccttatttggctaattagaatttttgtctctcaaactttgatatgcaccaaatcatacccccaaacttttcaggtcgttaaaaattctcccgaactattgagattgttggattttaggaattttgtccaattatgttcaattttacgaatgtatcgattgtccacgtacaaaatcgtgccccccgaactttgacagataacaaatcctggtccttgaactttcatcaacatcagatgttcgttaataaaattgctagaagttctttgatccaataatgtcaatagttcggaaattttttttaacaacctgaagatttcgtaagcacgatttaatatctgtcaaaattcagaggttaaaaatcctaattagcttaaacttactgttttctcattagtttcacataggaaacaaaagttatgttcctaccaaaaaatgtcaaattgaaatcagct

SEQ ID NO: 103178 - DNA, 709 bp, Cannabis sativa
  modified_base (653)..(658): a, c, t, g, unknown or other
cataataatgaaaactattaaaattaacagtgtaatcctgatcacaaatttgactattgctaagaagattaacttttagtccttcaaccaacactacattcttaagcttgggtagaccttcaaaattaagagtttccattcttatgacttttcttgctagaccattaccaaaagtaacttggccacattgtattgatctaatgttgtcacgataatctttgtcacctgtcatatgtatgcaacaaccactatcaaaatatcatatatgtgccaacatatgtgatatttttaacatttctcttttgtttgttactaccatatatcgaatattaattaagtggtttgattaatattgtagataatttctatcgataattttattttagaaaaatttacaccaaatactaacatttttcaaattttacatttatactttgacaaggaaatttttacattttctttttcactattttttacttattaaagcttcaaaaagttgtttttccaattctttatattttttagtcacctttggctgatttctctctctctctctctctctctctatttttcttttttattttttttccaattctgtctctctctttcttattttttttcctcaaactattttttttttatctttgtatatnnnnnnatatatatatatatataaatggaggaggttccaatggttacatttttattg

SEQ ID NO: 103179 - DNA, 677 bp, Cannabis sativa
aaaggaaaacacaagtaaaaacgtaagttgataattagcattaaaattgctcaacaagcattaattttgaattttgaaatactttgcggaaaaaaactttaatctcgaattaatcaaacttttcttatcaaggattttactttgatcatacgataaattaatataccggtgtttacagattggtttgttctaaatttttatattttttgaaccaaataagtataacagttttttgaatattggaaaccaaaacagaccaataaatttctcaaaccaaaccaaaccaaactttaagaacagtttgatttggttcgaaaccatagtttaagtggaatttataattattcatattttttaagtaattatactatttttactaagtttttaattttattttttaaaatatatatttaacatgataagtaatagatctataacatataaataacaatataaaaacattctcaaaaatcaaacataacataaaaatctaaaattaatgtaataaaaaacttgacacagaaaaaatgtttaaaattatacatatagtcatatataaattgataatttattataaacggtcttgtccggttcggtttaaccattaactatttattacaaatcgcaatcgaaccattatgcggtaaacggtccggattaactagaccaccaaaaat

SEQ ID NO: 103180 - DNA, 551 bp, Cannabis sativa
ttctcttgctttcttaaactagccactttgttgtacacatctcttagttggaaaggaagattgtcatacccttcagattgtagcgcaatatgtgctacaacagaagaagttttgataccacatctattcatgctaattaattgtgcagctactgctttaagaacctcgcgatttgcccgagtgaattgcatttgtgatggtattaccaaatcatgattatgaaatggtacaaattcttgacaccgccaaagatatgttttttgtaaccgaaggattcttaacgcagcttcacacccacaacgtgttaattcttttggtcgtttcttcctgtctggcatgttcaaaaattcctccttctgaaaaccttctttgttacaaacccatcgtcgaatgtatatttctccatcacttaacctggattttgtatcgtcaattctaggactgaaacctttccatcttgcataagtataatagaatgcctcccacatttttagacttaccatctctctccctgcaatatcatgagcatctatttctgcaactgatttgga

SEQ ID NO: 103181 - DNA, 1341 bp, Cannabis sativa
  modified_base (218)..(219): a, c, t, g, unknown or other
ttgggcagagctcgaggtatcttcaaaaatctctagcatttgtcacattttttaacataggcctttgaatcctcgatcattgtcggccagaaataaccttgccttagaatttatttagataaacgctgcctggcagcgtgatttccacaaaatccatcgtgcacttcagataaaagtcgtccagcttcttcttgggtaacacatctgagcaatggcanngagaatcctcgtctgtacataattccctctactatgatatatcgtgcagccttccttctcatctttcaagcttcatttcgattatctgagagttccccagtgttgaggtaggttgttattggcatcatccagtttggggaagcatcaatcatttcgatctcttccgtgccattaatgctaggctcttcgaggaactattcaaccaagttcgctttatcacttacattactcctcgccaaccgagctaacgcgtttgcagtcgtgttttcttcctttagaatttgtcagagactgtagcttttaaattgtgcgaccaggtcatgtattttgctctgatatgctatcatcttttctccccgaacctcgtattctctagatacgtgatttaccaccagtggtgaatcactgcagattttgatatgttcggctttcatctcttgggctagttttaggccagtgattaaagcttcatattcggcttcgttattggatgttttaaatccaaacttgaatgcagcgtgcaggtgttgcccccaggtctgacaagggcgattcctgcatcggatagttgatctgtagctgacccgtccacatgtagtttccaagtcggcttgtcttcactgttacttggctgaggtatttgcttttagaccggttattgctgaggttgtttttcttttagctgctgttagtggtggttcatgtcatgttattttgcagaatgtgaatcggatggcacatgtactaacaaagtctattactaattcaataggagttaatgtttggacggatgattgttctcattttattagtgctcctgtaacaatttatatggtttgataataagaacacgttttctttcaaaaaaggaaaaataaaaacaaaaacaaaaaaagagagtatcaaaacaactttctaaaatgtataataataataataataaatcataataagatatgattgaatgagcattggcgtaaaaaaaaccaattttgacacagtaataatttttagtttttgctatcatatgctttgtatagtaattttacactaagagcatccccatcaactactttaaatgaacatattctttaaattttttaaaaatcatgtctaatatgt

SEQ ID NO: 103182 - DNA, 508 bp, Cannabis sativa
tcacgtttgacaaggtgatcaatctgtcacctcatatttcacaaagctcaagtctatatgggatgagcttaaggaatttcaaccgaataccacttgttcttgtggtgcaatgaaaatatttcttgactattataatcaaaatcaagttctacaatttctaacgggtctcaatgagtcttactcttcgattcgggctcaaatccttctcaatgaaccaattccaaatctttctcgggttttcgccatgattgttcaagaagaaagacaaagaacccttggttcctcatcctcggatttgtcctccatggctgcctcagcccgtccatcatcatctactaatcccaaccggacaaagaaatcaagaccctcttgcacaaattgtggcaaaccggggcactatgttgacaagtgttacttccttcatggttttcccccgggatatggagataaaaagaaatctgagaaaggcaagactgttgccaatagttttactgcccccccccccccc

SEQ ID NO: 103183 - DNA, 916 bp, Cannabis sativa
aaccacgtaaaaaattgtcatctctttatttttgtattttattatttctttagttctaaaatatttagttttcaaaaatatcagtaaataaaatttaatataaatgatttcataagggctaattgttcctaataacttttgtaagtgactcttttacaaagtaacttatgtataatcaagttactaatattattatcaatagtatgggaaaataaaatagaaagaaaaaacatgtaaaattttattagagaaaccacaaaatagaaaatatagattactcaagtgctaagttaccaaattatcaccctaaatacatactaaacattagaatcatcttggtatacatatatagatagattgatatagatagttagtaaataattcacactttccaacagttgcttaaaaataattatttacatgaaataaattattttttatttaattataactatgtcttaaaattgtataagattttaacttactgattttacctacaattattttttgaataataggagaaattaagtgtacaaacgactggacctgacttgtatttaaaaaatttattttttataacagaagcatgacatggtctgtataactaatgttagaaatttataggtgcttcaatagaaaaaccaaagtcaaaatacaactcaaaataaaaaatacaagaataataatattgataaaataatgttacaactcaagacaaaatatacacataagtatagaaaataagatgaagagaagattacaaaacacaatataaatagtagtatatatatatagagagagagagagagagagagagatgtgagataaatctcgacaccactaacaccaagtgtcaagtaggggaatcacaaaacttgaacaaggttttacacctttgtccaaaagcttatttccc

SEQ ID NO: 103184 - DNA, 592 bp, Cannabis sativa
ttcttcacaatctccatactacaataaagattcgtgcgcttgcgagttgataaatgtaaaacgtaccgcttttgtatacaacaacgataaatgaggatatggaattcatacaaaggaatagtctactcttgtgaaatcccaaagttgatatctttggttatgatgttaagaattaatgaaggatgtcgagaactatggggactaaagtgaagatagcataatatttttgaaggatgggtaatctgggaggatcaatggaatattagaaatgtgttgtgagcatatttgataaaggttagattatctttggataatctcttcccctgacgaagtttttgtctaaaagtgagtatcaaatgtaccattggttacgtacttttgttatcccaaatttgtccatgtgacatggcgtgtccacataagtcaaagatagagtacaggtagagtacaaccccgccaataacagaacagagcctccatgcaagatatagcgaaattttcaagcagcgactaaagagtgtgaagcgagcccacaaggagctgtaccaacatccttggctggccaagaggagcctataggctggctagggtg

SEQ ID NO: 103185 - DNA, 732 bp, Cannabis sativa
  modified_base (296)..(303): a, c, t, g, unknown or other
tacatgtgtacatgtttagcaaacttgtttcatgtagtacgaaccaatcctaccaactagtactttcggagtacggagtgcatatggtatagtggttggttgtgctatcaggaagtgtgaattaatcctaccaacactagtactttcacggtagtgagtgcatatggtatagcgatgactcgtgctactaatcctaccaacactagtactttcagggtacttagtgcatatggtacaacgattattcaggttactaatcttaccaacactagtactcactacaagaaatgtcactnnnnnnnncacagttcgctactgcgctggtaaccagcgcatttcgcaaactgtgttagcaaaaatatcaaagttttaccagcgcacatttccaatggctaaaatctaacttttaccaacgcatttatgcgctgggaaaagtcatttttgccagcgcttttcattttgtgttggcaaaagttctaataccaacgttgatttgccaaccctttttgccaatacatcagaagtaaatttcattttaccagtgcaatattaaactttttcgagtacaaaaatgtgctggcaaaagtgacatttcttgtagtgacttttggggtactaagtgcatatagtacagtgattagtcatgctaccaatcttaccaacactagtacttttggggtactgagtgtatagtgatacagtaattgatcgtgcaaccatcactgccaatac

SEQ ID NO: 103186 - DNA, 736 bp, Cannabis sativa
atgttctaatcttgattgtattcccaataagaggtgtgtcacccaaaatatatttattgcttatatttttataattataaatatttaagagaaagggtaaaatggacttttggtttttaaattttacaatactttaataaaatattacaaatcattatattatgtcctatgaatctccctataatgaagcctccttgattcaaggagactagatttgaaaaatatacacatttaaaaatacataaacttaggtagatctaatttaaaactaatttgaaaactaaagaagcaaagtaacccgattctcctgtgtatgtcatctaattagaaaagtaaatgatgtaaaaataatgtggattattcattaataagatttgcacaatcaattttattcaatagtcaatagaatcaaaaaacctaaatttaatttcataaaaaaaatacataaaccctaaaagtttaatcttaaaattctcctaatttattcgacgattttatgcaaataataaatcaaaagaaagagaatttaatgaggaataaaacccctaaacttttaaaattgaaaacgaaaaattcaacataaaataataacaaaattaatatgtaattgaagaaaattaacatatacatattaaatgttatacaaattataggtcctaaatcatatacaattggcaatctgataccacatgttagaaaaattaataataaatccaagatcaatttgtatataaca

SEQ ID NO: 103187 - DNA, 515 bp, Cannabis sativa
atatcaaaaagtggatagagtacttcttttccgcccaaattacttataaataagctaaattttaaaatactgaaatttatactgaaattttagggtgggctaactaaaatttataataaaatttaaaataataatttttttttaccaaaaaaaaaacctataacacattttttacttgaatttgggatgaagttattatatagattggaacaaattttagcgtctgaataacaatatgagattttataattttttttttgtttttttaatgtaaaaatttgtattaattatagattaaatatatttcaaaataaattattaacataataagttttttttcaacaaaaaaaaattatatgtagtttgattcttctaaattaatattttgtagtttttttttaaaaagagtatatttatatataaataaaaataaaaaaatagagctggggaaaatcagattcaaaactaagtgtaccaaacactactacaaaaaccgtattttatgtaaataaaat

SEQ ID NO: 103188 - DNA, 640 bp, Cannabis sativa
tggttgtggctgcctgaaagcaaaacggtcagttctcggtcaaatcagcttacaaggtgataaaaaacatggatcctatggctgaatgtgacaacaagtggagagttatttggggatccaaaattcatgaaagactaaaaatgatatggtggaaggttatggccaattgtcttctcacaaaggagaaattaaattctctgtttcctatagcagacacgaagtgctttctatgcacggatggaactgaatcctctatccatctactttggcactgcaactttgcaagggccgtgtggtttggatgtatgtggcagataagaacggactcaacttgcatgagtcactgggaagagtggctacaatggtttgccatagatgctaaccggccccttgggcttcacttgcaatctttccttggaggcgctgccatcatatccgaaagcatttggcgtgaaagaaacaacatatctcatgggggcacgcctacccctccccacattatcatccaacatattaacacaagaataattgaaacaacggaggatgtgcgaacccggcaaattggtttgactgaactgaatggcttcccccccctcccggatgggtgatgtgtaatacggatgtctctattgggaatcat

SEQ ID NO: 103189 - DNA, 689 bp, Cannabis sativa
gggtttttgaatgggattagatgaaaaaaatatggtggaggagaagtattttcggtgtggaggttagggttaagaatgagagaattggttttgaaattatgtggcaatcggcttttaataacgtgtctgaacacctcaccgcggccaaatatgggctcgccgcggccaaatagcctcgaaaatacaacctttctgcccaggagatatggccgcggcggcacctccctcgccgcagccagataaagtcgaaaaatagcctttctgtaaagcccatatggccgcggccatgctttatctagccgcggccactgggccaaacccaaaaaaatttacttttctttttttttcagtacaaaaatttagagaaaaccaaaaaaaatgttttaccagttttctaaacaagactagaaagaacaactaaaacgtaacaaaattcaactaaaacataaagaaaacttgggttgcctcccaattagcgctgtttttatcgtcgcccagctagacattgatcgagttcctcatagtggcgccagaatcatggcggacttggtttgatcaaattgacctcccaagtggagctttaaccgctacccgttaactttgaaagtattggggccttcacctttcagttccaccactccataaggaaatattttgaccactgtaaatggccctgaccaccttgactt

SEQ ID NO: 103190 - DNA, 512 bp, Cannabis sativa
atattgaaattagttttatttagggcacaaaacccaacaagagatacatttcattactagattaacccacaactcagggaaacccaattgtttcatcattcattcaatgaaaccccactcaactctgtcataagcattagccataccagctctaagagccaagaatccttttttaccccgtttatgttttttggtgagattaaaagtatttaaaaccaatcatggcattatcagtgataagcttacttggaataaaagtactctgctcctcataaatcatataaaccaaaacaatacgaagtcgattagtcatcatcttcgtaattaatttgtaaatcacatcacaaaggtttatcgggcaaaaatcaatagtttagcacgtctcctttaattttggaatcaaacaaatagaagtatcattgatacaagccactgaaccactaccattaaggaactcaaaagccattttataaagggatattggcggctaaaacacctgaactttacggttt

SEQ ID NO: 103191 - DNA, 511 bp, Cannabis sativa
  modified_base (352)..(372): a, c, t, g, unknown or other
gtatgaagaaatattaaaaattttattaaagaaaaataatgattaaaaaaattatataaatgtgataatttgagaaaacaataaagaaagaaaacgaaaaacttatacaaagaaaattaatttaaaatagtgagtttttatttgattatagattgatattagtggttaagaataattataaaattataatataaaaattagagaaaaaagaaaatagataaataaaatatatatagttctaaaggattttgagaatgaattattacatagaaaatataaattgacattttatttacaaaaatactttcataaagtaaaaacaatatttatactttttatgtgattttaattnnnnnnnnnnnnnnnnnnnnntcatcacttacacagtcagacgatagttgtcgggtggttgctgcgtggttgcgcagtagttgcatcagacgaaggtttcaatcaaatgatggttgcagggaggttgctaggtggttggccgaaggttgtatcagacgaa

SEQ ID NO: 103192 - DNA, 1294 bp, Cannabis sativa
gtctttttactccaataaatgtggatcaatgccccgagaatgttccaccaaacacttcaccaacagccattgacatcactactgctgctacttctcctaagcatctgagacgcaccagcagagtgtcaaagcctcctggataccttcgagattacgagtgtcattctgtccttcatgacagatcctctacacctcactcacttgataaattcttatcttaccataaactttctgattcttacagggcttttattcttgcagttacggcactctttgaacccacatcatacaaccaagtcgtgcatagtaagatatggaacgacgctatgcaaactgagctctttgccctcattaaaaacaagacatggactgtggttccattgcctccaaacaaacgtgccataggttattgttgggtctacaagatcaaatataatagtgatggatccgtcaaaagatgtaaagcacgccttgttgcacaaggctacacacaacaagaagggcttgatttttttgacaccttctctccagttgccaaaatggtcaccttcaagttactcttagctatctccaccatcaaacaatggcctatccttaaacttgacatcaacaacgccttcctcaatggagatttacaagaagaagtatatataacattgccacaaggtcttaacttgtccactgccactccacccaacacccttcttgtttgcaagttgcataagtccatatatggtcttaaacagtcctcaagacaatggtatcgaaaactttcatatgctcttctcgaagaaggctttcaaaaatctcttgctgattacaccctcttcacaaaagggtcacatgagacttttattgccctccttgtctacgtcgatgacattgtcataaccggacctaacctttctcttcttcatcaattacaagagtctctcaacaatagattcagcctcaaagctctcggtcctctgaaatacttccttggttttgaaatagcacgctctatagaaggcctcttcttgtctcaaagaaaatacactatccaactacttgaagacaccgggtatataggcagcaagcccaccaagactcccatggatccacgcctcaaacttgatgatgaacaaggagaacccctttccaatccctctccttatagacaactaattggtaggctgctctacttaactctatcaagaccagacattacatacgccgtcaacaacctaagccaattcatgtccaagccgcgcacaccacatctacaagatgtccatcatttaattcggtatct

SEQ ID NO: 103193 - DNA, 596 bp, Cannabis sativa
agttgtcaatttatcttcaagaattgaacctctgtcccttcaggaagtgcaattcatgctccaaagtcaagaaatgcgaatccagcaacacaccactgattctttacataatgttcaagcacatgttgcaagcaccagaggttcttttccccctcgtggattcagaggtgccaatcgaggaggccggttcaacaccagcaacagaggtggccgtggcactagacctgtgtgtcaactctgtggtagaactggacacattgctgtcaagtgttaccatcgttttgacatcacctatacaggtgctaacaccagcaacacctcttctaatccatctcccaatgataacccccaggcacttatctctgaatccaacaacaacaacaatgacaactccacagcatggtatcttgattcaggtgctacacatcacatgacaaatgatgccaatcaccttactacttctacagattacaaaggaaaagctcaagtggttgtaggtaatggcacttctatccctattcatcaaattggttctagttcagtgtgtacaaaattttctaatcatcctcttgtcttgcaagatattcttcatgtgc

SEQ ID NO: 103194 - DNA, 588 bp, Cannabis sativa
caatctgaaatcccttcagatctaatgacgatgatgacactgaactcccttcagtctgaattcagaaacaccaggctctgatctttctggcatggatatccatcaccaagctatgcaatcagacctgaaaaacaacaacgaacaatacaagacaccacgcacaaacccgcacgatatatctggactaaccaagattatgaattagctagctaacccgtttacagaatgaaactagctatttatagacaatagttcaactgacctaagaacaatttataccaacagttaaaacataacagattcacaaggactttaacagaaaactggtatgcagttataatagattaaaaccacagatatgactggactcactattaatataatctgtcaaaacaatgattcttacaagcttcactcttcattttatcattaattctaataatacttatcatattattattatcggtacaatttaatatcatatgcgacagagttaataataaataatataaaattgctaactattaattaagagcatgtttgatattattttctgtcttttgttttcaaaaaattgtttttagaaat

SEQ ID NO: 103195 - DNA, 525 bp, Cannabis sativa
  modified_base (42)..(42): a, c, t, g, unknown or other
atgattcttcacacgttccaaaccaagatctttattgtctanaagaagcttcaatttctcaagtgtctcttctatctcaggttttatggtcttatcaaaagtagttaaaggagttgacgagatgagtctcatgagtgcctgagtattatacaataactgttaggggtgtcaaagaaaaagactcatacattgggttggttgatcatagaaaaaaaaaacattgagttggatataacctaactaatatacactcaaaataactatgtctaaagcatagtaaatcttagaatattttctagccaatctcatgacagagcataatattagtaccttactagtacaagtgcagccgctatgagattcacgaggaccaccaccttcaagtttgtttcgccatgcttcagtgtcgatcttgtaaaccaagtcatcagcgtcataaatggcatccttgagatcatcaagccacttcctcactcttgggtctttgaggagcttctcctcggcatcaatgagcagcagatcagc

SEQ ID NO: 103196 - DNA, 620 bp, Cannabis sativa
aagattttataaggaaataaatttttaggttactatcaagttacaagttatttatttattttaatttctaaattaatcacaaccattcattattaatccaatgactaaaaataaatgtaaccatatttgatgtaaccattaaaaccttttccatatagatatagatttataagaatgatatttaaaattaatattatgacagaattttatcataatatcattcatagtaaatttactttgtataaaataaaacaaacaataataatataaaaataatatatattattttaacaaaatttcatttttactctttcttttatatgtatatatattattttgagcttagtaattgcaagtatctaattttctttttctccaaagagttgcaacaaattaaatatcaactataccacataatataattatctatataccatatcacaaaatcgtaattttaaatttcatctcaattaaaaaatgctttgttattttctttatatattttcaaaatttaaaatttactatgtagccaaaccataattattcaactcatataaccgttcaaataagaaaatgatcaagtaataaataattacgttgcatttataatatgggtacaa

SEQ ID NO: 103197 - DNA, 615 bp, Cannabis sativa
aaggattattggtattgggggtttaaattttctgacgagtatactattaagagtgcgtttaaattattataggcaaaccgtgagggtagtgtggatggggagattgtggcgttttgacataagttttgggaattaaaactttctctaaaggtaaaaaaattgtatatagagggcggttagtgggtgtcttcctacaagagtttagttgaagactaaacatgtggatgcctctttgttgtgtctgatttgtcatggggtaggtgaatcaattttacactgtttagttgcctgtgattagggttgcacatgtgctaggttggctggattggaaatgttttaattgaccaacttaataactgcggtttggaaaaactatgaatccattcactttttttttttttaattgtacaacccaactataccttaacgatataagggttgggttgggattaatattttagactttaatatttatattacaaaaatgataaaaaagtttatttttaaaaaactgtgaattattggtaagatattaagaagtaagaacaattaaaacttacaaaaatatgataatattatcagtacccatgcatcctaacaatagaaataggagca

SEQ ID NO: 103198 - DNA, 659 bp, Cannabis sativa
agagagaggagatcgagagagagaatcgtttcagaggaaaacgaaagagaaagaaaagaaaaaaaacagaaagaaaaagaaaaagaatgaaaggaaaaaaagaaagaaaaacaaaagaaaattatttatttttttatttataattttttaaaaattttaaagtaattatttaattttttaaataattttttacgtggaccaataaaattgtgccacttgtacattgtgtccagcccaacatggcacttaacacctaaaatggacagaaatggtaaattgctaacaaaatacgagtattgggagttttaccgcccaaatttgggttttgggggttaagtgaaaccaaaatgaaagttttgggggttttgccgccatttaccctaaattttatatttttctctgtagagatagtatcgccaaatcttcaaagcaaagaccattgtagcaaagttctaggtcatgagttaggtatctctactcatactccttcaactgacaagaagcataagcaataatccaattagcttgcatcagaacgcacccttgactatgtctgaatgcatcataataaaccacaaacttttcttgatctaacagtagagctaacataatagttgtgataaattgttacttcaactcttggaaacttgcttcacact

SEQ ID NO: 103199 - DNA, 692 bp, Cannabis sativa
aaatgtgtcgaatacttgattagttaagggaaattttatttgagaaatgctaaaagacactagtgatgcttagtatcttcctatgtgtaaatatcattattagtctaactaagtatcggatctcttgtagtttaatataatagctttttgaaagtatcgctaaccaatcgcaacgcgacatgtcaagaaggtgctagacaccactggtgtctaatagcaatgctcattttagttacacccaaaaaattttaaagacaacatattttaataatttttactttatttaaaattaatattttaaattatactaagttttttcaactttttccatccaatttatattattaaaaaatatacttatcaaatgaaaataaattatattttaaatattataataaaaaaaaattaaataaaaaattatattgaagtttttttaaaaaaaaatatataaacatgaattagaaaaatttatgaaaataaaatcaaaataagtattaaaattaacataaaataaagacactttggcacatttttggtatagatatcctttgaccatcagagtaactttttttctgggtagatcaaaaagtcccattaaagaaagaaaccaaagacagtccactacaaacactcgtgaataagccaagaaagaaaccaaagacagtccactacaaacactcgtgaataagcca

SEQ ID NO: 103200 - DNA, 805 bp, Cannabis sativa
tcctgataaaatatttccaacagccttggcgggtagagttttatacattgatttggttgaagccaagcctctcacttggaaacgatggattcgggttcaggttgagatggacgtaaacaggcccctctgtagtgggtgtttcttcaatactacaaatggtgagtatcagtggatacaactaaaatatgagaagctggatatattctattacttgtgttggatgttgggtcacggtaatcaacgacaaaggcagactgtatcctctgttcggaccgtggcttactacacgtttgaactatgcctcttgcttttctagcaagggtggtagttcttcttgggtggcaaagaaacctgtggacgtttctgagattggtgagggagtggttggaggagagatgctactagttggtgagagttcggtgccggagaaggaattcaccgctccccctgttgacgatgccacgacgactcgcgaacatgcctcgatatctatacgtggtcggtttccgaggggtaggggcagaggtcaggtacggaagtcgtggtgtccaagatctctgggtgcagttgacggtgatattgccgttttcaatgctaatccccttttcgtcactctaaatattggaaagaatactgaaaatttaccctcttcagaagataatttgaattttgttaaagagagaggtacggtttgtagtccgttgacctcttttaggggctagctgggttatggggctcttaaatcgaagaggacgggtaagctgagtgggctgtggccaaggttgtgtgggcctatccctaaggc

SEQ ID NO: 103201 - DNA, 553 bp, Cannabis sativa
ggcaaagttaaatgaggcctggtcatggtggtaactaatggataaggtggatatgttgcaaatagttgtgatatataaaaatctccaatatcatgtgtatatacatcagccaagtgaattgctgaaagtttttgttgaattggtagttcatttcgaggaaccaatggagtgaaggtggttgcagcaatagtagaggatggcacttgagtgttgatagtggagaacaatgaatgattggtaactgtgggagtcacatttggcatagtctcatccattgctgtaatagtctaaaaaccacgagaaatattctcagtagaggattctccaaataacaaaggcttgggactcgggagaggtcttgcattcagttgcagaatcgtagcagttaaggtgttcctagccaaacgtgtgatgagcgaccaagcgtttcctttcgaaaagtcagcccgatatctgtcatactttaaagagggaagtgcagatccctttaaactcgggccataagctaattcaaagtcaataccattatccatattttcaagatgaacaaagc

SEQ ID NO: 103202 - DNA, 557 bp, Cannabis sativa
ataatattgttttcacttatttgtactgcatgtttttgaattatataagttttaataagttggtccccaaattttaatttttaataaattagtccccaaattatataaattttgtcaagttaatcctagaactttgttttttgaaaaaaaatttctcaaacttttattttattagaaacataaaacccttactgatcttaaatgatggtatttatttatttatttttattttaaatatttttatattggatatacattatcaaattaaaaaatacatattaatttttttatttatatttttttttttaaatatgctaaaataataagaaaaaaaaaacaaatcaagatgtatttatttacatatgccgaaataaaaagaaatatatatatatttttatttatatgtatttttttaatcaaatcaagacatattttgcacattacaaaatacaaaacatgtgtaccaacaatttatttttttatgaataatacttacacaaaatatttccgctataccaaataatttatttatacttcaagcaaaaatttcttctcat

SEQ ID NO: 103203 - DNA, 746 bp, Cannabis sativa
atagtatatgtaccaaccctttattaatatatatactaccttaataactaaagatcaaatgaaatgaaatagtaaaaaaaaaagtaatatacgatataaatatttatatcagtttaattcttaattttaaataaatatttaaatttaatttttagcagtaaacatttttaattattttttttattaaatcaggagattttaataattaataaacttattcaaaataatagaacgcactttagaggaacaatcctccaattgaagcacacaacatgtagagaaacaagagtctcttaccaagcaatgagctaacttatttgcatatcgtttaagaaaacataactccacaaaagataaagctaaaagtaaattcctaacatcttgaacaataagaccaaactgtgaggacataataacattgtccgggggatgagttgcaatccaaatcaaagcttctttgatgcctatgatctcaacaatttcaagttggacatacccaacctttcccttcttgaaagtttctactatggttccatgatgatcacgagctacacagcccactccataccgcccctcttgttcaaataaagctccatcaatattaaatttaatcttgtttaacacatgtgcaatccaacgctcacagtcccgtcccctatcattcaaaggagacaacgaaaggcccttccttccctgagcaaatttgtattgatcgcatgtttctagctgatgttacaatatttgaa

SEQ ID NO: 103204 - DNA, 617 bp, Cannabis sativa
aagtaggatttttctcagggttctccttggagggataccgtatagggcttggctccctatttttgggcctctgagtgctcggaaaggatgcctcttctgtttcctctagtcccgcaggcatggctttggggtgcacacatattccagccgttttcatagctttttgcatgccgatcattattctgttctttttgggaagctagttcggcctcatgatcaggtgctttttgccttaggaccagcaactcagtgtaactacctttgtcgtaagcatcgtaccctttgaaattttcttcatattccttgtcgttcgtctcatctcgttcctttgagcccatatttaagcgtgaagcagcctcttcaccttctgggttccgttttgaggatccttggggggcgaggttggcgtgtgttgtttcgagtttcctccattgcaactcttattctttgactattttgtctccaacaacgcttcccacggctctcaatgaaagcaccaaaatattgatcgaaattttcggcaaccgattaaatgagataatgatgagagttttagggataattaatgcaaatgatttttacgtggttcgggtattaatgacccgtagtccacgagt

SEQ ID NO: 103205 - DNA, 1028 bp, Cannabis sativa
  modified_base (949)..(951): a, c, t, g, unknown or other
tactttaattaacaatcaaagccagatgcaaatttaacttatgtggtccttttgactttgaagtctttgttttacgaaagaatcagagtccaattttgattaaaattaataatgtagtacaagtaatgaaagttctatataagaatatggacaataagaacaatgactaatacaaaacttatcaggtaatctatctggttacaggtatacacctttaatatctctgtaagcttattagcaccatcctcaccagttggtaggccaagaataatatagtgatctatatcaacatccatatctattttaatgctgaaaattagaaaatatacaggaaattagaatatacaatgttcaatcaaaacataaacaaaaaaattaagacaaaagggtgcttattattatcatattagggttacttggtaaattgcaaaagaataaatgaaagggaaaaacaaaattataggaaatataaatatatataataatttgaggtttataattatgatcttaaattagtaagaacaacagataataaagttatcaaatcaacaatacaaattgaaagaagcatcagttttatttgatcatttcagccctctacagccctctaataatttattataataataataagatgaagatgaatcaagtgatgatttttcttcttctaatattgatgatattgttttcatctcctctctgtttaaaattatcctacctgaaatgattaccaaaattagaaacataattaatatgttattatacaaaattaaatatatatatatatatatatttatataataataggaggttttttttatttttatatttaaagtaatttttttttatatatttttacgaaaatctatataagaactaacagattaacttaaattgcaaccaaaataccaagatctatatatcaattaaatttgaaaaaaaaaattannnaaataatatataaaataattctccaaataagaatgcatattatataaataatgaactcaccaattattagtcataaa

SEQ ID NO: 103206 - DNA, 855 bp, Cannabis sativa
aatatacctacattaaatgggataaagctttggaagaggagctgccatatttacatgaggtgcatacaattcttgttgaggagggtcgtcatacggtgcctgatgagaggcttctcttcgtgcatgtccccctgttcaggtggtctcttaagtcggactatcttctttggttcaaatggtcccagaggtccgaattcttggtgtcatgagggagatgacgagggtgatcctcgtagtatggaggtggagcattatattaaggttagtcccacattgctaatgtatagaaataaattgctatatataagatgaatgagctactcctctcattgacaattagttttgagatggaacatcattcatcttatcctcaaattctaatatggtatcagagtcacttgtgatctgttgtaagcccaaatgtcacgcggtccaaaaattcgtttgtgattcgttgtaagccaaagtgctactagtccaaaaagatacttctgctatcttccctttaaaaggaacctttcagccaatgtgtgccagtttccagtgttggggtctttgacctatttcaaaattcacaaatttcccgacgtgtacacccacaaatttcctgatatttgggcttgtgggattttttcagatatcacgttcggccatgtagtctcttaaagatcgttcgttatacccacactttcgacgcccaaacgaaagcataattcttcaaatcactaaatagaatttgttttgctgtccatttaaaagaaaatataactaaatttatgatcaatttttttatccttaaatatattaaaattaaaaaataatatttcatactaagttataaatattttaactatt

SEQ ID NO: 103207 - DNA, 733 bp, Cannabis sativa
ttgttaaaacaaaaaaaaaaaaaaaatcaaccttaagattaactttctatttatatataggcatttagttaccaatttttgcgttcaattatttaattaataaaataatataaaaggaaaatcacataatatggtcaaaccactctagtagtggaccatatctgatttttttcaatattaaataaaagtccagttatttaaaatattattttattttcagtacaattaagggccagtttggcacagctgtgctgtggcaaaaagttactgtagctgtgctgtggaaaaaacagctgcagcagaactgtggaaaaaagctgagctgagtgtttggcaaattataaattttaaagtactgtgaagttgttaagatctattataatgacaatgataatgataatgtcataatctagtttattataatcacaaatatgtaaaaattttattttatgaaatattttattttttatatatttttattttttttttcaaatataaatttatgtgcatttgataaaaataatttatagtattgttatattatgttttatcaaatctagaaaaaaattagaaactcatgtatataagaaaaattttaagttgatgtcgtttattaatattaaataaaatataaattatttttgtttaagaaaaagagatttcataattatttattttattataattaatttattttaactattttaagtttttaatatataataaataagta

SEQ ID NO: 103208 - DNA, 614 bp, Cannabis sativa
ttttttaattagatagttaggttttactactacaaaaacggcttttcccaacggtttataaagagtcaattatgaaaacggttggaaaaggtaagcagagacttttcccaatgatttagaaccgaggcagaaaaaccgttggaaaaaactaatgccaacagtgaaaaactgtgggcaatacaaatttgttctaataattactctgtcggtttttatatgagtcatttggattttaattgcaatttaagttgctctatataagtttttatgtaaatttttgtaagatatataaaaaaaattattttaaagtgtaattttttattttaatttcattatgataaagtgatcctaattatattttcgttatatgtaactataattgaaatttgtactatatttaactttcaactatcttctcttctctctatataatttattttttttcaattttattttgacacattataccccataagataaaattcctctcgtcaatcagttctgttttcccttttggttcatccttcctattattcacatatgttcttatacagagctagtggcctatcggctatctcccttgcctcccctataaatttgttaattatttatat

SEQ ID NO: 103209 - DNA, 549 bp, Cannabis sativa
ttgaccagagtgacccattactgacaaatcctgccatgcaaactcctaggaatacaagggtcccaccaggaatcaatcccgagcatccaaacgcgcagccacctactgtgggccaaggtgtgacttcccctttggctgggatcacaccaggtgtgcaagagactgggaataccagtcctgcagccgatcaaagcactcctagcacgagaatcccatccacaaccaatgcttagacgacagtaggggatgacactgagattcagaacctccgtaatgcccttggactcatgcaaggtcacactaacaccttgcatcatgatcatgaggatctctgtgctgcaatgaaccttgcattcaaagagcagaaacgtcagttcattgaatggagggatagggagatggaaacattgaaggctcagcaagcggccatcgatgaccgaacaaggcaggctaccgtactgatacggagagcctatcaagttactaatcaacaaccagccactacgtccagtatttttgtaacgccctaatgctaaggcacgctacagt

SEQ ID NO: 103210 - DNA, 682 bp, Cannabis sativa
aaaacaaataaaaaaacaaaagaataaaaaaataattaaaaaaactaaccatcttctgcacagcctcaacacctgatgcaataaggactatatttgcaagctcagttctgaaaaatcagataaaaaaaccacttttatctttctaaaaaacgtgaccgaaaacttcaaaaactaaagaaaaaaaaatgagacgaagatgaagaagaaaaactcaataagaaataaaattgggccaaaaaaatgaagaagaagaagaactgaataagaaataaagttgggccaaaaaaaatgaagaagaagatgaacaagagggagagagctcaaaaacaatgaaaaacaaataatgtgtgtgtagttacccattaattcaaaatgagtatatatataaacatatatatttttcttgagaatgatgagatcacatgtgctgttgtctaaatatttttaaaaaaatataaataaaaacatgcattaaaaggtgattgaacttttcatcataaaatttaagtaaaaaaatacaaaaataaaaatattatcacaaaagtgacatgtctaatcaaatcagtaattaaagtttatgtatttactcatagattcaagataaatatatatgtataaacacatatattttttcttggaaaggaggaggcatgtgggctcttgtctattttaatttttcatt

SEQ ID NO: 103211 - DNA, 644 bp, Cannabis sativa
aaaatataaatttgcattaatttttaacatgttatgcaatgtagaaaaaaaaagacgcaccccctcacttataaaaaaaaaagtgttgcccccctcaacttaatttttaacatgatatttgttgactattttacctttataagtttaatttattacaattttattttcttttttgtcttttccttcacaatcataaattgaagtcaagtttctttcaaaactctactttctaattacataaatatcctttcatgttgataataaaaagatattgtgcacttacaataattttaatagaggaaattacatttattataggattttaaaggttcttatgataaatatgacacatttaagtttgatcaatttataaggtatttttttttatttttacgtctttttatggtatttgatatgttatatatatgtaattaggttttccaataccatatttaatgtttttatttgtttaggaaattttatttgtcactgatgccggaaaagtcaccggagtttgctgtcggtgccggaaaagtcactgaagtagcggtcggtgcccaaaaagtcgtcgaagatgctctattttatgatgttattgtatatcttttattttaagttttttttttttattattttgtttttag

SEQ ID NO: 103212 - DNA, 631 bp, Cannabis sativa
  modified_base (56)..(58): a, c, t, g, unknown or other
  modified_base (423)..(423): a, c, t, g, unknown or other
taatgattagattttacctttaacaaaaatttaacttaattatttctaataaaagnnnagagcttaaaattatctatccattaacacttaaataagagaaaaaaaatcaaacttaggaacgtaccaatagctctatatgcctaatttattaaacctgaaacatacactctcgttagaaatgctaatataatgactaaacttgtttttttttttgccatagcatactctatttgagtcacaattcatttttgaaaacactcctcttaaactcttgatttatgaaaataagtacaacctatcaaaatcaaatttaatttatgtaatatagctacacattgaatcatttccttaaattttccaaaaaatatcccattgatcgaatcctacccacaaaattcaaagacatattcttctaaacacaangaaaatttctagtcacactaaattcgtacacacaagatgtaatacaacataaaacatataaacctaccatgaacatattgactaaaacttacagtacagtgagtcgagctcgtctcgtggcaatgaactttacatgttagaaataaccacattctttaggaccgtattgctctgataccatatagtaacgccccgatttcccgagacg

SEQ ID NO: 103213 - DNA, 660 bp, Cannabis sativa
  modified_base (323)..(342): a, c, t, g, unknown or other
taaccaactatcatatatattgtccactcacattgtggcatctaaattgtttaattttatcatttttaagattaatgttacaaatagaaaaatttaataataatataatttaaaagtattaaatgcaatattatgtaataatttaaaaaccgaaatgtttgattttatctttctgtaaaaaaaattatctttaaatgatttttataaaatttaaaaataagattctgcatttatttatttgagaaaagattctacatttacttaaaattatcatttttaaaactaaggtgccgtttgctaacacttttattttttaatttttnnnnnnnnnnnnnnnnnnnnaatttttgtttttaaaaattttgtttttcaaaaacaaaattgcgttttgtaaccacttttgatttttaattttaaaaacagaaaataaaagtgtgtcctgtaaagtttattttcatttttattttttgattttatttacgtcgggtttaggtcgggtttaggtccaggtcgaattcgggtaaaggtcaaaggacaggttcagcgctagggccgtgggagtatttgtgtccgagtttgatcgaagttcaaaatattgattgagaaaaaaaaaccgtttgaaaaaatattgaaagcgattttcttttgtttttaaaattt

SEQ ID NO: 103214 - DNA, 620 bp, Cannabis sativa
tctctctctctctctctctttacactatcacgatttttactccataatagtttaattctatttagattacaaatattgatagctatttatagatttacattgttgcctaaattatttccgagaatatcgtggcacatttacactgtcttaaatgatccagctcaccactagcaacaataattcacgttagcttaaagacgtgctttcagtacgaaccatccgggagctaaattactcataagccttttgaattcgtacaagcgctccttcccaaatgaaaaaacaaaactggcaataagctattcgaaaatacatcttcagactaatgacaagctatctagagagataatacatacacaatacaagcttatttggaaacaccttccgaattctacaaagtcttccacacaagatttttcagatccacaccaagctttccatatctattttccagattaacaatttcatttctagatgacaaaacttgtaaccataatcaacaaatctccaatttgatttcaagttgaagttgcttgagaaatcgttgttataaacaatgttgctccctcagccgctctgggctcagctgactccaattatatatgtgtatgtgtatgtgt

SEQ ID NO: 103215 - DNA, 622 bp, Cannabis sativa
taaacatgtagtagatgatggttggttttatatcaatttctctataattaattaataaataataataagtttctagatttgtagtagtgcctaatttgaatttattaaaaaaaaaatatttatgttcatatatatggagtgatttacttgatactatgcagtgttgatcctattatatatggaactaggacaaaatttaattttgggactcttatatatagtttaattaaaattaaataaaatttttagtatttggtaatttttttggattggaggagatacaaatttaaaacctcctctttgtaaggagaagtgtggatctactaaattatgtttatgatcacgaatggtaaaactttttaaaactcttaagagttaaagtttcaatcttccatagttacatattaagtattttttttttcttaaaaagtagagattgggaattgatccctaaatctcgtacttaaaataagactttcttccactaaacactattttgtcctttaaaaaaaagtattattttgtatcttttcttattattatttaatattttatctatatacgtagtgttaacaaaagaatttgtgcaagagaaatcctctgttactcatcaaaatttaaa

SEQ ID NO: 103216 - DNA, 636 bp, Cannabis sativa
agtaaactagtattagatgtatcagttatacatcagactagaccgatattgatagcggaaaagatattataaacttaccgttatctcttttctaagttgagttcacttagttgattataggccaattgatctcaatcctgatatggctatattttagcttatttgtactatacgggttctttaacttgtttgttaccagtttacccataggacgtactagcccatacttatatctgggaattatgtagtgtaattaagtgagagtgttactcatagatatggaatctataactactataactatttaaaagtgaaacaatagtttctttagaacttggttaaaacgacataaatagaagatctcttatttcaatattatattaatttactaaaatatcatttataagtagctaaatattttaaggataaaatacaccaatagataaaacaataaatttgttcctactcaatgtaaagtgtcctagaggatcaataattgtttagattgaaataatggatagttcatagcgtatatgtatttggtatatatagtgttctatgtaatctagagcgcaatttcaaatttatagtggagtcaagagaaattaataagttaggaaatttacttagtaaatt

SEQ ID NO: 103217 - DNA, 584 bp, Cannabis sativa
atatatttttgaaaatttttataatggaccctttaaaatgggtctattaatacgtctcttatctgttttgatatttgagaaaattttttaattcaatttttttcgtgattgacaaatttagaaaaaattaatatgtcgaaaataaagttcaaacagcatatttcacacgcgaaatagactgtttgaaccctgttttcggcttgaatctttcaaaattttgcagtatgtcttaaataattataacatagacgaccatgaaaaaattagattaaaaaattatcttaaatgccaaaatagataggaaatacatcgatagacctattttaagaatacattgtaaaattatcttatattttttttcttgaaataaaatagaaaacttcattgaaaatgaataaaagaaaatctaatttttattgttttgtagatgatgctcttttggtaatgtgtgttaggagttatatttttttatattaaaattttattgtctaattttttaaggtatcttatagcattttagttagatgataaactttattagatagaataaatccaaccaccaaattttagcaagatccaacaat

SEQ ID NO: 103218 - DNA, 580 bp, Cannabis sativa
tttttaaaaattttataaatatgtatggattggatttgatcggtaacttttacatttcaatcaacatctaatctgcacaagtgcagattttgaattttctaattcagtccaatccacaatttatagattggaatggattttgtcgtgcagattgaattagatcgactattttttgaacatccctatataatatgtaagaaattaacgaaatctaaataagtccattgcaaacttgtgagttgagtaaaacgcattttataaattcaatgctatgctatgtttgaccaatttattctattcatcaagtatcagattcatagatgaagagtagtgaatgaatttaacacattggcatgaaataaatagtgatcagtatctatatatatatgtatgtattgtagacattgaataaggaacagtctgtgcatatttataatggtctattatatgtgtacataataacttcgaaaaataaaaggcatgggctttgacttggtcagcaattgtaaataggtatacattaatatataacaatgtcctgagaagaaatttaaggtgcaaaatttagttagggctataa

SEQ ID NO: 103219 - DNA, 741 bp, Cannabis sativa
tatgcatttgacgcttgattttgttattatttgtggtatctctctactttgtttacataatttgatattggtgatgagatattttatttttacaaagctaacaatgcaggaattttattaaaccaaaggtcatttgatattagttattttcctactgggctttataagctcaccccctattttctcctattttcaaagaattcagtttgatgctagtgaatgatgatggtaccgttgaggaagaaagtcgttattagtttagtcttattctactatttaatcttccaatgaaactaattttgtattgaagctgaaaaatgaatggtctggttgacttaaattagctatgtactagttaaaaatgaagaatgatggatgctaggtattactttggtattttattgacttattaaatttatctattcggtgactacataactgtgggaatattattattattttatattgatgagtggtcctgattttgttactaatattttcttattaatataggagttaatccattactttaaaattagtattttgtgacataaattaaaggatcatttataagctttatcttcctacaagggtcaaagtgtgacctttcaccacccaagttatggatattgtatatcagccacggcttagggctccggtcgtgacaggttaacctagggatgttcataaaatagccgatccaatccaatccgcaaagtgcggattggattggattgaaaa

SEQ ID NO: 103220 - DNA, 670 bp, Cannabis sativa
aaaatattatttgtatatataattatttaattttttttataaagatgtgtggattggatcagttacttttacatgtcaatcaacatccaatctgcacaagtgtaaaatgtaaattttaaattttctaatccaatccaatccgcacaagtgcagatatccgcactttgcagaatggatcggattggatcgtgcggattgattggattggatcggctattttatgaacacccctaccccaaattgtataatgttaattacataggtatagaagttagatggcgtttggttaagaggaatgaaaacataaaaataggaatgagaataggaatagaatgaaataaaatttaaaatgtatgaaaaagattaataaaaaaaatgaaatagtgtttccttctatttcaaaatgaaatagtcattctaccaaaatggtgggaaagaccattctattaaaatgatataccaatattttaatatgcaaccaaacaaagaatgaaatgaaaattatttcttttcctttccattccattatctctaaccaaacgccactttaagtggcgtttagttgggaggaataaaaatataagaatatgaatgggaattgaaattgaaatagggatggaatatctttatatattaaaagtgtctatctaacggcatttcttggtttaac

SEQ ID NO: 103221 - DNA, 1027 bp, Cannabis sativa
aaatggtaaaaataggaccttgaacttaatttttgataatttatttttaatataaccaacttgaagacaattcttaatacgaatatatagaaaacgtaagcagtttatagtcatagtacttttagatcagattataattaaattttattttgataaaaaattaattcagggtcctatttgtactattttagaatatacaaggtccattttgtcatttaataaaatagagggtccaattagtaaattttgcaaaacaaaaggtacaaaatagtatttaccctatttacaaatatataagaaaattatgttaaataaaatttttatttttctaaatattttttattatttttctccttagtttaaatttatatgcatttgatataaataatttataatatttttaaattatattttatcatgttttaaagaaaatatagtttataaaatcactctaagttgatgtagtttgttaataataaaaatataaaatattttttaaaacaaaataaaaaataaaaaatttaaatattatttcttttaaatattttttgcttcaaaaaaaatattttatttttgtaatatataataaataattaaatacatttttagtacaaattaatttattagtctttaattaatttttcttttaaaagttgggttgtaccaactttaatttcttaataaattcttcaatagattattttttaactctttaccaaaaatatttttgttacaatttttaaaaagtaatttttagcttttttgaaaattgtgctaaatggactattaatcacatatagtaatatttaatataacatatataaaaaagatatgaattgtgactttaaatttaaattgtgatgtttgtgactttaaatttaaattgtgatgttttttttttttttaaattatacagtgtatttatacacatgtacactttatttgttggactgtttaagatatgcatttattgtataattactttgagaatatatataaatagttgttccattgaaaaaaactaccc

SEQ ID NO: 103222 - DNA, 990 bp, Cannabis sativa
  modified_base (62)..(67): a, c, t, g, unknown or other
atttatatatttttatagaagtgtatatatattatatcacataaattacatttattagttannnnnntttgtatttaaagtttagacattttagtgtgtaacttaaaacctagactttatagttaataatttttattgtatttgaatattgaagttaaagtttaaaatctctaccatattttattatttttttttaattgttttattcaatttttttatgtttacacagttatatttatcttatattaaagttgttaaaattaatttaaactatagtattttttaacttaaaatataaataatatatatatttttttttaaatctaattatttgaatagtagaaactaacaataataattataaaaaagagtgaagaacggtttggacgggttaaccgacgaaatcattgggcgggttgaactttctctaatttttgattgggcgggttacgattaaatatttacaacccgatatttatattgggttgataaaaatatgctataacccgactaaaccgaccgacgtacacccctaggatgtaggaatgcacatttctcctacggggatagttccttagggacccgccctaaatagggcagggattctccatttaaataagaagcgaggattattttttgtccccgaatgttaaacgagatggggatggatcacactccccaccccgacggagacccgtttaatattttattttatatttctagtaatattttatattttataatttatgtttatattttttagtatattagtattcttttttatgaattttaagttgtgttttgaataataattagtttattgaataataattaatgtgtaatattttaattttttatatagtgtaatatttttatatatttaaatttttattataaactttatttttttattaggaaattctccgtcccgttcccgccccataagggattccctgccccatccttgataggaagataccctagtttggt

SEQ ID NO: 103223 - DNA, 507 bp, Cannabis sativa
tgtcaagccgaagtatggttgcacaccttaaaggcaggtttagtagcttattctatgtattaaaatttctctacatatgttctttgtgctagttcgatgtattgtatagtgtgggttccccccaagtaaccatgcatgcagagacttaggtgtcttggtcacttgttattcactaagtttcatagaccttgcctaggactttcttggggtgctacccattgtatgcatgtggaactaaaagaattactttaagaagttaatcttgttagcaagtggtttagacatagttggtcttacgtgtagtaaaagcttacatcttagtgtccacttttgaaatcacgttgtagcaacccctacgtggcttactatgcaacgaccatcattgaagagtgatgggaggccatgctaaaaagaaattggaactagctcttttatgggtccctgcacagtgaaacgttagaggaactaattgacaagttggcaagtgagagtacttaccgagatgtt

SEQ ID NO: 103224 - DNA, 618 bp, Cannabis sativa
ccgtggactaggagtgttcgttaggacaatgataccacgtagaaatctcttgtgtcaagtaatttacttttctgcaattatttttgtattctgtttgttctattttattgcaaaactggtttctgcagtaccagaattagattctgcttctgcagacatatacagtttatattttcatatatattattgacatttaaaaaaaaatagtttttcaattggtatcaaagtgggacactaaactctttgtgtgatccttctaacgtttttgtgtaaaatgtcattttttgcagaaggaagttccatttccagaccacctttacctaatgattctaattatccttattggaaagttagaatgagggccttcatcaaatctcaagatgagaaagcttggaggatggttctatcaagtaggccttctccagttgagacagattccataggtaattctaaaataaaatctgaattggaatggtctattgaagatgataaactttttgcctacaatatcaaagcgttgcatgctatattaaatggtgtaggtgaaggttatattaaacttatatcatcttgtgaatctgctaaggaagcttaggagatccttcaaactcagtttga

SEQ ID NO: 103225 - DNA, 513 bp, Cannabis sativa
aagaacaagaagaacctcgagcactaggtaggcgaactctagtctcgtgttcaggaattgagggaagaactgaaggcagccagccaaaggtcatctgagcacgatggtgccatggtagaccaggctctgtacagcatttggtgtactaatcctaacactgattttagctctttcggtcctgaagcagttcagcaggtcgctgaatggagagcctactttgatcggtctagggggcagttactgagttgatctcctcttttccactaccatatattttgttggtgacaccctccagttatgttagtatgggtgtctgttataatttttgatgattgtactgaacttatttattttcactgctcttcttttttttggactcggtagctaatgtcttaccagggggcgtttccctatccccccgctagcggattttactcattgttcttggttattggatctcactattgggttttatgccctaaataaaactcatttcagtataatcagatttac

SEQ ID NO: 103226 - DNA, 685 bp, Cannabis sativa
tattttggtgacatttttaaaaaatttctaatttgatttgagaccatatcctatattgttgaggttgaaatttggccaacactcgttcgctaaattggcgagaagagaaatgtgtttaagtaaatagaaagacacaaaaaatttatggtagtttacttctcatgtcgtgacggtaatggatctacgtctacttcaagattttatttttcatgagatttacaaaaaaaaaattggccaaggcaaggcctctaatttctagagagggaaagtaaagaaatatgtttagaccttatgagaacttagaagaatttgaaaaaggagctaaaggagctctcctttggaaggagatcttataaaaacattaataaaacaatacaaaaaatatgaaaaaaaatcactttggattgatcttggtcattgatgatgatctaagggtgaaaattgactcttgatgaaaattgtcaattttttcgaagcttgaatctcgtccgtggaattgtatttaggcaatttgtggaaaaaatttgcagttgtcttgagcacaaaatttggacttgaaatcttcagaatcgcgatatgggtgtgagatatgattgatagatctttgaaatagcttcgaaacacaatttgaatcgcgtcaatcgacgtccaggttgacaaaccagcgcctaggttgataacctag

SEQ ID NO: 103227 - DNA, 583 bp, Cannabis sativa
gctcgcattaactttaggtgaggcacctttatctgctactgttatgcaagactttttagttgtctacctaccctcgacttacaacatattgttgggtcgtccagcactaattggagtaggggtagtcagtttgatcaagcacttatccttgaaattcgaaacactaaatggcgtgggagtggtgcgtggcgatcagatgttggctcacgattgttatcgcatagagctacaacatagaaaagctggtcatcagttgatggcgatcttggcagaagaaactgaacagaaagatgaagatcttgacccctgacttcaagatgagagaaacttactaaaactaatcgaggaattggagaaggtcattctcgacccaagaaatcccacaaagtatgtatacattgggaagaacttggatgagcaggtcaaatagcagctaacaagatttttggatgcgaaccaggatcagttggcctggagccatggagatatgatagggattgaccttaatattatctgccatcatttaaatgttgatccaagttacccagcgaagagacaaaataggagacccttggattccgag

SEQ ID NO: 103228 - DNA, 881 bp, Cannabis sativa
agctgcagaaggggggttacgccgccagactttaatacttacggcagttctaatacgcctcctcccatgcggcattaaatgcgaggtgactgtttagataggatttgacgtctcccggaggtgcttcgttatagccttgctctccggagtgtgtgaaaccttcatgccttctccgggaggcatgttaagtgctgatccttttaattaaggggacttagtcgaatcatctcaaagtcttgcttcttcaatctacgtgtcacaacccggttggtccacgtattttggacaaaataaggggcaacaactgtatatcgtcttcttcttccaccatcatcagcccttcttcttcctttttcaatatggagcagaaaataaaaaacaataacccatagaaatcacattaataaataatacccagaaaacaaaaactcacaaactaaattctaacattactcaaatccatacctagtctcatgtgcataatacaacacaaatagaaattggatacactgccaaataaatccaaaaaattagttcatatggagttccgattgttggtacactgtcagctcatatcgtttgctgaagtttcgaaatgccctctaaggagtgatcccgaccgtcgttggatctccaaagaagtttcaggtactctcttcgtagcactagatctgatttaggggacgagtttaagtgcgagataaagctgcgaaagataataaatataatttagatatcaaagcaattagatctgacaaaaacaataagaaaactcattcaaaatattttgcaaaaatgcataaccaaatctgaagcacccagattccggcgatctcctctctcccgtctttcgccagcacaaaccatcatcgagccctcgc

SEQ ID NO: 103229 - DNA, 725 bp, Cannabis sativa
taaaccatataatacaattctctaaaggccccaacgtcgctttccaccgcttccgaacacaaacacaggaattggataattaaacataaaatagcataaaaacatgtatgatatataaaatataatttctaaaatatgcattccataattattaatacataaaccttaaataattaataatacaaagtactattcataggcggtctttacataaatgctatatttttataacttttttttataaaatatcatattccacgtaatttttacatatttttaacaaaatggcaagagaggcgagagcattaatagatgaactgaaagacttgtgggagacaaggcaagcgttgaaacatatgtattcatataatcacatgaaatcacaaatattaaaaactcaaataaagtaaaatttgaaatcagaaggaaactaagaaagattgattaacctaattctaatactaaattaaaataattttaacacaaataaccattaatcattagttacctttgctaagagaggaactttgtggcaagcggagccactttacccattattttgattcgaaaggagaacctaaaataataaaggcagatcgtaccttgaccatatagattatattataacatttatattatatactgagagagagagagaagtggaggaactctcgccttccatctgaccaaaagaaacactgatattcgatgaccgacaaatgatg

SEQ ID NO: 103230 - DNA, 519 bp, Cannabis sativa
ttagggcacaaaatccaacatcaaggccactggtactttagtgtttgataggttgggtaccgcacatgacctcaaaactgatctaaatcacagaaggggcctggacggacaaaatgttccactaattgtccaaccaggcatctgtacccaagatctagttgaaagagatcccaatgtgacacaggccggtgaacaagacgaacaagttcatccacttgtggagggacaaatagatcaacttaaaaatattgtacaaggtttgactggcccaaaactcactgatctcgaactcaacctactatgcagatcacctttcttgcctaaaattgaagttcttgaactaccccaaaagttcaaaatgccaacctagaaaatgtatacaggaaaagaagattctttatcacacctaaaatattatgagatgtagatggatctgcaaggggtaaggggtgatgtactgtgaaaaatttttcttgccacactcgtagaggctgcccagcattggtatttcaaactacc

SEQ ID NO: 103231 - DNA, 560 bp, Cannabis sativa
gcaatacatgattatcaaattaaaacattgacttgtatgattaggcaatgtgatgtgatgaagatagttactttatgaggtaacatatatataattcatattattaaatgaatataaattctattattggtataatagtcttgtattaccaaatatctatatactgatgtttattcgtggcagatgccagtaatgatttagatttcatcttatgagcaatgcgtgattgtttgagtttgattgcgtataaatgataatattcgaataatagactatatgattattagtattacttttcttgctgagttcttgtgatttacaggtgctctgtgttgcaggtaaaggcaaagaaaagctaaatcaaccataatgtgacagtcttctctagcaatgtacatattgacttaagcagcctgtgtactaagttgccaagagttattttgggctatatctgctatgtatttcgatttttgtgttttgaattgttgtcgtacatagtctttttgtaaaccttttataacagggaaacctgaaacatatgttttatgtcgttataatgt

SEQ ID NO: 103232 - DNA, 878 bp, Cannabis sativa
taaatatataaataaaatataaaatgatatattaattatttagcggtaaaagagtaaataaaaaagtaatatttattataatttatattttatgctaaatttaacacaaattttagcatctattaaatttagaccaatttatacatcatcattggtgttcactaattttatgaatatctactaaaatatgcatatacatatacactatacttttagtactctattggagatacacatattatgttactttgtattttacaattctatatatttgatatcttaaatcctaaaatttaataaatatcactaaactgtcatcaactaatgtagttgatagcattttttttagtaaggatataacagagagcaatttttttttttcagcaatataactgagagcaatttgaatatgaatatcttagttaaatgttattttagggcactaattatatacaactccaagatacaatttcaaaatattggattgagaattatttaaaacgcagaatagcaaaatgtttagcagggaacaaaaacgaaagggaaattaagaaagaaatactaatgcttctacttacttacgtggacctgataatgcatcaaaaatatatattttttgtgaggtatcaaatatatatctttaatttacttattttgaaaaattaataatagacatcaataggaaacattaatactcggtgcgaaaatttgataaaacatgagttgtaatgctgaaaaaaaaaatcgacaaaaaagtattttttttgaatgaaaataatctttattagatagaaacatccactaacataatggactaaagagcaatgggaacatgaccctcagtaaaatgatggcctgaccaataacaaacaccacgt

SEQ ID NO: 103233 - DNA, 501 bp, Cannabis sativa
gagcctcccggatacccataattttaagggttttattttttatttttacacttcatcccaatttttttttatatatttttacagaatttcacatagaaatccctgtagcaattaacggagcaacttaaatcgcaactaaaatccgtatagcaacccacatagaaatcatcgaagaaactaccagagcaatctaaacccaactcaagttccacatcactagaatccaactcaagttccatattaccataacgtcaaataatacgggcttcaaccaaactgataagttacaagaaacaatgcaacatcaacattcattttaataaatatgtaaatactaatagaaagaaaatgttaatatgtaacattttttttttaacatatgtgtgagacgagtgagtgaagataaatattaattatgattttttttacatatactaaatcatatttctaaacttttttcaccgttaaaaatttatcaataaatctaacaatcttttaata

SEQ ID NO: 103234 - DNA, 874 bp, Cannabis sativa
tttaattgttgttttacgtaattaagatttaaatttcattctttcttttgttattttaagaaattggttttactgtatcagatttatgtaatttgcttactttatgtaactggtattaatgtgtcaatttttaattggttgtttaacataactggttttggtaatttaaatttatttatatgttaagaattctcttgtgatatgctttaatttttttttttaattaactagctatttcgtgtttcaatatatctttttattattttacttaggcttattatattttatttctatattaatgattagttttgtttcattagctatctaatgtaattggtttcttcattttttttagaaactagtttttatgtttcaatttatctaatgcaactagtttttacaatttaattgttagtttttttttttaaaaaaaagaaattagtttttatgtttcaatttatctattgattgttttagattgtattggtaactgacttccctatttagttattatttttattgttttatataactgactctaacatactaatttttaattcgcttgatttaaataattagtttctcagttatatagttttaactagttgattattgtaactagcttcagtgtatcaaatttcaacgtctaacgccagtgacaatttcaatgtctaactccggtgacttttcggtaatgaagacaactcttagtctctgacgccttttttgatgattttctgacgacaataacaacttcagcgaatattctaattctatttttttactttttttttgccgctaatattttattttagtggataatgactattttgtgtagtgttgtgcgttgatggttaagtcttggagcttttaa

SEQ ID NO: 103235 - DNA, 1064 bp, Cannabis sativa
ggccgaggatgatgcaaatgagctgccttgtacaatcctttgatcttcaatcacttttgaatgaagttcatttagttcatcagatattatcctcccaacgatttccaaatgtgcctcaatcgggtgaaactgtggaaaaatacataaacaaaaaaaaaagatttaaaatgtagtaaactctgatcaagttgacagtacgtatcatataacacagtagaacactaaattaaatttcaattacacaacattaatatcaatgaaacttgggtagtacattttgaactaaataaacaggggtatacctgagcaactacatcttcctcattaggcacaacctccatgtacttcatcacatatacaccccaatctcggtcattgtcttgttgaggaagcccacgatctttagtatcaattccaaaatccacaaaactcacattctttgacttattctcatcgaacaaaaggtccaacgtcgacagctgcaaacatatacaatttgttagattcaatgaaaaatgaattcacatcaaataatgacactttgtaaatttaccatttcttgcatagcgtcaacacgatacttctcatccattgtagtgtgtagggagtccataaatgagacaaccttcgacttcatattaacttcggcaccaaaccaaaatggtggaccttctagcgtcaataccgacacaaacatctacaattgataagaaaaacagtaaagtcataaatacattcaaattacagaccatatagatatgtgacactacaatgaattgaattatttgaacacatcgataccaatatgcatcattaacatagatcagttgtcaaaattacaagtaagaacgagcctgtgtatatgatgaagtaccttaaggcattttttgaagttgtcttcgtaaaacagtgttgaccattcttgttcttttgtaatcctcttcacattaaacaaacccagagtttttcgctgcaaatgcattgtttattttgtcaagtaaccgaaactagtaatagtccaaccaaactaaattagtaaaaaaaattaaattaagttgtataac

SEQ ID NO: 103236 - DNA, 565 bp, Cannabis sativa
gtcatgcttctttttctttttcttatctttggctgactccttagagttatctttcctctttgaactagaggctcctagattgtcagccttggtcgagaaggtacttgttgagacagtgttgggtttacctccagagccagtctttaataacttcatctcttttcttgcttcctcttttcgaacaaacatttgagttatttcattgaactcggtgatgttttttactgggcgaccctgtaggtcatcccatagcttgcctccaacagtggagagatcaatagtgatccataactaaagagcagtaagctgggtactatcgtccaaatttctcaccctcgcagtagctgtggtgaaacaacttaattaggccttaagtctcttgcctgactattgctttatgttagtgagtgaggacgcctcgggtcgcctgtcccttgctgcttggaactatttcttgaagtccttcaaaaactgttcccaagaggtgattgaatgatgggtaaacttgttgaaccagctgcttgctgctccaactatcaaagtggggaataaaatacagcataaa

SEQ ID NO: 103237 - DNA, 504 bp, Cannabis sativa
gagagtgagtgagaaagaggacgatatatgggggtttgattgtttcttttttatatatattattattatttatctattatatatatatctttgactcattcaaaaattgagtctttacatctctactctagaatttcaaaatagtgaaaaaagtacttttccactcaattcaagtcaatacttaatcatagtatggaagattatgaagaattctattacctaaggagattcaagttcagatcttggtaatactctgcgacagaaagtaacaagggttagagatttgaatagaaggggtcattatattctgccaccaccaatgtaaggttttctacaactttatatgtatttattcattgtttgaggaaatttatatttaggatgttagattatagattataatcaaccatacatgttgttaataaataatctagaagattctggtaaaacaagttccaacaatacttacatattgggaatatgatagtgctaatcatagatatg

SEQ ID NO: 103238 - DNA, 709 bp, Cannabis sativa
agattaaggttttaagattttgggccagagatgttaaactgagattagataatgttcttagattggatttaaagtttgttttagcttgttttagctagagttagggctacccgaattgtaatggttcaagtgaagtttattaagtttaaattcctttgaatatgtaattttaatcaaaaggatgaattgtagttaattgatgcttgtgatatgttgtatttgagatattatactgttctggaaggtttcattaggtttggaggagttttgatttggttttggagcaaaaaccaagtttttctcgtttctacatcagggaaaaactggctcatcggtttcacaggtgttgtgaaaccggtttaccagttttggtagtaggggaagaaaattttggtttttagccttgaaaccagttttgttcgaagtgtttttcagagcctagatttgagtattttagtaatgtataagctattttgagcctgtggagagttagaatatgttcgattgcgaagttaaggttattccaaagtttgtaataagttgtttattgagctttgttgtcgtgacataggacccaggatcgtcaagctttggttccacttaaggtcaggatgtacgctaaatttctggaccgaggtaagaaaagtattaagcaccgtatatggttaacgttatgattgttaccgtcttgattatgatcaagatcctg

SEQ ID NO: 103239 - DNA, 677 bp, Cannabis sativa
tcatcatcaccttgagtttatgatgactgacatatcctagccttgcatgccacaaatctattgttttgttcttccgagtcttatctacataagcagacttttgctaacataacatagatagactctaagcgtcatcctttcatcatcggtgttccaaggatttcaagatcttggtagatcttgacatcttgagggccgaatacaacatggtggcatgtcaccgtaagttgtgccactaatagtaagttttttatcatcccaggtacatggtagacatcctggatggagtgaaacttcttttgggctgaatcttgacgtggttgttgttttactgatgtgtgtgatcggtaatcttaagttgttggttgtaaccactacgcgaccacatttatattctgtcatgtcctgcagcttctcttcatctcctgacatatgatttgagcagccagagttgactatccaatcattattgtagtcgatctttcttggacaaaaagttgtcaaagctaaattcttcttcctccattgcgaatgatgcttatgcatcccattcttcattgcttgccttttttgcatttgatgtgaatgcattaccttctgcagttttcttcttgaaccagcaacttttagccatgtggccatactttccacagttgtagcattttccatcaaattta

SEQ ID NO: 103240 - DNA, 505 bp, Cannabis sativa
ctttagagtttatatattaaaggtattgctgtttcaatagaaatattaaattaataaaattacaattctatgataaatactacaaaggataaaattataaatatttcagaatattacaacactaaacaaaatatacacataaaatagaaaatataaagaagaaaaaaaaaattacaacgcaataaactacacatgaaacataatatataaatagcatagctcaaacaattgattttctatacaaatgtttgtaaactaaatcaacttgttcttgttaaatagtataaaaaaattatgttacgccatcagaattgtatttgaagactgatgtcaaacacaaaaaaaaagtaaagctatgagaaaatatagattaagagagaggagtcaaaaaaaaatgttaattaatatttttacctcttgaactataacatatgtattattgtggctcgtaaagttttcaacctatcacatcattgtcatgtctttgatttaaaaggaaaaaaaa

SEQ ID NO: 103241 - DNA, 956 bp, Cannabis sativa
ttctgaatcaagaactaggcaagtataggatctaacgcaaaatttaaaaaatttcaagctctaataccaattgaaaaaacaacttgtacagatttctagattcagattaccgagtcactcaagatttgatttagcaattgtaactttaacattcaagcattaggttaaagagcaagcaataatgaagacagtgatttacaagcttcatcagcattgagaacaaatctcagtcgactagtgcttgggttccccgaacaagggtaataacatccactaaattcagagattcatattacaatctccagttcacaattaggaatttaatacaatctttacaacaattagtgaagtattaccaacatcaaccaagatccttggttgaatacacaagatttcttgggcatcaactaagttcttcttgaacaattttctccaatctgaaatcccttcagatctgatgacgaagatgacactgaactcccttcagtctaaactcagctcaaacaagctctgatctttctgctatggataaccatcaccaagctattcaatcagacctgcaacaacactgaacaatacaagatatcacacacaatacaacacgataaaaatgaactaaccaagaaaacgatttagctagttaaccaagtcacaaaatagaactagctatatatagaaaaggtagttctaaccgacctaacaacattttatgacaactgttaatacataacagactgatgtggacactaacagaatattcacatgtagttacaacagatgaacaccacagataagactaaaatcactattaatataatctgtcaaaaatatgaaccttacagacgtgagtgtgggcgtgcatgggtgcgggctaacgcgagtacgagtgcaggtcgggcatgcacgggcgcgggctggtgtacaagcgtgggctgggcacgtgcgtgctaggcatg

SEQ ID NO: 103242 - DNA, 512 bp, Cannabis sativa
tcctggttacccttgtcctcccaactccgtttacaaattacaaaagagtatatatggccttaaacaagcctctcgccaatggtatgaaaaactgagaacaacactcctcaataatggtttcaaacaatctccatcagatcattctctcttcataaggcaaacatcaacatcttttattaccaccctcatttatgttgacgatatattaattgccagcaacaacccgactgtcatcacctccttcaaagagtccttagacagcaaattcaaactcaaggacattgattccttacgattcttccttggcttagaaaatactcgttctaaagaaggcataaatatatcacaacaatcattcacacttcaactactcaccgatataggttatactggtgtaaaactagcctacacacctatggagccaaatttaaaactcaccgaagatcaaggcgagctcttatccgatcctacttcatatcgaagcctcattggcaaacttatctacttaacca

SEQ ID NO: 103243 - DNA, 1064 bp, Cannabis sativa
gtgtgtttcacacccttagccttgacagagtttacaattcgatcatatatgagcgagggaagatgagtacttactccaatccccaaagcatacaagaacttcccaatgttatagttgacggtggaaatatgggaattggcccacgaattcgaaagagcaatcttgtgaaggattcggtaaagctctgttagcatagtgacaggtattctttcccattccacactactagtgatctcagacccaatttcttgaaacgtagtcttatagttgtcatcaaatacatgcttattaattgttttgatttttaaaacgcatttaatggttgacaaggcaaactaaaatctgttacctcttatttaagccatatatttgaacttactcttcttattaagaatgttatcaaactgacataaaattctctgactaggtttttatttggttggtgaagatgtgtgacagacaatgaccacccatagactgtattaactcacgaatttttagaaaatatttgagcttgactcgatacttaggccacagaggacaaacacaaatattatcttgaagatgaagaaacttatcatttgagtaaaatgggggacctgaaggaggtggcttagatagactagggttagatgacgaactaggttcaaaatttgactttcttaggaataggaaggtttcgagagttaaaggagattgtattacgtttagacaaagacttaggacaactaatcgtggatggcaatgaggaaggattaagaggggacaagggttgagataatggttcagaattagtagcagacatagaacgagtaaaacacctagctaaactagaagagtgtgaagacaaacctgggtcccgcgatggtggaatggaactagagacaacaagagaggagttaggacgtacaaccttggccactaatgatgatcgcccaccagatgaagatcctttgatctcgcgacatgctttcttcccaatagccgaacaacagagacagaccaaaaatcaccaaaggaggaagatgaacagtattgggagtaggtgagaatttacttaatga

SEQ ID NO: 103244 - DNA, 782 bp, Cannabis sativa
gagttaatgacttttcttcggcatagtgcagtagccacgggcaaagcattttgcattactctccaagcaaagacttttacttttgaaggtaaatttagaccccaaaaagttttccaccaatctttgtgtgcatttgaaccacttgaattacgattttcagctaagttttcagtcaaatggaagcccaaattgacagaataaattcctgttgtggtatggtgccatatgtatcgatcattattggggaaaaaactaagagggattgcgacaatcttgtcaacatcaatcggttgaaagtatgcattgagaagtggaacattccattcacattgttctgtaataaaatgtgacactaagacattgtttggacccgaataacttactcgtttgaaatgaaagtgactgggaatccatttgtccaccccagccagcactttgaaaccatttccaatcttaaaacgcaggccctcaactaaaagttcacgtccccaatgaatgccctgccaagtaagtgaaggagagtgcccaagacgtgcctccaagaaggtgttgttggagaaatatctatgctttagtagtcggctgaggagggaatctggcatttcaaaaattctccaagcttgctttgcaaggagagcttgattgaagtggacaaaagaacggaaacccatacctcttcaaatttcgacttacaaagcaatttccaacttctccaatgaatcctagaaccatctttgtttgaaccccaccagaaattcgccatcattgattccaattgatta

SEQ ID NO: 103245 - DNA, 503 bp, Cannabis sativa
tagttcgatcagtgctggacgacccaacaatatgttgtaagctaatggcaggtcgacaactaagaaatcttgcataacagttgccaagaggggtgcgttgcccaaagttaatgcgagctcaattatgtcaagactaacaatgctgtctccagtgaatccgcaaagattcaccttccaaggcctcagtttagctttttcgaaccccgtcttccttagagtttccttataaaggatatttaccgagctctcgttgtctattaacactctcttgatccttttattggcaagttgaatgctaatcaccattgaatcgacgtgaggatatctcacgtttttctcgtctttctccgtgaatataataggaggttcttcggttttcaccttcttggaaggttctggggtgaatgtcgactgctcgttctttatctctttcacatatcttttctgggcactattgttttcccctgagatatgtggccctctcgaaataaccaggatgtcct

SEQ ID NO: 103246 - DNA, 858 bp, Cannabis sativa
tggctaaaagtgaagtcaacaacataaggtttgactgatgataatagcagttgtgcctgggggaatgaattgcagtgcttgcttggctccaatcagatcagcagtaagtttataaatcttattctccttctcatcaagaagtctgttgaggtttttaaccttgtcctctaacatgcctttttcagtctccacttgctctgaggagctttttagacctctgatctatttagtcatgtactcccattgggaaaaaatttcctcatacacacacattttttctaccttcattatcgacttctgatgtagtggagactacatcatcttcacactcaattgagtgacagctttgggccataaaagctactacctgcttatcctcatttgtgctttcaatggcagtggaattcttttcttcttcattatcactccaagttgctgcaagggccttcttctttttgagagtgtttaggcactcggcctggatgtggccatatccatcacactctttgcacttgattcctcgattcttttgatcagcagatggttgtccttgtttgaagtttccagccttgttcttcttgaagtattttctttatcagctgaaaaatttctcttgtagttctttttcaagaattttgcatagtttcttgttagcagggcaacagtctcgtcagtaatgccattcaatacttctagaaccagtttcttgttttcttgatgaatgagggttatactcacttcagatttatccttgaccgcatccttatatttctttgttttcttccatctggacagtgacaactcataattctgcaatgacccaatgagttcataaagatcaagttcctcaatgtttct

SEQ ID NO: 103247 - DNA, 605 bp, Cannabis sativa
gacatgtaccaaatagtgtctctaaaaattttcccgaagtattgagattgttggattcaaggacttcagttcaattttactaatgggcgtctggcgtgaacggaaattcgatggacacgatttagtacatggataatcgtcacattagacgtccgttagtaaaattgaacagaatcggacaaaagtccttgaattcaacaatttcaatagtcttgagagaaatttttaacaacctaaaaaactcaggggtacaatttggttcatgtcaaagttcgggtgaaaatatcctaattagccaatttcaaataaaaaaaaaagtagttaagaatcctacctgaatcccatatacacgtttgaagggccatttaccatgatatttgagaggagcagagtcaagaagagcttctctttctttctctctatcaatcatacaatggtaacaacaatcactttggcaatgccattgtttccacctcaaataaagaggttctagtataaaccaagtaccatcaatggtggcatcattggaagagaacttgcaatatggaaagcatgtttccccaacacatccagtttctttacactctttcacacaaaccctattt

SEQ ID NO: 103248 - DNA, 669 bp, Cannabis sativa
agccaaattccaacaaatcggccatctactgctgtggtatggaagaatctgatattcaacgcatcattgattgcccaggattcaacaaaaaagaggtaccttttaaatacttaggtatcccaatttgtgctaaaagaatatcagggaaagaatgcatgattttagcagataaaatgacagcgagaatcaaaacatggagtacaagaaacctatctcttggaggaagggccattcttgttaactctgtgcttatgtccattcactcatactggagccaagttatggtgttaccaaagagaactataagagatatcgaagccatttgtcgagcgttcttatggaaaggcaatcatgtttttaatgttcctggacttattgcttgggaacaagtttgtcaaccaaaagctgcagggggcattggcttgaaaagaattttagaatggaatattatagcgatgacaaaatatgtgtgggcaattgcaaataaggaggacaatctgtggattaaatggattcactgtgtatacatcaaagaggagaattggtgggactaccaagctccccctcaggcaagctggtattggaggaaattgaatgttgtcaaaactcagatcaagactgttatggacacatacagcagtttgtagcaaacaaatacaagatatctaa

SEQ ID NO: 103249 - DNA, 846 bp, Cannabis sativa
cgctcttccgatcttttggatttacaaaaatcatccttcgatccaattcaatcagacctcaaaatctaatttaattggatcaattttttaattggataattaattacacacttaaattttaatattaatttaaaaatatgaagaaaaatacgtaaaaactatcactttttatttaagtttaatacttcataaacatattatcgttacaagtgtaatatagtcaaaaattttaaataattaaaacagcaacatttctatgtaataaaatagaacaaaacatcatgaaaataaatacacaaaataattaaatgttacaaattcaatccacacacaaaaaaaaaatctaataaaaatctaataaatatatattatatttttcaatagtttttattatataaataattttttaacatatataaatataattggattggatcggtttttaattagattttgagattgacattcaataactaattcaatccaattagaatccaacttttagcatccaatccaattgtaattggatatctaactttttgtaattggattggattggatcggttcggtttaattggattagattgaatgatgtccacccctattgtaggtaatcgcacatataggataatttttagtattccgttgaattaattttagcgagaaacaacactaaatttgtataagagcaaggctaaagcctagtgatccagaagaatacgtttttgaattcttttttgttgggaaaattgacaataattttgtactcgttaaaataattcccaaggtaaaagatatcccaagagcagttctttctcgctagagttgctttcaaagtgtacaaac

SEQ ID NO: 103250 - DNA, 609 bp, Cannabis sativa
agtaatatattggcttccattggaatggagataactttgactccaaatgagccagtttcagtgagtacttgaaggatgaattgtttttgggaaatagatatacctagtttagactgagcaatttctaatccaagaaaaaatcgcaaaggtccaagatccttaagctgaaatttagagtttaagaatatttttgaatacagaagcatccaaatcattgttgcttgcaatgactatgtcatcgacatagactaggagtgcaagaaaagccttaggagaggacctaataaaaagtgaatggtcattaggagattgagtaaagtcatagttaagatgggtattgcttagtttggcaaaccattacctaaaagattattttaaaccataaaggattttgtttaatttataaacaacatttgggggaagctccccctcgtgtacatagcctttatggattgacatgaggacttgttcatctaagtcaccatgaaaaaaaaaattgttgatatccatatggtgtaatgaccagttatttatagcagctagtgcaatgaaaattttgagggtattaaactttgcatcaggtgcaaaggtctcaagacaatcaatgtc

SEQ ID NO: 103251 - DNA, 555 bp, Cannabis sativa
actatttctacatatatcatttgtcatcatgtttttatctctcctcatgttttgatttcctattagtctttaatgtacttttgtcatgttttttctttcgaacatattgaagagactttaaataatacttttatttttttaattttctaatcacaaaattgagaataaaagttatatttttaaaattttattattaaaaaataaaaatgtgttttataatcacttttattttttaaattttaaaaatagaaaataaaaatgtattctataacttttattttttaattttactaagtcgagtccaggtccggatctagggctagggccgaagccgtggtctgagtttggaactgcggttggggctggagtctgggtctcaaggtccatattgggattcgagtgcaaaatattaattaagaaaaaagattatttgaataaattatgaaagtcttttttttaaattttttttttaattttctttagcagaagcttagaagtttggtctctctacttcattcgcccagctcaccaatttaggtgtctctttgatctcac

SEQ ID NO: 103252 - DNA, 566 bp, Cannabis sativa
gatttatttgaaatacgtgtatatcatatgagttacttgtgaaataaaaatattttcatgtttggcgaccctggaaatccaattggaggccaaaaatatcacaacagttgtagttagaagtattgatgggattattagaataagttgattttaaaaatatctgggtattttagggtactcgaagttagtcaaatactataaaaatagagatttctcagtggctaagaaataataagataactattaataataaaaaatttattaatattattattaatattatattattatcattaatatattaatattatattattattatatatgtaacaaaactgctcatttctttttaaatatatatataaattaagttttaagttataatagtagaaaagaacaatgacaaaggaaatgcttgttctccctctttcgataaaaccttctcccctataattattttcttctattttcaatccaaaacttagcgatctaagcttcggtagtagcaggatagcaaatccttgaagagggaaagcttaaggtatggtttaatttcgttttaaatt

SEQ ID NO: 103253 - DNA, 728 bp, Cannabis sativa
ttgatataggtagtaccaatcaatccatttaagccatcttcaactatgtagtctcatacctacacaatcttagaatcatcccacttgaccttccctaagcggtatgagactgcacaacttacccttgtgggactgcacaacttacgctcttcaattattgtatattacaaaacttctctcaacaaatattgttaaaacataattctaaaaataaaatagtaattgtggagagtgaaagtaaaagagtatcaacaatattgtctggtcctctgacctgagtctattcgtttgtgttggttgttgtcttctattgtgtatctattgagtcatggctgatcaagatgttatggatttggaaggggagcgacagtatgatattatacaaggggatgaagatgatgagggtggaataatatacgagtcaggggaaaaagagttgtctgattttgatgatcgctggtgcctagtgggaaaatttcttacagatcgaacgttagatgtcttggcaatgcagaacaaaatggcgtctttatggagaccaggccgtggtctatacgttaaagaactggatcagaatttatatttgtttcagttttatcatgacgttgatattgatcgtgtgatcgaaggaagtccttggacttttgatagagtgcctttagttttttctcgactcaaagaaaatgaagccccacgttctgtggtcctaaacaagctggatttttgga

SEQ ID NO: 103254 - DNA, 540 bp, Cannabis sativa
aaaaatgcgtatttcaataaaaatctacgtcacaagcttaattatggaatcattttccactaatgtaattacacacaatctcaataacaatagactttataaacttataatgtaagctagggtgaaaggtagagatgagaaggttaatttagactcaaatcaaaccatagcatacatatacaatattctttcaaataatttttatttgtattccccaatcatttcccacaataattcaaccttgtatttttcccatttcagaataaaatttactattcttccacacttaaatttttgcaagtattcatatatttctcaacatatttctcaacatatttctcattctttttgcaaaatacttgcaacttacaaatatttattttgagggaatagtattctttttcgctccttatacatactcattaatatatttttctcaacaaaattctcacatctttagacaaacataaatatcaatatactattgtgtgtaaaaagaggaaaaaggattttttttttatagctcaaaaggttatttta

SEQ ID NO: 103255 - DNA, 500 bp, Cannabis sativa
tcatcatcaagagtgccaagagatatcgaatttctctttaattcaagaatgtgtttaacattactgagagttttgatagcgccatcatagctcctgatggcaatggtaccaataccaacaacccgacacttgttaccaaccctaaaaccctagctacagtccttatgggatcgacctcactcacgtgagttattacttataaacgatacatatacttacgtgttgaatttatcataataaatttttagcaatgttgtcggggattattttattaatatcaataaaattaatttttattccaatttggtctttttattttagtttgactaatgtttttattgtgtttaacttgcaatgtacataaaaaaaaaatttacacctaaattttctaatgagttttctccaacaacacaatgagccatcctattttgcttggggagatttaatgaactggtagagagatgttatcacagtttctcaagtagttgtattattttctt

SEQ ID NO: 103256 - DNA, 526 bp, Cannabis sativa
ttttttctttttttttttgattaagaggcctagtaccagccaaaggaaacaagcaaagaacgcaacacacaaacatagaacaaagaagctgcaaacagagagaaactaaaaaaacttgcctgcagaaataagcagcaaggcaaactaacaactaaactagttaaactaaacttaaaactaaaataaaatggataagtaaccgaatcagccatccaccaagggagaaggtgggaaatcgaaaaaactgggcgcctcaaaactcccaaacagttgagagtgctggaccctttgagccgcattgtgggccacacgattgtgatttctggggatccaactgatctcccacagatcaaacttagtagataaatcattgaacttggaggcaatgtctttgatgttgtagtgaagcttgtccaaagcattgttatctatcaaaattgcagatacagccccagccgagtcacattggaagattatgttcttgtggccgaggttgatggcattttcagctccccagcaaagggta

SEQ ID NO: 103257 - DNA, 531 bp, Cannabis sativa
aagatgggaatcaggtaaattttcctccctatatgcattaatcttattatgctaattaaatgatgtctggtagtatttttattttttaatattttaattgcaaaaatagaagtaaaatttgtgttattacaaaattgtattttataagacatttttatttttttaattttaaaaacagaaaataaaagtgtattctataaaatttatttttcatatttattttttgattttattaagtcggatctaggtgcggggttaagtttgggcctaggtcaggggctgggttcgatgccaggtcaaggtttaatcggagtctaaaataaatgttaccaaacccaacctaactttattactttggtgttttaaacttttaacaatgattctaatttataggtacttgtgtctgagcttgaaggtaaaacagttggactcttattaatgagttgtgatgaatcatgtgttgaatttgctaatacacttattgaggtttacaataagctcaaagataaaggtgagaattttgaagttgtg

SEQ ID NO: 103258 - DNA, 595 bp, Cannabis sativa
ttgaagtgtaaaaatgaaaaaatgttaatattttttttttcttcttttttttttataataaatttatatatatttatgaataatttgatagtggtgacattagttttgccatatgctatacatacatttttttaaccacttatattttgagggtcaacattctttaaaatgtagttgtatatatagcatattaaatttttcattttcaatttttttttaaaaaaaaaaaagaaaaaaatatgacaccaaataaaaaaaaaaattaaaactagtattggttattaaataaattaaaactaaaattatccttatattttgaaaaaaaaaactttaataatttttcataatcatcgcagatctccatttctcacatttttttctcacaccaaatacaaatataagcaatctcttccctcccatttctatccgatctaattgtgggaaaaagcttgtataggacaaaaaaatttcttcttcaatctcaaaacttcctttctacaaaaaaacaaagaaagaaagcttgttgaggtcgaggatggtgtagcggctaacaatggaggaatcggtagcttggtaaatgagttctttcacaatc

SEQ ID NO: 103259 - DNA, 512 bp, Cannabis sativa
ctctctctctccctttagtcccgatttagggttttcaaaacccttgggcagtcactcggttacagatcaagagcagcgagtcgagaaactcggggatggaatctggttcacaacaatagtaaaatcgttgtgctcgattccttgggcaatttaagttcatctgatgattttacatttacatgagcagactatggtggcaacactcaaagaagattaaagatcgattatgatggaaatctgaggttatacactcgacgtaatttgagcgagaaacgttgggttgtctcgtggcaagtatttttatatccttgcaagattcatggccactgtggacttaatagcctatgtagctatgatattaaatctggtatggtgtgctcttgcattctaggacataaaatgagaaattcttctgattggtctctctcaatctcgatctcctctctctctctagtctcgatctcgtctctctctctctcccaaactcatccttgttcttcatgttccatttc

SEQ ID NO: 103260 - DNA, 1066 bp, Cannabis sativa
tgttgatggtggtggtggtggtggtaaatggtagtggtttggtggtgctgtggtttttgggattttgttttttttttttttacatgtgataaaagtataatttaaaaataatttaaattatttttatcaaacgcatataaatttatatttttggaaaaaaataattaaaaatatataaaaaaaataaaaaatttatatagcataaatttttatatatttgtaatgataacaactgcaattattttttctcacaacacaacttgctatataaaagtaaggaaaatttttcaataaaactattctcttatgttttatttataattttacagcatataatttttaagtacaaaattacactttactcaacaaaaaataaaaaaaaaaaatactaaaaacaatcacaccaactataaatcaactataaaacaacagaaaataatcaaaaaaataatcttatgataactataaataaactataaaataactaaaaaaatagtttattatttttactgaatatgtatttttgtaaataaaaaattttaaagaataaaaataatttttttttgtgttaatgtatttttgtaaattttttcaattttttggtctataatgtaatttttttaaaaagtaatttataccaattatatacttagaagtaattgagatataagctctataaactcttttttaggttttagaattaaaaataaattcttttagacatgtttggataaaaaaataaaaagtctttatttaatttaaaagttcttttgaaaaaagatatgatttgtaactttttctaaggatttttgagaagttatttctaaaattaatataatttaaataatttttaatttactcacaaaaaatattttttttaataatattcaaatgctttgaaaaatactttttattaaaaaaatatttatatattagctatccaaattataaaaataagtcaaaatttatacatattttatactttataagtaaaagtaaaaatttagcgagttctctaattctcatgactcatacaaattagaaatattatcattttagacaatta

SEQ ID NO: 103261 - DNA, 621 bp, Cannabis sativa
  modified_base (258)..(277): a, c, t, g, unknown or other
gagttacatttgagtctataacatccatgggagttatgagtttaaattttaaagtgtgtgatcttaaatactataaatagaggtatttagttcacttgtgatgataccttttttgtgaatgtctatcaaagaaggcaccttgctagaaactataagcttgataaatttagaaagttatttttatttcattcttccctaagtgcttgtggtagggggaaataagcttttggacaaatgtgtaaaactttgttcaagttnnnnnnnnnnnnnnnnnnnntactactatttatattgtgcttttatttattgtgtttttgtaatcttctctttatcttcttttctatatttatgtgtatatttcataaagatttgtaacattattttatcaaaattattgttcttgtattttttatttttgagttgtattttggcattggtctttctattgaagcaccaataaatttttaacatagtactcaatgggtagagaagattatggtttgtgtgacatctacgaagttctcatttcttattaacagtgaggtacaaggcagtgtcacaccacaaagagggttgaggcagggtgatccactatctccctttctcttttttttttttttt

SEQ ID NO: 103262 - DNA, 584 bp, Cannabis sativa
  modified_base (245)..(253): a, c, t, g, unknown or other
taagctgtgcaatcccacaccgcctggggaaggtcaagtggggatgttacatggtggctgcccaagggttttgaaaactttaaatcgggactaagaaggagagagagaggagattgagattgagagatagagagagagaggagatcactagagccttggggtggttggagaactgccagggtggcctgtggtggctgaccaagggttttgaaaaccctagatcatgagagagagagagagagagnnnnnnnnngagagagagagagagaggggagatttgagagaggagatgaacagcgagaaagaaaaggaaaacaaagaaaaagaaaaagaaagaaaaaaaaatatttacaatttttttaatttcaaattaattttattttaatttttttaaataatttttacatggaccgataaaattgtgtcatatgtacactgtgtccacgtagatgcacacatggatgttaggttgttttagtattatttttaggttaatttttagtatgtcattaatttagttctactcttgtttggagtaattttatgctttttatcttttatttttgcagatttaaaatagaaga

SEQ ID NO: 103263 - DNA, 555 bp, Cannabis sativa
atttttttagtgttaggtatttgaatttaatttaattaattaataactctgatttcgtaggttttaattatttttttagaaattaaagattattttgctattcggataaattcaaacaatatactaaaagattctactaatttaccattatgaaatttctgtttattagcacacaggtcttaagtgggtgggacttcaaaaaaagtgcgcactaagatctttttctatttatgacactagagaaattataatctaattttttaatcacagtgtattttgtaactataagtacaatatattttttttttcaaataagcgtactcatttcattaatcaataaagcagttagatctcgcggttattacaaaataggttcttcggtaaggaggaggtcggaatagagccgtacaattggtggggggaaacttagccacattatgggcaacataattacaagtcctgcttacattaaaaaaaattacaactaataaaagaaggagaagacttaatgcaaaaggagacatagttctcaagagcccaatgagactccttccc

SEQ ID NO: 103264 - DNA, 656 bp, Cannabis sativa
tcattgtgtgctttactgctttatcttcaaactagttcttgaatgcatgagttgaagtaaaacaatctaatcttgaacaactcagtaacttgaatctataaaattagatagtttgttctttcatttggtatcagagcttgaaattttctaaaaaattgtgttagatcctagacttgtctaatccttgatacgtgttcaagatttgatcttgctgccactaaccctctctgactttcttctcaaagaactatagtacaagagtttgcatgtttctttctctcctctatacagaatggaaatgtttaaggaaggtggattaacctcgagacctccgatgttggagggtgctaactacccatactggaagactaatatgcgtgcgtttttgagagctgttgatgaaagagtcttgatgtccatagaagaagggtggtctagaccaactatgactgaaaatgaaatagttactcataaacccatgagtcaatggaccactgacgaaatggaaagggctaacttcaactcaaaggccttacatgcactgtttaatgctgtctccacgaaccagttagaggttattgctaactgcaaaattgcaaaggaagcatgggagaagctgaaaataaaaaatgagggaacagatgcagtaaagaaat

SEQ ID NO: 103265 - DNA, 569 bp, Cannabis sativa
aatgaaattaaacaaaagtccttaaatttaacaatctcaatagttcgaggggaatttttaacggccaaaaatgttcaaggaacacgatttgatacacatcaaagttcaggggaaaaaattactaattagcctaataattttagtacaagtactttaaatttcataattctaaaaatcaataaaatatgccatcattaaaaaagttaaattgatatggtactttttttggtaagtttttttttttttttttgccagctacattctataaaaaaaaaaaaattaactttagctgagagttggtgaagacaagagtaaaagttattttattgttttatttatttttgctgaaagagtaaaagtaaatattacttacacatgacttgtgatgtcagaattctcatcatccaggagtaaaagttgtctttgcccccgggcactaacacaaggaaaaagttgaccaagcagacaccaaatatcacatatggcgtcaatggagggtcaacgagggtgcatttcttgtagcattttgaagttttgtctacgctacacactgcatatttttttttttt

SEQ ID NO: 103266 - DNA, 1052 bp, Cannabis sativa
tggttttggaaaagggaaattgatgttcatcaaagatgacatctcttgagatatacatcctaccactagatgcaagacacttatagcctttatgattgagactatagcctaggaatgtacatggttcagacctaaactgcattttgtgtttgttatagggtctaatgtttggaaaacactgacatccaaaggttttgaacaatgtataatctggctctttgtgaaacagtgtctctaaaggagttttgttgtgaagaacaggtgtagggagtcgattgtgaataaacacagctgtcctaaatgcctcatcccaaaattttaaaggcatagaagcttgggcaagcaatgttaaaccattttcaactatgtgcctatgctttctctcagctaacccattttgttcatgtgtggttgggcaagggtgtctatgcaggatcccaaattgttgtaaaaacttaggaaaagttctaaactccccaccccagtctgtctgaaccattttgatttgtgtgcctaactgtaattctgcctcagccttaaacatttgaaacactttaagtgtctcagacttatccttgagcatataaatccacacgaatgtggaataaacatccatgaagtggatataatacctgtagccactgttagaaacagtgtgggagggtccccacaagtcagaaacgacaagttgaaggggagcatcataaacagttgtgctaaatttaggaaatggcaatttgtggatcttgcctagacaacaagcaggacagacaacttgagaatctttattatcaattgaaagattacatgatttgagtacagaatgcacaatggacttggagggatgtcccaacctattgtgccaaatgtcaaaggcagaaaatttactactgtgattacaggaagtacaagattctaaaggttctacagaagttgtatgaacagagtgagagaaggtgtcctgagttgtggtgtttccaggtcgaataggcagtgtagggataatggtgagatcctcaaaagtatataggccattcctgtgtgtcccttgc

SEQ ID NO: 103267 - DNA, 603 bp, Cannabis sativa
aatttttttgtgctataattatcaaataaaaagaaaaatatttaattttttttaatgtatttcttttttcactgggggctggagcccccacactaatgtgagtgtgtccgtccttaggtatgatttgatacatgttaaagttcagggagtaaaaatcataattagtttatcttttaatattataacaattggtcgaaataactacttctttcttttttttttttttcctatagttgttattgttcatgtcaaataattggccaatatagctgcttatagtttggctcgatatgctctaaattaagtgaagcttgtttcgagaatttacaatatattttattattgcaaatgatttatcataaatttataataggaaagcatttcttccaaaaaaaaaaaaccacttctttcataaagaaaaattatttataaaataagtgatcatcgaaaataacaatttataacattttatgtaataatattattggttttaaatgaaatttcaagggtatcaaagagttttgtacaaatattgagttgcaaagaattataaagaagttgacttggcaatagagtccatgtggttaattttatgcaatgtaa

SEQ ID NO: 103268 - DNA, 768 bp, Cannabis sativa
  modified_base (333)..(335): a, c, t, g, unknown or other
ttacaatttaatttaaataaaaataataaaatttaaaagttagcaaaatatcttatttcaatttaaaatttcatgattaaaataatcttactttaaattccaaatgaggtaattttattaaaaaaaattaaaaaaaaatttaaagtattaaatatctaaccttaaatttaaatatatgataaaataatcaaatgttttaaaaataagataactaattaagcaaaaagatagatttttacctatttttaagcttcaaatttcactaatatcttaacttaatttaaaaaatactaattaatttaatttcagataattagatttgaaatatgaaannnaaaaatctaaatacaaaattacacaaaaaattcgaaattaattccatgaaaaaacatgaaaaaaatgggaaaaatttgtatttggtgcggatggtatgcattgcataccatcctcgcgctcacgatggggtctttggttgagaaatcacagtgcaggaggctactagcagcctcttcgcgcgcccatgggacaaatttcagacaaatcagcccatcctgatcgagaaatctcggatagggcttgtccgaatgcgcgtgcgcccctgaaatcgaggggattcgcgcgcgtacgtggggtgacaccacccctaattttttgaattttcgaaaattcataactaattaaaattaaatcgaaattaagttctgtaaaaaagtgaattgcttaattttttccaaagtattcaaaaaaaattattccagaaaaaaattc

SEQ ID NO: 103269 - DNA, 577 bp, Cannabis sativa
tcagtggaagtgctgctgtaattttccttggcttttcctttttcttgtttctttttatccccatagcctggtggaaaaccatggaggaaaaaacatttgccaacaaaatgaccttgttttccatagtgagagcatgaaggacgaggcttcttggctcgtggaggataagtagatggtggatgagcggcaacaaccaggggaggtgcttctgaagatccaagagtcctttgacgctcttcttgaatgatcatggcaaaaacccttgaaagatttgggataggttcattcaacaagatttgtgcccatacagatgagtaagactcattcaatccagtcaagaactgaaggacttggttctgattgtagtaatcaggaaagattatcatggcaccacgggtgcaagttttgtttggttgaaattctttcaactcatcccaaaggtatttcagcttagtgaaataagcagatacagattgctcaccctgttgtaaccgagtgagttgtgattgtagttggaagattctagggccatttccctcattgaacctctcatccaagtcgagccacatatcagtgg

SEQ ID NO: 103270 - DNA, 763 bp, Cannabis sativa
  modified_base (38)..(49): a, c, t, g, unknown or other
atccgcattttgcggattggattgaattgaatcgtgcnnnnnnnnnnnnatcgaatactttgtgaacacccctacctgcaatttttcctctataaatgttaaaaggtacgtagcattctataaaaatttaagttaagtacatctcacatataagatggaatattgtaaatctacgtatgtacaattatattacatgaatatgaattagagacgctagatagtaaattataatggttaattagaatttttgttagttgtcttttaaatttttaacgtctttaaaaatatcccttaaattattgagattgtttgatttaactacgtttatttaattttaataaaaaaaaaattaacatagataaaaattcaagaaatataatttagtatatgtcaaagttcgggggaaataatttagtagatattaaagtttggggagcataatttattacataaacaatcattgaaatagtaaaattgaatgaaattaaataaaagtcgttaaatctaaccatgtcaatttaacgtccaaaaaattaagagacataatttagtacatgttaaaatttatagaataaaaattttaattagccaattataaatatcatccaacacacatcctaaataattagaaaaagatttttttttagaaaaagtaaacaccactactaatactaaacagtctaattctacaatgttaagcggaatatccaaacccaaaaaccaatcaagtataccaccataattgccactatttctgcgtgta

SEQ ID NO: 103271 - DNA, 523 bp, Cannabis sativa
tagatttaaaattttttgtctaatttcatttaattttactatttcaatgattatttatgtagtaaaccatgttctccagactttgatatctaccaaatcatgcacctcgaacaatttaacttgtactaaatcatgctccatgaactttcatccatgttagactttttttcattaaaattagataaaaattcttaaattcaacaatctcaatagttcaggggattaaaacatttttaaccaccttaaagttcaaagaacatgatttagtatatgttaaaatttaaggagaaaaaaattctaatgagcttttttttttttagtcatcaaaccataactcatgttatatatttatgggagaaatactaagtgcaaccgacatatcgttgttgaaataaattgatattgaatcccacacaatttaatttaaataacataaaaaattatttataaccaatcacaacgtgccatgtggatatagtatatgatggctaaatatgcgcatgaactatttcatcaaaatcta

SEQ ID NO: 103272 - DNA, 945 bp, Cannabis sativa
agtcattcgtgggctagtttgcatacgtgcatgggacggatgcaccatgctggaaagagacagagctctggcgtatgctactagtttggtggcttatctcgagggcctgccagcatgcgtgtaggcatggtgccttgaggatgggtccatggacgtataggagtccttggacgacgaggaagactgtttggacagtatcgaatagggtatgattagaagcgttggcacgtcagcttggtgttggcatcttgccacacatgctaccttggtcacgagtgactaggtgagcgttggtgttgagatttgtcttatcatagtgagaacctatggacagtgtgagtatcttggctagagagcctcgatgcatggatgcaatcatggatgcttgcgagcatgactcagtaggagttgttcgagagacggaagtgtgcatgagacacacggtagcgcgaaaaaataagctcattgttactcagatggttggaaggctgaccttggctttgagaagtcaaggtaccgtatgagtattccgctgcctgaaaaggtgagcccgtgacatttagcattagaatttgaagataactttgtaattacatatgaaataattcaatacaaaagaaatgtttaagcttattaattttgtcatttttttttattattggttggaatgcattaggaattgaacgttatttagtccaaagcaagctcgtcctaacaaatatgaggtctaaaataaaattaaattttaagatcctatatgtagtaggaatttaaaatcccatttaaaaattaatacaatgagtctcattgtattttgtggatataaaaagagttcatggccattaaaatgaggtatattgtaggagattgaaattgacttttaatatagtccccctcattatttattgttatgtttgattgatgtaaaaaaacactcattttttt

SEQ ID NO: 103273 - DNA, 956 bp, Cannabis sativa
ctctttgcacttcttcctctttcacaccacaacaatacaaggttgatttcaattcacttagaaataattcggatgacattaaaaatagcttgagaccttgtaaaagatagtaaataaatttaaaatcaccatgacaaaataataaaacatcatctggaaagtaaagatgattaagttccataactgagcacctatcatggtatttaaaatctatttttctttccacttttgctaaaatttggtagaaatattccatgcacagaacaaatataagaggggacactggatctctttacctgagccccctcttagcttcaaaaaaaccatgcattgctctattataaaacaagctaaatttaagggttcgaatgcataccatcaatagttaatgaattttggcggaaaattcatagcagccagcattttctcaataaagtaccactctaaagtgtcataagcattccttagatccagtttaatcatacaattcgaccttgtgcttttctttccataatattttaccaaatcttaacaaacaattatgctgtaagctatgtatgtatgaagccactttagttctaagtaactaattctggtagcactattctcattctcataaaaagcatctccggtgccactttataaatgacattacaacaagcaattattatgtagtcacgaacactttcacagcacttcactttagggataagtgtaaaggatgtagaattcaactttttcaacaacctgcctgaatgtaaaaaggagagtacttcactggtcatatcttcctcaagaagatcccaattatctaaagaaaataactactaaagccatctagcccaagaactttacctccgggaatgctgagtaaggcctttttaacatctactgtagtaaaattcttctctaaataaccttgcttttcctttgttagtcacagaccttattgcatc

SEQ ID NO: 103274 - DNA, 506 bp, Cannabis sativa
ttataagagactaacaatgaattttagagtctaattgtgtgtgtcactaaaaattactcctaagtttttagtgactcacatttttatgtgtgtcactaaaagaccaattgtagtagtgttagggtttgatataggataactgctagatttcttgttgttttttagatgagtgaagtccttcgcaatcttcacagacacgacttctttgggtttgaccaagaaatcctcaatctccaccaggccggtcccatgtctacccccgcagctacctgagcgaaatcctctaaaaatgggtccaagaagttggcaaccttggaggaggttatgaagggcccagttatctacaagaagtttgcgtgtcgttccaacggttgggaggcagacaaacttcattcgacgttgacctacgcccatcaattggagaagactgtcactgttgttgggatcaagccctccaattctggagtttacgaccatcttcccagggacgaggagactccacacca

SEQ ID NO: 103275 - DNA, 665 bp, Cannabis sativa
tagtaaatggcatgttgataaagacagctttatttatatcgatctttttcatatataatctctattatatacaacactttcacttaaatgtctctctacatcaatattccaaactaagataacttgcaccatagaacgggcatcaataaaatgtagtagcaaccattaattaaagattccataactttaatatgttactaattatttaattcatatagtcaagtggtctcagttctctgtacagctacaacgtcatacatgaataaagaatacatttatatatataaattattcaataataaatattaataatttaacattcaaggatatatcaaatgttcaactctttattttataatcataaatgtctttattgacttttcagggcataaaccccaacatcttcttcttcatagcattttgggtaactttcgagcccatagtcttgatcattggcgtcatcttcttcagggtcaactcaggacgccacgtctttgtctgggcatcgtggaggatcaggttaaagaaggggcctctagttattttgggtgacgaccatgaagaaatttttccccaaggataaaaaagagcggtgtaagcttcttacagctctcaatgaaagaaccaaaatgttgaccaaattttcgataaccaaattgatatat

SEQ ID NO: 103276 - DNA, 527 bp, Cannabis sativa
ttttgctaaaaagttgtcactgaaaataatattttttgtagtgagtagttgtacattactccctcaataagcacaatttctttacattgtacatatattgatgccatttaatttattaagggctcgcttatgtattgtgttggattgtgttgtgttgtattgtattgtattagtattatttaatacaatacaatgattaattagtattgacttgtattaattgattgtgtaaagttattatatatttttaatacaatcgatcccaacaccagctacaggtctgagtcgccggtaccgggtccgggtctgggtctgggtccgggtctgggtcccgggtctgggtccgggtcgggatccgggtcggagattggtggaccccaaatcctttgtaaatattataatacaagctaatacggaccactcattattaaataatacaatatacattgtattaaaaaatttagtattaataattaatacaatacattgcttaatcccaacatagtattatttattatttaatataa

SEQ ID NO: 103277 - DNA, 537 bp, Cannabis sativa
actctacaggaccttcttcttccttctggaacattatttgttgttgttgtgggttcagaagctcgagctagccatggtacgggtcgggttcggggttcgtaagggagcagagatgggtctgagagtaagtggaggagagagaaagtggttatggagatgatgatgatgagaaaagggcaaacgggtggtggattggggtggtcggagatctgccggggtggcttagggtggtcagagatcgagagagaggtgggtgccgaggagatcgagagattaagagggtgatagtgcgagatgaacagaataagaaagaaaagaaaaaaaaagaaagaaaaagaaagaaaggaaaaaaagaaaaaaaaagaaaatttattttttatttatattttttttaattttaaattatttttataataattttttacgtggaccaaaaaaattgtgccacgtgtacactgtgtccagtccaacatggcccttaacacctaaaagggacggaaatgttaaatttccaatagaatacgagtattgggggtt

SEQ ID NO: 103278 - DNA, 504 bp, Cannabis sativa
  modified_base (213)..(230): a, c, t, g, unknown or other
cttttgagtctttagagttgaaggaaagcaatttcaagcctccaaaaccttccatccaagaaccacccaagctagagctaaaacccttgccaagtcacatcaaatatgcctatatgagggacaatgaaatgctgccagtaattatttccacgtggttagaggctgaagctgaagtcttgttgttagaagtgttgaagaaacataaaagagcannnnnnnnnnnnnnnnnngacataaaaggaattagtccaacggttagcatgcacaagatactcttagaagctggctgtagtaactccattgaccatcaacgaaggttgaatccttttatgaaggaagtggtgcgaaaaaaagggataaagtggctggattatggtattatgtacccgatttcagatagttcatgggttagccctattcaatgtgtgccgaagaaaggtggaatcacggtggtggctaacaagaacaatgaattgattcctactagaaccgtgactggttgga

SEQ ID NO: 103279 - DNA, 684 bp, Cannabis sativa
gcaactccgccgactatgccaatttcggtgacttgtttcagttaactttattgtttagcatttatatttcgttatgatttttcatagtgtcgaatctggtttcacagggttcataagttcgaaattggttttacggttttaagtgttctgtaatgaggttgctctattttatgatgttattgtatatttttttattttaagtttttttctattattttgtttctaggtttgaaattggttttcacataaatattttattttagattattgttgtgcattgtgtgttgttttgtttatatttatgagtatttttttgtatttttttatctatttggttgactgatgaaacgggtttcaattatttttattgtatatcatttttgttttgttttcataatatttattattgttgtgtaacgaaatcggtttcttgatgaagaaaccattttcttggtgaagaaaccgatttcttgatgaagaaaccactttcttggtgattttttcaatgattttgctggcgacaatgccaattctgacgacttttttgacgccggtagtaactctggcgaattttctgacaccggcaactattccggcgacttttctggcactgatagcaaactccagaatagttgtcggaattggcattatcgccggtaaaattaccggaaaaataaccaagaa

SEQ ID NO: 103280 - DNA, 504 bp, Cannabis sativa
ctcgatgcgtcctcccgatgaggatccgccgcctggaccgggcggctttttcttgctccggccggcgaatgaacggagatctcgggtttttccgccggaagcgagaattgcagggatggtggggaagtgggaagtgatgtgggagggttttggagcattttgaggtgggaaagtgagagtctttcgaagtgggttggagaatggtgagagagatgagcaatggagaagagagaattcggggtttagggttttacagagagagaaatcttgagtcaccatattcatgctactttctattttgtaaaagataaacccttttctatatttttctaagagaaaatgaaaaaaaaaaaaaaaaaaaaactgagagagaattttgtgtattttttttctaaaattaggacaataaaaaaggtgttttatttgcaccttaaaattataaatacatcttattattaaaaaaatataaatttaaacaaattttaaaaaattactcttaatatt

SEQ ID NO: 103281 - DNA, 695 bp, Cannabis sativa
  modified_base (565)..(568): a, c, t, g, unknown or other
ctctctctctctctctctcgaaaccctcaaaaccagctagggttgctgtgtttttctccattttcaagctggttctagcagatattaagggaccttaaactctaggtaagtctcttgtagttcactctttagtttcttgtttttgaagaaaatgaattatgcatgttttgtgagatttgttgctgtagttattgttagtgtttgttgttgttttcagtgattatattatgctaggttatgttgaattaggcttgaattgtgggttgttataaggtttgagcaagctttgagtttcggaactcaagcttggctctttaatggcaagtttttctatgagtgcatgtagttgtgttttatttccttgaatatgttctttgggatatatggagcaggtctggaaattttggtatgatttggggttgttttaagcgagataagaatttttaaatccttcctgcactgaaccggaattccggttcaagggacctataggaactggaattccagttggtccccaagaaaccccgcagaaccggaattccagttggggcaattttgggaaccnnnntttttcccatttttgtgttgtttaaggtatttccatgatattcatctataggaaaacttttagtttcaagtttaagtccccagaaagtgatttagcgtgtcacttacctatgttatgattgatgtga

SEQ ID NO: 103282 - DNA, 741 bp, Cannabis sativa
tactgaatggctctctgtttgcccaaatgggggtgttttaaatttgcctattgtggcttctgatcatgggccaataatccttgacactgatatgagaaaaggaaagggctctcgggtttttcggttttatgaagcttggttaagggaacaatcttgtcttgaggctattaaggattcttggctgggggaagaacatagacggggtcatataagtttagcgcaccagttgaagatcactaagaatgcccttcaagtgtggaagaagaagtctttcggggataatgacgccaacctcaagatgcttgaggagaagctttcaaggattcaatctttggatgggatggaagcttatagtgatgaagagaaacagattaaatgtcgaattgtggaagaatggaagagaaaggaactggtttggaaacaaagatctcgagaactgtggctgatgcacggggatcgaaatagcaagtttttccatgcttctaccatggtgcgaaggaaaagaaatcatatctgggccttgtatgatggtgataacaagagaagggacagtgagaatgacaaaggccgcatcctcaacgattttttctctgacttgtttcaatcttcggccccttgtatcccggagggcctggacagattaatctccccttcggttacgaatgaggagaacctctctttgtgtgccatccccacagctgatgagattaagaatcaagtgttccaaatgcatcctctcaa

SEQ ID NO: 103283 - DNA, 758 bp, Cannabis sativa
ttggtttatttttttaagatatgtatttatcaataaaataaagtaatgcttgaaaatattttttagttataatttaatttttaaataaaattactattttttaattaatataatattttatcgtggtttttaataatttttattaattttttcagaattaatagaataaaattattttttaaattatttatttatttattttttttgataaaaagagacaaaattttgtatttgacaaaattttgtatttgacaaaatttaagagataaaaatactaatttttaaccgtgagagaaatgaaaacttaataaaagacataattatgtaacttttatatattttaaaagacaaaatttggtagtgttgaaaatttaggaagaaatactaattattcaaaaaaaaaaaaaaaacttaatataatcattacttactcaaagtacccttagtttgtctcaacttttattttagtaatcatactaatatataaatatgtccttttatatattattttgaaaatatatgtatgttgactatataattataattaacaatatatagttgagaatatttaacctgaatttggatacatcccatcctgaatgattagctgctttagttaaagcgtctctccatttgcgtatggtagcatcatcgtaacaaccatcatgtttctcgaaggcttcttcataacttcttttttgtttgcgaacatcagtgggatcaacttggtaaaacacaggcacaacaatatgtgtctt

SEQ ID NO: 103284 - DNA, 696 bp, Cannabis sativa
  modified_base (257)..(273): a, c, t, g, unknown or other
atttaagtcgggtctaggtctggggtcggatttgggttcggaataagaggccgggttcatcgcaagggccgtggggagaggatttgggttcgggtctcgtcgaagtctaaaatattgattaagaaaaaaaattgtttaagaaaatattgaaagtgatttttttaaaaaaaatttgattgtcaattaaaaaattaaaagtaaaaacagttttatagaacatgcttttgaaaaatattttcacttttccaattttaaannnnnnnnnnnnnnnnnaaaagtgttaccaaacgctacctttgtttatgttttttacaatttttttttttttcaactttacagtttttatttttttaattgcagttttgtggtgtcttataaaaataacatcaaaacaacataagaataatatacaaatacaataaataaataaataataaagaaataacgaaattagagcacaaaaataacattaaagcatcaatagttattttttataaataaaaacttataaactgtgaaaatgtttaaaatttcgtataagtgtagttttgattttttttttttaacatttttaagtatatatgaaaatatccaaggtgtttagagagtgtctgcccatgttcatgctctgtggcagtttttcagtttttttcaaattttccaacccacttcccctgttcttccaccatcaccatt

SEQ ID NO: 103285 - DNA, 748 bp, Cannabis sativa
  modified_base (399)..(408): a, c, t, g, unknown or other
  modified_base (621)..(622): a, c, t, g, unknown or other
ttaatatgatatttgaatttatatcttgttattatatgtatatatatgagatatataatatatagcatgaatacgaattatgtgtattatatatatgatgagatataatataatatacataaatatgttgtgagattaaatatgtgtaaatatttatttctatatatttatatgagacacccatatataatatatatgtgtatataatatatatcatgcatattaaaatgtatatgtatgtaatatgtgtgaggtatgtaacatatataattgtgtaatttgaaaattaatcttgtatgattgaattttcaaagcttaagtacttaaggagaaaagtggtcacaaatatattttggcatgcatgattcaatggaatcaatagtgagaggttataacaannnnnnnnnnctccatacaagattaaagcatgaattttcgagagatgggacttaaactctcatagtgttttgctcgttgatggtaacctatcttaacactagtaaaaatctagtcttaagttcaataggtaataacaagtcaatagagcgaatgtggtactcaattgtcccatctatggatgagtacatgtggctattaatttttaatggagcttaagcttannaaaactcacttaagcttaagaagtgtgtaaagggtggtgagacactaaaactctacctatatggactagatgtggtgccgcctcttatgagaattggagtattctctagagagtccatgaattgga

SEQ ID NO: 103286 - DNA, 530 bp, Cannabis sativa
cacttgaaactgactcattgttggctgtacaaggcatcaataacagttcacaaatgccatctgcctttgggatggttgcttgggattgtaagaaactattgtttgaattgagtagtattttcttaaagtttgttaagctttttgctaacaaggctgcacatttccttgcgcgtagtgcttgttattcaccagttcgcatttttcacagcaataactctcttgaggagttattaaacattgtaacagctgattcaagataaataaaattgccatatttccattaaaaaaacaaagtaaaagtagcaatatgcttagcttgttcatacaccattaaatttataagcaatttgtaataaaatcccaaaaaaagaaaaattgtaataatgagagagagagagagagagaataccttaacagaaatgatgtgaattgggatattgaacccagctttaaaaagaagatagagaaaagaaagaatgggaaaaaaatatgtcatttctgaaagtttgagtttctgaatgaatgaaaga

SEQ ID NO: 103287 - DNA, 547 bp, Cannabis sativa
agaattctaaaagtattatgcatataaatattttagtcaatctttataaaagtgaactcaaatagtggtctaaatttagcacatgttaaaaattgtaccaaatttaatacaaaatataatacagatcaaattttaccccacaataaatattattctttttaacattttatttatgcatttgttaggtgttatatgacgttatatttgagtcatgtttttaagttcttttaattagttttatttcatttggtacactttacactttagtttgctcatgtttttaaatttttgtgaataaggaagatttagaggggtaagagtaaaattaattgaaaattgaagaaaaatgttaattttagtgtccgtgtgcttaaagcggagtctttgaaggttttgagaaaacttggttgaagctcgggacttgaaagaagattttgaaggacttaagattgagccataacttagtgaaagtcatgtcgtggcccaaaaagacagaagatttggtattttggtcttggacacggaccactatatttggatgaaatgt

SEQ ID NO: 103288 - DNA, 568 bp, Cannabis sativa
aatcatagtgtggaagattgtgaagaattctaagacctgaaggagatccagtttcagatcttgttaatactctgcgacagaaatgaacaagggttagagatctgaacggaaggagccataatattccactaccaccaatgtaagattttctagaactttatacgtgtttaattcattgtttaggaaattcatgtttaggatgttagattatagattaataatcaaacatacatgtcagtaaatctagatcctcgtaaaataactttcaacaagctcgattttgatgcttcaaatcaagaaattttttaagaaagttttgtacagctgggaaattgtttgtgtggctatttctagggttgttatgttttataaataggacctagagagcatacaagcgatttttctcttataggctcatatttttatatctttcgttgtgagaagagtgcttcatttataaaaacttagagtgttcaactagattttagttttcttattatgatctcatactattcataaaataagttgaagagaagctttgaacaagttggtgttaggttttatgccc

SEQ ID NO: 103289 - DNA, 646 bp, Cannabis sativa
tcatggtctggtgcaatgccagagaatttctattaggtacgtccaacactgcaccgatgtggtactctataattagttggcgattaaaatatgcggaaggaaatgtagcaatgcttggcattggcatttgtgggcaatgcaaatgcatcaaaacatgcatatttactggaaatttacatgtatactaactttggtcattttttacaaaaatactttggcagtatcttttatttttttactgtatttttttataagtttcatactgtagtacactgtgttaagtttcactggtattctattggtgttttttagttgttttaatgttattttgagttgttctgctttgtattttactagtattttataaaaatacagtatttttgaaaagatttccgtgtgacagtatttttgtaaaagttaattcaaatttcagtatttttgtaaatttccctatatttacgttgtggaacaagtttgaacttgggctttgatgtttacaaaagggttcaacagttttgggcttaggaatcaagcccagcatcaaagttagcaggagaaagtttatttttatttcttcaacattcccctgattaacattaatattctctgagtcaacccttcctgggtccccctatcctccttcttc

SEQ ID NO: 103290 - DNA, 542 bp, Cannabis sativa
atgaataataggtttgtaccatatggccctatatatatatatatgtttattaccatatcatatatatggtgataaacatacatagtcccatatatataatatatatatatatttacaccaccatattaacttttcttctctatcatcaaaattatactttttctattttacattaaatatatatttacagtataccatacataaacttttttacaatttcttattacatatcatttaaatattatattttaaaatacaatattattaattaaagtacaaaagaaatgtaataaaaaataaaaaaataataataactttttgtaggatctttattttacatatatctttgatacatataatactagcatacctctctaatatattatagagaaaaagggattttgatgcatctgatgagagtggcagttggtgatcattatatcggtctcaatttaaaaagaaaaagaaaagaaaaaaaaagtgcatatgactaaaaacaattcttattaaaaagtatcttagtcataccatacacaaattaa

SEQ ID NO: 103291 - DNA, 537 bp, Cannabis sativa
  modified_base (132)..(154): a, c, t, g, unknown or other
gggagaagggcagaggtacaaatgcgtggattgaagttcgtattgatcgtgctgtggtgtcccaaaactggttagatttgtttcccattgctaagttgctaaacttggaggtatctacatcagatcattgtnnnnnnnnnnnnnnnnnnnnnnntgtaattcaagttgttgccagtcgctcgtttaagtttgaaaattcttggctccgtgaaccaatgtgtttgcaaattgttaaagaaacttgggagagtagtggtgattgcccgattacccaaaaacttcaacactgcggagagaagctgaaggcttggggaagcgattttagtggtaattttaaaaagcggatcaaagagtgtaaagcggacttgagatgttggaagaaaggcagagaccccgtggccattcaaaagtataaggaagctgaagttaagttgcaggaggtgcttcttcaacgtgaaattttttggcgccaaagatcgaagcaactttggttgagagaaggggaccaaaattctaaatacttccatgctatggcaa

SEQ ID NO: 103292 - DNA, 522 bp, Cannabis sativa
  modified_base (279)..(281): a, c, t, g, unknown or other
taaaaaaaaactatttagtgacaatatttctttttgtcacaacatatcagctttagtcacaattacttactactaaaaaataatatttagatgtcaaatttccactaaaatttttagtcaaagatctttatatggatagttaatacttttagggtttgtttgtacgccgtattatatcgtatgtattatatagtatattaaattatattttatgtaatatttttctataaaattatatgatattgacttttatggacacttaaatatataatattttannntaaattaaaatttaacataatattatataaaattataatatataatccaattcaatataataaaatacaatacgacttaattaatacaacgtaacaaacaagcttaagtcacaaactttttaatgataacatgcgctagtttaatgaccattttttattagtaagagttttttattattattattatttattagtagttaaaaaaaattaaaatttttattaaaacaaattatatatatgg

SEQ ID NO: 103293 - DNA, 540 bp, Cannabis sativa
cactaaattaaaatgatattttagttgtttaattgaaatattttacttattcttatatatataaatgtgattttgattaataattttagaaacatgacaaattaattaacttctgtgactaattaatctaattggatcttataaaactgcataagagaggaaaaataaattaaaaattggcatataaacaattttcttttacctttaatttcttgctatataacaggaacataaagatttgctttcaaaaaaaaaaaaaaaacaggatcattataaaagaatatgaaatcaagaaagaaatatttattattttatataactatgatgaagagaaaattagttaggccagcatcaaactaacaaaaatattagtaatatgtttattttaaattttttaatcacataaatacattttataactacttttgatttttaattttaaaaacaaaaaatataaaagtattctgtaaatttcatttttatctttattgggttcaggtctgaagttgggatcgggggttgggtccgagtttggagtcg

SEQ ID NO: 103294 - DNA, 578 bp, Cannabis sativa
gaaagagaggataataaatttctacaatcactaacaactagaccaaataccgaagtcattggctgagtagaatgacttgcttgaactgctaacatattgtcgctctcaatcatgacgcctttccagttgtttgttttaatccaactgagtgcttccttgatgcccattgcttctattgtttcagctagaaaatagcctccatgatacatggcttgaatgtggagtggggaagcatgatgatcacgggcaataaaaccaaatcgataagaattttcctgctcaagtacagcggcatcaacattaatcttgatggtttgtatctcaggtttaacccaaagctcattttgatcacctatattatcaaagaatatagatgaaagtgaaataatatcttgagcttttctccaatgatcaagagaagtaaatgctgataccataatctcgttcaaagagtaagtttgatttttccaaatttttttgttacgagctttccataatgcccagcaagccattattttgcacatgtcttcggtggcagcaaaagaaaaaacctgttcgagccatgaagcaaaggtggc

SEQ ID NO: 103295 - DNA, 575 bp, Cannabis sativa
ggtatcgttacctagttataatatataggtatcattttcttttttctgacaagaaaattctattacaaaaatattaaaagactactagagaaacatttatcttcgtcgctaacaatttcacacacatttcacatcaaaaaaataatttcatacacatttcacataattatattcctcactctacatttacacagtattttttgtaaattattagtgagcaaaaaatactaaaatataaagttctagcaccatataaaattatcctcaaagaaaaagaggagcacaaaaaacatatccaaaagtaaaccacaaaattaaaatatatattcttccataatattgtcataatatcattgaaaaaaaaattgcactggtaactaatgtttgacataatactttcttattttctaattattttttaaaatctccaaacagaacatgatgatttgttggtacgagtgaacctacaaaaaaaaatcttactattaattaagattatattcaattatagaaaattaagcaatatatctttatatattaaaagtgcctatctaacgatatttcttggtttaaca

SEQ ID NO: 103296 - DNA, 596 bp, Cannabis sativa
tatactccctaaactttcatccacgtcaggcttgttagtaaaattaaacgaaattgaacaaaagtcattgaatctaacaatttcaatagttcgagagaaatttttaacggactgagaagttcaggaggcataatttggtatatgtcaaaaattaaaaggtaaaaattctaattagccaaaaaattatttatgaagtattttatgtattattttgtgaaaaagaaaaaataatgaatgaaaatatatataaggtaattccatgatgaatcttattgaaaagtttatcatgccttttttttaagtccatataggtataattgtttacatgaaaattagctctaatgacgtgaatatcaatgtttgacacgtagcaaatagaaaacatttatggagttaagtgtcccaagtcatgccagtcaactctaggaagggtcattagccctacgcctaggttgactttggcgactccagagtgagtgtttggatccccgccaatttgtttctaacacaccatcctttagtattttgaaccaaaaagtcaagaagaatccaagtctgaaatatgagaactaaaaagagtcaaaacaacctcctga

SEQ ID NO: 103297 - DNA, 547 bp, Cannabis sativa
actacctaaatatcagatagactttcgatacaaggcaccatatagatctttgatcgcgaggtcatcacattgagagtttcttccacacatcgcaaatacagcccactatcccaacgcttgaacctttggctctgataccacttgttgggctccgttctttcaccttgtcgggttgctacctcaccttgaggtacatactaatatgatattgtccgctttggacctaagccctcacggttttatttttgggcaccttccccaaaggcctcatactaatggagtagtgtccatccttatatacccataattcttcccattcctagccaatgtgggacttggattgataccctaacaattttgttgtatcagttttgcactgacaatacttttttatagcatcagttgagaacacacggcttagacacccaaatttatggggtgaacatagccgtcaataatgtgagccgacaaaaaaagtaatacaatcaattctaaaccaataaaataaatcttttttttttttgtagtagtgttagttcatacccca

SEQ ID NO: 103298 - DNA, 1013 bp, Cannabis sativa
caagctcttaaaaaactcgttatcaaccctttctagctattcattcctttgtactctatttatgtcttgtctatctcggtcaagtctgtgatgaccttatgatgttgtgttctcgctaaccgttatatttataattttatcacttttattagacaactattttataatacaatacgagaccaatatatcgtttaattgtagcatatcctgaggtgagacacttattttattcttcacgtttatagtttttctcaatctttgagacttatatctacatgtcgtgtccatatttaatgcttgaaatatcagcataataattacttgatataaatatttctttttattattaaaatatttttatttcattatttctttttttttattatattaaagcatgatacattatttaatttagctatcatacatatttatgtacatatgatatataaatatattttttttcacaaaaacttgttaattacttttatgatttaaatttaaatttatgttataattacttatacttaaaatatattttaaattctattagtttttatttttttagaaagaaaacaaatacagtccattctaaaattaaacacaattcaatccaatccaatctaatttaatctttctaaatctaatctaatctaatcatgcgtgttaaacaggaccttagagcattgctattgcacatcttaagttatctaacactacacctatgttgacactttataattggttaataattttcaatattattaaattaaaaaatgtaagacttgatattaaaatttatacaaattgcaatacactaccttttctgttgtttgacatcttaacctgccattttgcatttcttttattatttgtagcttaacatcatcacaatagtattttatggttagtgattttttatattcatttaattaaaatatggacctctaatatttaattacaataatcacattatatgtagagtaaagtatgatgataaatgtagagtgcaagta

SEQ ID NO: 103299 - DNA, 918 bp, Cannabis sativa
ttctttttttgtatttttacagaattttacataaaaactcatattgcaactaggggagcaacctaaatcacaactaaaaatcgtatagcaacccacatagaaaccatctgagaaactactttagaaatgtaaactataaattttaaaaaaaaataataatatataagataatttccatataaattattggaatttagtgatgaaaaaaaatataataaaaaaattgaaatatacttgtagtcccaataaacttagaatacacatatataattataacatattaataatttacataggacaatgaaattatttatcaataaaaaatattgttatatagatattctaggagtgtaaataggtcgggtcggatctgatccggctatgatccgacctgatccaaatcatgtaaggatctgtcttgccccgccccgctagatcagatacgtactcggatcgaattagattcgaccagacttattcggatcggatctaatccgacccgactcttttttttttaaaagaattttaatactaacttataattttatgtccattttaattctgtattagtattatttaatacaatactatgtgtggtattaacatgtattaatagattgtgtaaagataatatattttcgcaataaaatctaccccagcaccaatccaagtttaggtccgggtccgagtttgggttcgagtcagggtcttgggtccgggtccgagttagggtcctgggtccgggtccgggttcgggtctcggtacgggtctgggttcaagtccaagtttgggtccgaatccaagtttgggtcggggttaaggtcctgggtccgggtccgggtctcggtcttggtcggagtttgggtcccgcgttagggtccaggtcctgatcccgagtctcgacttcgggtctgagt

SEQ ID NO: 103300 - DNA, 665 bp, Cannabis sativa
aaaactcccaaaaaagaagaagtcagttaatgtaatatatctattagaagcaccacctcctcgacaagaagtttttagaatcgagaagatactggacatagagaaacttgatctggatccaaggatcctcgatttaccaacaccacacatgttgcagaggatacatttaaggtaccaatcgatccttctgatcataataaagttttaaaaattggttctaaattaacctttcaatagcgagaaaggcttgtcacttttctcaaacaaatctagatgttttcgtgtggaaacattcgaatatggttgggatatcactgcaggtcatgtgtcatcgattaaacattgaccctaaagtgcgaggtgtctgacaaaagtgctgcaaaatggagcccgcgaggtaccaagcgcttaaagaagaagtagattgccttttggcatgtggcttcataagggagtcattctacccaaagtggttagcaaatcctgtactagtgcccaagcccaatggctcatggcgcacatgcattgattttattgatttaacaagaaagaacttggaagcaaatcccaagagaacaaaactctaacgataagtatctagaaaactctagaaagagtttggaagaacttggaaaggttcaattatttcaaaatcaagcaaatcc

SEQ ID NO: 103301 - DNA, 930 bp, Cannabis sativa
aattattttgggtgctaaaacagataagagtgtatcaatatatctattttaaagggtgcatggtaaaatttccctaaaacttataatgcttccagtaatatcattataataaagtaccaagagaatgggagatatatatttatttatgagaaatattaaaagatattaatatgttatattgttattgatgttattagatcttatataatttaatataataaattttatgaaaatttgttaacattaattaatcacaatgtgtcacttatagatgatgcaaacaccaaatgtttaataataatgtttttttacttaattagggttaacaataactatattattttgaaaaataaataaaacaattgtaaaattcttatgtcaaacttaattaatacaatcttttttccctaaagattgatgctttatcatacaataattatgttatgttaaagtgattaatggatcaattaggtatggaatggatccttattcccttttaagtagtaatgataaaaaaaattaagagcatcttaaacaaagttaatcactagttaaagttgaaggtactaaagaaaaaaaagagctttatactcaatttatagctaattattattttattaatatagattaggagtggtgtgtatacaagttcaaagctccgaatatttttatgattttcattatggtgtgtatgacaaagaggtagcagtgacatataatctgttcataaatagtaaaaatatttttttttttataaaataatattttgacatattttttaacatttaaataaaaattctcattttaatggtactattaagtaatgtgttaattaaattttagggttattttcaaaaatatgggaaaaattattaaggttatgataaatatggcataaaaattaaatgccactaaatatgacattatcta

SEQ ID NO: 103302 - DNA, 533 bp, Cannabis sativa
tttttaaatcatttaattagtttttaaaatttaaaaagttctctactattattattgattttctacgtatttatataattaaaaaatagtatactttaaaggacataatctagtagtatcataaatccaaaaaacaaaaaataccactttaaatatgatacaatattaattaacaaaaaaaaaaatatgatacaatattgataatttaataaaagtcaaacaaaacttattaaaaatccaataaatactttaaacaaactaactaagacaatggataaaaaaaaaaatcaaaattattatttaaaaactcaatattttttttctaaaaaaataagtgaataaataaaaattttaagaaaaaatatgtccttatgtgtgaaattttcacggtaaaaacacaatattgacctatattaatatattatatatgggtgatctaattccttatttattgattaataattttaccaactaaagtgacgaggtcttgaacgctgagatttatatttttaaacttccttgtttgattaaac

SEQ ID NO: 103303 - DNA, 701 bp, Cannabis sativa
ttcggttttcaactaataaatgctttgacaagtaatatttcaagatccgattttctctcaccacggttgacggttgcacttgattattttttatttcccaaattcgcttttatgagggggaaccgaggcatctgaggttcttttgaaatgattaccccttttcgttgtttgcctataaatacaagtgagcatttgtacacaaactcattttcaccaaccttccttgctaagtaagttcagagtgaaaagagagattttttggcttcatgtttgctaaagtgccttcatcaaaaatgctcgtttggcttggcgttacctgaatccagacatctgatccttgagtaagttctcgatttcctttatggttactttgcatgcttactttttgaatgcaccttcgactttgctgtagaagatatgtaggaaaccctaagtttagaaactctgtaattctccttgtcatgggttcacgcgattgcaccgtccgtagtgtttgctttttgaactgcataatgcctgtctttcatcttgcttattctaagcttcatgaattttttcgccctcactcgagaaaatttaaacttcctgagttttgactttttgttgaatattcttttttttttaatctgttgagtactcctggtctgcatctttgcttattttaacgtttgatattctgaccaaacactcatcttgtgtgt

SEQ ID NO: 103304 - DNA, 512 bp, Cannabis sativa
aaaagtagatatttttctatctttttatcttttttggctataaaaagaagtggattttcatacttttcatcaagcaattagatagaaacaaagtgactgagaatgctttcaaacagaatgtttcaataatttctgcttttctattttcttcttatgttcttagttgatatgtgttgaattgttacgatgaacaagagtagctaaacaattattagggtattgatggagattgtttgacatctgtttatggtatcatttaattctttcccaattttttacgtgttctattttattcgtacttatttcttttagttgtgtgactatcaattaattgtttatgatttgtatacgagatctgagaagtgaatgtcaattatgctatagtgaaataagaacaaatttcgatataagacgggagtcctatgtggtttggatagcttatagggattttatgtttaatgtctttacatgttctaatttatcacgaaagtataaaatttgcatgtaattaa

SEQ ID NO: 103305 - DNA, 589 bp, Cannabis sativa
aaaaaaggcatgtcagtttcttaacgccctttcacacttcagcttttgaaggatacagggtacttaggagcaaaacctgcttcctctccaatggaatataatctcaaactcaacaaagataaatgggcccttctacctgaccccactacataccgtagcctaattagtaaattaatttatcttaccatcactaggccggatatctcctatgcagtaaaccatctaagccaatttcttcaacaaccacgagtaccccaccttcaagctactaacaggatcttacaatacctcaagagcacccctggtcaaggactcttcttccctgccaacacctccccaacaatctcagcatatgctgaaacaagtttatcagcatccaatgttcaaatttcattctttgctgatgccgattggggcagttgtcaagataccaggtgctccatttcagggtattgtgtgttccttggccaatcacttgtctcgtggaaatctaaaaaacaacaggttgtatctcggtcatctgctaaagccgagtatcgtgcaatggcaaatgccacctccgaagtaacatggatccttgctctcctca

SEQ ID NO: 103306 - DNA, 634 bp, Cannabis sativa
aataacaaaaattaaaaattttaaaattaataatatttagttgaaataacaattaaaaaaatcatatgaaacatataatgatataatacttcaaatatatcatttaaagaaaattcaaaaatacaaccagtttattaaataaaagaaaaaaatggtgaaattaaaatcctgaaagttttatgaaactaagataattgttccaatttatttaattatttgtcgaaagccttttccacgatagattatgctaggactcggtaggagagagagagagattgctatataatatttgattaagaaattcagcatgtacctgcaacttatgtaattatttgatgctatataagaaaaggagaatgaataataataagtatgaagagtataaaaaataataataataaaaaaatgtggcagttagagattgagagaagatagatagtaataaaagattaatataatgagaaaaaaaagtgtgacttaattttttggttgatgatatatattttttgttatattctaactaggaaatataaacgggcgttgcgcggtctaaataaaaagttattctgtataaaataatttttatacttatttagtaattatttaagaattttaaaaaatataataatcatta

SEQ ID NO: 103307 - DNA, 952 bp, Cannabis sativa
ttcatcagatgaaataggctgtagtaagatgttattttgatcttcatcaatactacacctaatatcattagcaacagtattttgaaaggtgccatttgctgaaaacagatcaacaaaataatcagaaatcacctcatttagaccggtatcccatcctgaccaatccccattcggcttttgcaactggtaaatttgattgcttcgtttacgagagctggcagtggcgtgaaaatatttgttgttcttgtctcctgcatttaaccaaaactgcttggatctctgcttccaatagatttcctgctgagcaaggatctcaaaataattatttttctcagttacataatcctgatagcagttgtcaaagccagaatgtttcatagcagtcatctttttcttacttttagcaattcgattcttaaagttaccagtaagatttttcccccagctatccaattgagaactacacactttcattttatcaagcagagaaaggtgactattagtttcccaacaagttttcacaatctgagcacacataggttcacggcaccaggagttttcaaaccgaaaatgataaacattatctctatgggggctgtcatgaaattccaacaatataggagtgtgatccgaagaggagatagggaggttagacagagttacctgatgaaattgatcaagccatcgttgagaaactaaggctttgtcaagccttatctcgaccaagtttccagacgcatggccacgttcccacgtatagggatatcctcggagctccatgtcgtgtaaagaacagtcactgaaaacggattggaatccagcaataagtgcagtgggataagcatgtccccctcgtttttcagcttgattaccaatgttgttaaagtccccaatgacacaccatgggaggtgcgattcggagaaaagggtgcgcaggagagtccaagtccga

SEQ ID NO: 103308 - DNA, 586 bp, Cannabis sativa
  modified_base (496)..(499): a, c, t, g, unknown or other
taaaattttgcatacatcttgaagattattattattattttataacatatcattattattattattattattattaaaggataaagctaactgggtcagtcaatgatctcacagagaaattttgccatctcgtgctgtaattctcttctttaaagttttccaaattttatgaagatagcaattaaccgtgtttatcttaaacgttatactatcttaattttagaaatacaaaatatatatataggaaaatttgaaaaattatactttaaaaactctaatatttttttcataaaccaatacatttcaaaataaaacatatatgacacttttataaaaaaacccaaaaataaccctcaacccaaccgaaccctcaaccccctcacccccactccgaccacgagatgacccagccccctcactcccactccgaccacgagacgaccccctcctccgaccgtgacgactccgaccgagacccacaaccccgatccgaccnnnncgactcccaccgccccgacccacataaccttcaatctcaaacttcaacccacaacaccatcggacccaacccacataacccatcgga

SEQ ID NO: 103309 - DNA, 677 bp, Cannabis sativa
tcattacacaatctatcaaactcattgttgatgaattctagaccattatcggttctaagtgtcttaacctttaaatttgctttgttttccacttaagctttccatatctgaaattgttctagagactcatctttggtcttaaataaataggtccaaacacatctactgaaatcatcaataatagataggaagtagtgtttacctgaatgtgttgggattctacttagcccccaaaggtcagcatgcacatactctaggactgcctttgtgttgtgagtagctgctataaacttgatcttttgtttcttgccatagacacaagtctcacagaatggtaatgcacatgtctgaagcttttcaatgactcttcttgtgcaattccctcatgtcttgttcactcatatgtccaagcctttgatgccatagctgcatatcactttataaatcttttattttatttgccttagccacaggtacagtttcacccttgagtacatacaatccatgtactctctttcctttcatcataagcattgaaccgtttgtgatccttaggctctcattcaacgacttatagacataaccttcatctttctaggttctaagtgatattagattcctcctcaattctggaatgtgcctcacattatgcaaaatcttcacttcaccattgaatt

SEQ ID NO: 103310 - DNA, 532 bp, Cannabis sativa
  modified_base (346)..(348): a, c, t, g, unknown or other
ttttctctataggaatggtctcacaggaacctgaccttaatgaggtggggattccccgtttaaatggtgaatgaggcagggatggggattattttttatctccgaatgttaaacaaagtagagtcggagatgacactccttgcctcgatgaggacccatttaatcttttattttatatttttaataatattttataatttatactctatgtttttatatttttttaatatattagtatcaattttatgaattttaagttgtgttttaataataattagtatattaaataataattgatgtgtaatattttaaattttatataattaatatttttatatatttaaannnttattataaattttatttttatattaaggaattttatgtcccgtcctcactctcattagaggatttttcaccctaaatggggatgaggactaaaattcttaacagggatggaacgggaggagcacttctaccaatttcttgtcccgtgtgcatctctatttactaacgatatatattttaatta

SEQ ID NO: 103311 - DNA, 617 bp, Cannabis sativa
atgaagtggtgcagaatttcatgggtcgcacatatttcctagccacttgtttgggaatctatttcggcttgggcttcatagtatgagattcacgctgaggaagcgatgaatctcttgggtttaatgcagttgcagcagcacgaggcaattttggagccaccggtggaatatttgagggggcaggttcggattccaccatcttgcttggatgccctaagtgcttagtcttagccattaatttctgaaagaggaagaataaggaagagtaatcgggtagaagagaagatggtgagattagatgataaacaaatcggtttaaataaatgtgtgtaagaggagcaaaaaggaaaccaacttaagaaaggaaactaccagcccgcgagcacaagaaaaaaaaaccgacccactctttttttttcaaaattcttttttaaaaaaataaaagcaaataagaatcaccaagatattttccaaaaatagtccaattaagaaaacccttcaagacaatatacaatgatatgaaatcaaaatttaaaaggtaatttatcaaaatatatcaattgagattaaatgttgatacttaccaaacaaaacaaagattttcttagcccacaagt

SEQ ID NO: 103312 - DNA, 775 bp, Cannabis sativa
  modified_base (610)..(613): a, c, t, g, unknown or other
ccatatcctggcaatggggaaaccctacacggttccattctgtcactgacgcccgtacctacgcccgatacatcgccaagaagaaaccttacaatggtttcattttgtgccatcacctggcaatggaaaaaccctacacggttccactctatcactgatgcccgtacctacacccgatacgtcgacaggaagaaatgctacaatagtttcattctatcactgaggcccgtacctacgcccgatacatctcaaggaatatcgcatcacctaatcaggtgagcacgtacatcatgttcatagtatcatcacattatgattacctaatcagataattgataattttagggcctaataaatagcggtttcgattcatagtcatgactttataacggttgccccacaggtacaacctgaatgccaatacacatatatcacattacctactcaagcaagattatgccacggcctgacagtaatcatatatattcgtatattgcattttctaatcaggaaagctcatatcataacctaacattcgtatatcgcattgccttattaggctagctcaacctatatcataacttagcaccatatcacctaatcaggtgtnnnnatatatcatattgcctaatcaggccaacccatgtcataatctaaaattcatatatcatatcacctaatcaggtaaaatcgtatgtcacatattactgtctaatcagacagtcaatgattacaaaacctgtcatgtcaagtggtacattataattttcttacc

SEQ ID NO: 103313 - DNA, 710 bp, Cannabis sativa
gaacaaatcctatgtggcttcgcctctagtggatcaagatctggtagttagttacaaccgaaattgtaactaactccctgatcttgatcaaccctaatctacatctataaaagcagaatcagagacttaccaatctctcagttgagagataccagaagccagaagccagatctgagagttttactctcaaagttacagatccagattgtacgtgcaaaagaaaaatacaagagagttagtgagatagtgagaaaaccaaaagaaacacacagaaaagaaagatcgagtgaaaaccagaaatactagtcgagattgtgacttggatttctcacctgtttgtaatactcttctcaaaatagtgcagatcctgagaaacgtcttcaaggcgagctcaaaagaggatgtacccctgatttagggcgaacctctataaactttgtgttctctctctttatttttctctctattgtgtgtgtttgttgatctatgtgtttgtgtgtttatggtgattgtttgagcatggattctgggtaagatcgatctgattgatcgagtgagatctctggttctagggtttgagaaccagagagaaaggaaaggaagagagagagtttgagaaactctcgaatgttcgaaggtgcaaatgagctagggttagctctgattgaacttagttttgttcaagtcagaacgacaaatcgtttggttta

SEQ ID NO: 103314 - DNA, 659 bp, Cannabis sativa
tagacaactttaatcaattatttgaaaaaaaattaaagtggagtgggcttgcaatatatcatgtatttccggataaattacgttaatcatacacatatatatgcccctcaagtaattttaaaggataatactttgtaattacttggataatacttcaacttcaataataataattgaatttaatattacatcagaaagagagattatagcattttgatgagtttattggtagtagggtcgcaaatgttcaacgttccagtggttttttattagcgagccattaggccaagccaatttataaactctagttccaattattgcctcgataacataaggaccatcccaattgggttaaatactcctgtaggaaatgcagatctcctattcactgggaaaaaatgagagaaaagaaatacctaggtccgcaataagtgcaacagactaatgaagccatagaaaagattaaggccagaatgcttgcctctcagagtaggcaaaagagttatgcagatccaaagcgcaaaaatgtggagttttaggtagggtatcatgtgtttctacgggtgtctctgatgaaagggatcagacgtttcaggaaaacaagcaagttatgccctagttttacaggaccgttcgagattctcgagaaggtggggcta

SEQ ID NO: 103315 - DNA, 1186 bp, Cannabis sativa
attagttatgctcttaaaatatacaatttattaaagattttctctgaacttttatatttacaaaaatttagtccttctcagtttctatcccattatttcatttaaatactgacgtgtctttgtaaattagcaattttgtctgtaaactttgacaactattaaatcgtacccctcaaaatttaaacgagaaaaattcaatatttattttaataaatcttataaaattaatttagatcctaaaaaaatattttgaataattaagaaaattaaaaaataaattaaaattttaaaactaattaagtgatttaaaaaattatttattaattttggtggtattttttaagatacgtgtttttaaataaaataaaatttgaaaatatttttttttaggaataatttaagtttttaagtaaatttaatattttttaattaatttaatatttttatcaagtttattaataaccttttattaatttttttgagaattaatagaatattataatttttaaaataatttcttttaataaaagggggcaaaattttgtattggtcaaagttcaggggtaaaaatattaatttttaacggtaaaagaaacagaacctaacggaaggggcataattatgtaaatgttagagtaatttgcggcataaatatctaagtttaactcctatttgcaaataaatacttaagtttaatttttaataatatctaaattataattctagaacaggtacctgactgttaagtgttaagtaaattaccacgtagcaattcttgattggtccatgtcattaaatttttatttttttaagaagataaaaattatatggtgtacttatggaatcaagatcttctgttaaaagattgtgtttcatagtgtattaaaccaatctcattgtgacacatcaattaatttgagcattttaagaaaaaaaaaactttatagatagttaattttttaataaatgaaaaattagttgacgtgtcaaaaacttagatttgtttagcacaatatgacgcacaacttttttacaggagatcttgattcatacttatggggtgcaaatagaactccccattaaatttctcatatgggagttctatttgcaccccataaaattataaatacaccctattattaaaaaaaataaaacttaaataatttttaaaaattactattaatat

SEQ ID NO: 103316 - DNA, 692 bp, Cannabis sativa
  modified_base (422)..(423): a, c, t, g, unknown or other
aatttcagctttagtttctttaagatgatatcacaatcctcatacttccatttggttggcctcagagatacccctagatatttcaaaggaaatgtaccagtcttaaaagaaatctcctgctgaatgaaggttaccgtatcctcaggtataccgtaacttaatttattattatatatattttttaaaaaaatatgtgataaatatatttttataatttttattagctagtttattagaattggtcattttattaatttttttaaaaagttaacatttactgacttagtttccaatcttaagaacattttgcatcaaaccctttaaaaaaaaatttaaaatattagatgacatctatccttggtcattagttaatcgttatcagcagaacggcagtatctaaccgtgggcgaagagatcatatnntataccacacgacagctaactgtgtactctcactcacacgacagctactggtaagttagttttctcactccgacaccatttgagtatagttctttttctcctttttgtctcaaaaatttgggatttgagtcgaataacttttgtcatatgatttttaattagttgcaagaataatgaaaatattcacctggttttcaaaaggggcgtgtttattcggctgagtccacttggaatttagctcgtacagcgaaataaaataaaaattgaac

SEQ ID NO: 103317 - DNA, 571 bp, Cannabis sativa
attatgattttggtttaaatctcatttattacgactccgcgtcagttggctaaaaatccagtcaacattttggtgctttcattgagagctttagccaaaacctttaagtttttcactgaaaaaaatggtgttaacccgaagatctcaagagcgacctgacgaagaaatggaaagtgcccaccaatttccatcagcgagcaacctccccgaaaacaatggagaacgacccccacgtccggggaacggtggcactaccaccaccgctcaaattgttggccatggagcaactggtcaaactgtaggcactggaaaaacaactactgggcgtaccaccaacgccactaccgcaggaggcagcgctactgatggcgtcaccagaagaggtaatactagaaattttgtcccacctactgacagtgcgggccaagctcagagtggccgcgaccctggcgtctttacgccgcggaatgaaccccatgttgacatcgagggaattgaccctaagatggatcagctgtgagacgcgataggccagatgcaaggccagttctaaactgtgcaccaagagcaa

SEQ ID NO: 103318 - DNA, 993 bp, Cannabis sativa
  modified_base (68)..(69): a, c, t, g, unknown or other
taaaagtattagtcacaaaaataataatttattgtgattaaatatatttttagtcacaatatttgttnngactaaaattaaattagtgataaagatcataagtaatttttagttgtaactagaaatcacgttgaatcacaaaacttatgttgtgacaaaaatattgtcattaaaggtagctcctttttgtagtgaaattacaccattaatggtattagattttgagtctataccaatttggtgttatttatttatttattttcttgcattctagctcttattttactttattttaaaaattagtattacattttagtcctcaaattgaaatttatcacaaaagtaataattgatcatttaaaatactaacataaaaaaaaaaatataaaataacaataataaaaacactagtattataaaagtaactttttggttactaatattgttaatgagaaaccaattagttacacctttatacaaaaaactttatttttatatgatataatatttgagatacgttttggttacttttaaaatttatttgtatatatcttagtaattaattagttatttttatgttatattatagtagattataatttaaattatatttagataatcttaaagattatttttgaaactaatgaattgacatgtaatataataagttataatttttatataccaattatttgaaatctaattaattatcgtacaatataatataatttaattagtaaaattttaaaataaatgttaactaagacttaaaaaaaattataaaataataactaatcagtactatattagtagttaagtggtttcttttttggaaataacaaaaaaaatatatgattttcacgttttgaaatattcacattgaagagcagatcataatgatatttttttagactcatatcgatctctaggaattatttttaaagtttaagagaaaagagagaaataagaaaaaaaaaacaataaagagagaaa

SEQ ID NO: 103319 - DNA, 560 bp, Cannabis sativa
aaagaatacgaggtacccttcaggtaagtcattatccacagaacgaatctagaaggaaaatttagagcttcaagcaactcctcaaggaagccccaatcaatagtgtcataagctttactcaaatctatcttgattgcacatctaggagaacccccttcctgccatagctcttgattaagtcctggaagatcaaaatattttgagctatcgatctattcttgatgaatgccccttgattttgatgaaccaaatcaggaagcacctcaactaatctcttacaaattaacttcgttatacatttatagatcgttgagcagcaggcaataagtctgtagtcaattgctttttgaggaatttccaccttaggcaccaaggaaatcatagtctcattgaactgaacaagtatagctcccgtactaaagaaactcttgactgctagccaaacttcagtacctatttcagaccagagaactttaataaaaaataaataaatttttaaatcgcttaattagttttaaaattttaatttattttttattttttttaatcattcaaaataa

SEQ ID NO: 103320 - DNA, 506 bp, Cannabis sativa
ttatagttcaattatttcatttatttgaaacatatttttcttcatttttattgtggttttgctcacatgtagtttaaaattgtatttgattcgagtaaatttttttctaataaaatgtttggcaaaaattattgctataagtaccacttagagttagcgtcttgtaattggttaacgatattctataataattattaaattaatttatgtgagatctgatacttaattacaccaataacaatatgagacctttaaatggtaaaataatcttcattttatagtcgctttgcacaattattttgtttcgataattatcgagaattctcgacaagatattgagaattcttgatagaatgacgggattgtcacaagactattttgcgagctatttttcccccactagttaatcattttagactataagaaacacttcttgtaacatttattcttgttcacatttctaataaccttggaaatttcacaactagagtgtgcttgacctgatt

SEQ ID NO: 103321 - DNA, 679 bp, Cannabis sativa
ctaattaggatctttaccctcaaattttaacatgtagcaaatcataccctgaacttttaagatcgttaaaaatgccatctgaactatcgagattgttagatttatgaacttttatataattttagtaaacaaagtctaacatggatgaaagttcaggatattatctagtatatgtcaaagttcgagaggtatgatttgatcgatttcaaagtttgtgagtatgatttagtacataaacaattactgatatagtaaaattaaaaattaaacaaaagtccttaaatctaacaatctcaatagtttaggaagaatttttaacggtcagaaaagctcaagcgcatgatttggtacatgttaaatttatgggtaaaagtcataattagccttaatatgatgcttataaatattattttttattacaatgctatatattttttcttaattttatttttcaaaaaactgttccaccttgcttttatgtgagtccatctcttaaaaattattaaattttataaataatttagagtctataaaaaaaattaaaaaacaatattgtagcatattttcggacataaaaattaattaaaaaattgtaataatatgtaaaaaaaagaagttataaaaaattaaggtaagactcatctaattttcattgataaattgtaatttattatttatt

SEQ ID NO: 103322 - DNA, 531 bp, Cannabis sativa
tgttaaacaacatacttattagtaaatctaagatcctggtaaaataaattccaacaatattggggttccattgaggccaaccaaatgaataagagaggattgtgatgtcatccttaaatagattaaagctcgtttgctaacttgggcaattcgaaacctttcttttgcggggaggactcaactgattcaatccgttctcttggggctaaggaattattggatgagcattttcatccttcctcaaagtattattaaggaggttgagaagttgtgtaggggtttcttgtggggatttaaaggagatagaagtaagattcatcttgcctcttgggacactatttgtcttcctaaagcttatggtgggctcggctttaaggatggatctaattagaataaagccattctagaaaaattcatttgagctattatggaaaaacatgatattctttgggtgaaatgggtgaatacaatttatcttaagggagaagatttttgggactatgagctcaagatggatactagttggtattg

SEQ ID NO: 103323 - DNA, 787 bp, Cannabis sativa
ttttaaaggattttttggacatgagtcctgttgttgcacccttgagccggtcatgtccacaattaaatatcaagctattagtgtaagaaaatctttaaggggcgtttgatatgagatttaggcttgataggaataataatgtcaaactaaattaaatttaatgacaaaagagtttgtgtttccaagtgaatcatattttttaaattaaaaaatgatggtaatgttaatctcttccaacactagagtttcatattccctctaagtgtattgctctaactttactctctccaactcaaactcatatagcgtttggttggaaggaatgaaaacatagacagaatagaaatgacatttcaatactttaaaatgaaaccaaacaaaaaaataaaataaaaattgtttcatttccattccatatcattacatccaacaaagccatattccatgtgataattgattacaattttcttttattgaatcacaagcaggcagagatcttgcagccagccattgatgggaccttgaatgtgttacgttcatgtaagaagaatccatccatgaggcgagtggttctcacttcatcatcttcaaccatgagagcaagagatgattttgatcccaacatacctttagatgagttatcatggagctcgatagagctttgcgagagactccaggtaataaaacatgaacgatatatttaggaatgttagttttatccaaaaacccttctatcctacctgtacgggtagaatattacttgttgggtagggtaagggtatgaaaa

SEQ ID NO: 103324 - DNA, 531 bp, Cannabis sativa
gttatggccataaatatgaggtacgtgagggagctacgcagctgtcaccacccttattcaacacccgatactacctgcatggaagaaataaggagaggtgagcaacttgacaaacttacaaacatattcaagtcaacagtacccaagggtaccttctaggtaaaacacaatgtacaaggtcgatcaacgaccaattactgtcttaagtacacttactaagagacatagtgggtcttaagttgtataattcactataatggcctcacaacctagtctgatatagattttcaaagaataccacgaataaggccacaattgtatatgcctccaaggccatcaccagaccttagccgaggtcaaaagagggaaaaaaaacttattggccacttggagtcttgaccttggtttgctagggttctaggccttagtggccggccaaaccccaagacccagtctagtggtcagccagaaaccctaattcctatcttacgccgaccatcctaggggtacaacccctttatccggcaagac

SEQ ID NO: 103325 - DNA, 680 bp, Cannabis sativa
gcataaaacccaacagttataacatgggttatatgctaagtgttccaataactaatttccctcgtggatacttctttacatacatcgaggtagatgccttgctatgcactatttatagctcccttggtattatgccttccgaggcaagatggtttctcgtcattacatgaattgatagtttgtatatccttgtctcgcttaagactatacaaccagcgagttatgaacatactctatttattctaaatttaatgagttattccattttccatttaatgatataattatcattatatttgttgattcatattccctaagattgacacgtgtcactttctaaagtacatccgaatttcaggtataacaagtttttttgacatgatcaatcatatagaataaattatcaaatgatttgactaaattttgttaaaaaactagaagatttttttcattgttaatttataagacttaaaagaagaatgtaaaagtatactttaatatttttttaacttgaaaaataatatatctataatttcatttagtttatcctttcatacttgtttataagataaaattatatttttattgataattttttgatatataatttatttaaatatatatgtatatatatgaatttatttatttgtctagaaaatatatatattaaattattttga

SEQ ID NO: 103326 - DNA, 682 bp, Cannabis sativa
aaaagaagaaaaaaaattgtatgtataaataaatatttaattatatgtagaaaaaaaaattatatataagaatagaatatatatttgatctattaagctttgatatataattgtattatatgtatttgacttttaaattaatattttctatacattaaaatattatgtgtatatataatttttttttattttttctataaatatgtgtggattggattgaatcggaaactttcacatgtcaatcaacatccaatccgcataagtgcagattttgaatttttcaatccaatccaatccacacaagtgcggatatccgcactttgcgaattagattggatcggctattttatgaacaccttagtagggatttaactaggggtgtgcacaaattaattcaatctaatgataaccgactgatccaattacaaccgaccgctaaacattagatatctaattggatcggattagatgtttgatgggatgtccaaaaatctaatacatccaacatccaatcgaactaatttgtattttcatttagtttgtacaagtaattagattttgtggttatacatatagtatatatgtatatattaaaattaacattaaaattttactcttttttcggattagatggatccaatctaaatccaatacacttgatctaaaatattagatagattcg

SEQ ID NO: 103327 - DNA, 748 bp, Cannabis sativa
aagaggatccaatccaattgcagataaacgagttggaggacaagttcaagacatatcaagtgggggaattagggaaattatctggatacgactctaacgaggagcttgagttgtttcatccagacataatgaataacccttttactttgagattcaaaaacccgcatgtctcgtcatatgacagaaccacatatatccatttgaataactttaacacaaaatgcgagcgagtaatgtggagcgagtaatgtgacaagcgagtaatgtgacaaaaaatttacgatgtatttaatttacgatgtattttattccccaccttgcttgttggagcagcaagtagctactttaacaagtttactcatcattcgataattttctaggagcagctgcctagggatttcaagaaacagttctaggctgctagggatagacgacccgaagcggcctcactaaccaatataaagaagcagcccgacgagacacttaaggcgtacttaagtcgttttagcacggttgcagctagggttaggaattcgaatgatagcacgcaacttacagcccttcaggcgaggatctatattgatccattaaccgtaggggcgagttgtgggatgacttataaagttgtccggtgagaagcatcactgagttcaacgaaagggctgaggtgttcgttcaaaaggaagaagctcgaaaggaaatgaatctgctgaaaacaagctcaggaagcaaccccagaaatgtttca

SEQ ID NO: 103328 - DNA, 563 bp, Cannabis sativa
tttcttacagctctttaatataatcatattctaatagttgccgaaaatctcggtcaacagtaatattattacttttttttagttaaaactgaaaaaaaagtcctttatgataatgaaaaagaactaattaattgcttttctttatagcgttttttttaatcaattaatatttagagtacctaacaacctgtttgtcaattaatatattttcaagagttttatttctaccctcaaaataataaataaatttcaatattaaaaaaattaaattaattttaaaaaaggacttttttcaattttaactaaaaaaaaaataacaatattacaaaaatacttttagctggccaaataaacaagtatacaactccaataaaaaaaattacacaaataccacttacacacaccttcaactcaggatccatgcttcctgggcaactatcgtgcaaccatcgtgcaactacgcagcaacctaaagcaactgaaacgaaaattcaatgagaaagagaaccaccattaatttcggcgacttcacctgagaagacgaccataatcaatcaaaatag

SEQ ID NO: 103329 - DNA, 541 bp, Cannabis sativa
gcttctaaagtgactttacacacctatatatatatatatatatatagctaggtttcccagattattatctgccattttcttactcctgtggataagccttatcaacacgtatacgtaactatatatgtaaataaaatacgtatatgtcaaaaattattatgattgatttttatttatcagaatctttgtgtaaaatttatatattcatgtagtgaacttattaaaaaaagagaaatgttaaaaagcattagtagtgtctagctaacaccctactatatatgtcaatattactattaatttaattaagtatcgaatttcatatagtttaatgtaataatttttaaagactatgctaactaattgcaaaataacacgttttagatgatgttaaacaccactaatacttaatagggatgcttttaaaaaaatagtgattaaaaataatcgctacatactataatgataccctatgaatatttatatatatatatatataatatgtaccacaggtgatggcaatggtacatggtcgatcgatcag

SEQ ID NO: 103330 - DNA, 539 bp, Cannabis sativa
caaacaatcaatcaacagataagcaaatcaaagttactataccatgaatcgagcttgtcttcacaacaaatgtaaatatccatatctagtctttaagacctttaaaatcgtagctgctctgataccatgctgtaacgtcttaaccaagggacaccacgtgtttgtttttataaattaatttataataataaactaacgatttaaagaaaataatgatttaattgaaacttagcaaatatttaaaatataaaattaattttgttactataaaataattaaagttggggatcaccttttaaaattttacaaaaggtaccattacaattttacaataaaatacttatacttataattgaaacttagaaaatatttaaaatataaaattgattttggcactataaaataattagggttggggtcaccttttaaaattttacaaaaggtaccattacaattttacaataaaataattatacttataattaaaacttagcaaatatttgaaatataaaattaattttggcactataaaataatta

SEQ ID NO: 103331 - DNA, 535 bp, Cannabis sativa
ctgctcgtccaggttattcccaatttatacacactttgtgggatttcctgggtcgagaataacttcttccatttcttcaattggttttaataggtttctttcatcttgaactcgggatcaagatcttcatccttcctttcacttccttctgccaagatcgccattaattggggaccggctttcctatgctggaactttatgcgatagcaatcgtgagccagcatctggtcaccccacaccactcccacaccttttggtgtttggaacttcaggataggtgcttgatcgaactaatttcccctagtccaatcaatgctagatgacccaacaatatgttgtaagccgatggcaagttgacaactaagaagtcttgcataactgtggcggatatgggtgcctcacccaaggttaatgcgagcttgattatgcccagactggcaatgttgtgtccagtgaagccgcaaaaatttagcatacaaggcctcaatttggccttttcgagccacatcttcctcagcgtttccttataaaggat

SEQ ID NO: 103332 - DNA, 592 bp, Cannabis sativa
  modified_base (149)..(164): a, c, t, g, unknown or other
  modified_base (293)..(295): a, c, t, g, unknown or other
aacacatcaccagcacttcctgcaagtatatatattacgtattaggctaattaggaattttactctgaaattaattcgacatgtactaaagtatgccctttaacttttaacgtcgttaaaaatacctcttaaactattgagattgttgnnnnnnnnnnnnnnnntctaattttagtaaaaaaaatctaacttgaatgaaaattcaaggaacatgatttagtatatatcaaagttcgaagggcataatttggtagatattaaaatttagtaagcatgatttagtacataaacannnactgaaatagtacaattgaatgaaattaattaagtaaaagttcttaaatctatccatcttaatagttcaggaagaatttttaactgccaaaaaaatttatgggacatgatttggtacatgttaaaatttagagggtaaaactccattattctttcatgcattttgtacttcataataaattacaatactttaattatttgattcgatttgaagaataagtagtaatatgtacgtacctgaaattctctcggtacgaagaccctgatcagcattattatcggcagagatggtccaaac

SEQ ID NO: 103333 - DNA, 616 bp, Cannabis sativa
ccctagatgtcacctcttcttcttctggatccttggggtcatctgggtgttgtgggcgcgaggtgtttctagtttttaccattattttactaggctacttatgacttcttacaactcttaatgaaagtactaaaatatttaccgaagttttcagcaactagtaactagaacagtgtgaagtacttaatgaatgttagaagagatgatttttttttttgtggttggggtattaatgagccttagtccatgagtcactatattatatgagagtatttattacagagaattttccaaccctctcccagttctgtttatcattggggtatttataggcttatgatggtggtaaaaaggtcactattgtcgtgtttgtttacaccatgctttgacacaaatttccaaccctggcttacgacataattgcctactttatgatgggttttaggttgtctataggagtttagtgggatgtgatttatcctttatttgtgacttgatggcttattcatgcagtcgtcgattaatgtacgagggttcgtgaaattaggggataatgggcttaaacccttaaacacgtttgttagagtaaggcgtttgtcgttctttcccatgccgc

SEQ ID NO: 103334 - DNA, 548 bp, Cannabis sativa
aagccgctgatgctcccttgctcagacaagcatgcgtacctgccagactgcaactcgcccacggaaaccctacaaatgccgagatttcttggcgcaggaccctacagcatgctccttccgggcgcgcccaaggctgcgtgcaaccttcctgggctgcacgtgcaaccaaccccaaaaaccctatttttgtgggatttttccaaatttccgaattttctcaattttcaaaccttaaaattaaaataatatattatttttaatgtatttaaacttaaatatcaattttaaattaataatatttattttttaatagattattaataatctttgatattttgaggtttaaatttaaaaaattgattattttatattttaaattattgtcagctttaaaatttgttaatttatttaatatttatatattatataattagaagatgagatattttaatattgggtatattttaaattaaagataactttatctttttaatttgaaatattatattaaaattatcttatatgctaaattaaataattaataaatt

SEQ ID NO: 103335 - DNA, 670 bp, Cannabis sativa
ggcgagtttgatgtctttgttgtctatttgtggtacggcttatcagagaaggcttctgagaactcaagggtaggtttttgttttttgtttttgatttggggtttttgaatttgaaacaagatcttgggggtttggggtatttgaatttgaatttgattgttttagatgggaagggttgttgaagacttttcattttgttgattgttagataaatttatgaccttggagagaaaattagagattttttttatttgggtttttaaatttgaatcaagatcttttggggttttggagattttagcaaagtgaatttgaattcgttcttgattggttttgaaatttgaatgtggttaaacttgaagatttttcattttgttgattatcagttgaatttatgagtttagaacctttatttagaactagaaatgtaaccttagaaagaaaattagagattttgtattgatttgattcaaggtcaacctttactattcttattttataaagaatctgtcattagtgcattgctctctactggtaattggttattgaatcaagcttatgtgattctgtaatttaattgcggactttgagttttctatttgtgaatttgtttatatttataaaagtactgtttttcaggatggcaaagacgattgttgatgccgttttg

SEQ ID NO: 103336 - DNA, 975 bp, Cannabis sativa
cttggttaaagtgaacaaaagatcagaatcccaaaccacctttggatttgcatagggatttccatctcttccaatgaattttggtgccattttgattatttccccacaaaaagttagccatcatactctccaattgattacgaaatttctttgtaagcctgaagcaactcattgcgtatgttgggatggattgtactatagctttcaaaagcacttccttccccctactaatttttttttctcattttaggaatgtagaagtttccagactttttccttgatgttgctaaaaggctcctgcttgtcacatccagagtaagagcgtaaccctaagtaccactcatgacactcagtaataggcatttgtagtgtttgagcaaaaaaaaatttgggctgccagtgaggtatttggtgagaaagacattacagatttttcattatttaggacttgccccgatgccttatgatatatgtcaagagattttttgatcgatattacagattgctcattagattgacaaaacaataagctatcgtcggcaaagagcaagtgtgacacggaaggagagttgcgtgtcaatcgaagtcctttcaacataccagcctattcttccgattgcaataatcttgagagtccctctaaacaaatgaggaataagtacagggatagaggatcaccctgacgtaagccccgatatggttgcacatgaccaaccacctcaccattaagagaaaataagaaagagatagtggttatacacctcataatcagtgacgtccatgtataatcaaaacccatcttaagcatgattgcctctagatactgccattcaaccatgtcaaatgctttactcatgtccaacttgagagtcgagtacccaattctaccctgtgtcttgtgccgaagatgatgaacgagttcaaaggcaattaagatgttgtctgtgattaatctatttgagaggaatgctgatt

SEQ ID NO: 103337 - DNA, 659 bp, Cannabis sativa
gagtgtcttggagccatgaagtttgggcaagattgaacattccaaagcatagtgttattctatggttggcaatgttgaataggctaaagacaaaggaaaggctaatgaaatttagaatacaagtggaggaatgttgtaagttgtgtaacatataaaaggagaagatacaacacttatttttcaagtgctcttttgctgtccaatgcttacaagcagccaagagttggctgggttggagaacctcagcttcagacataccacagattataaggtggataggtcgaacaaaggtgagcaggtttcggaagaatgcacttgctgcagttgttgcaggtttagtgtacaacatttgggaggctcggaacaagattatttggcaagaggagcagccgggatgcggcacgttgatagagaacctaaaatggagactcaaaagccgaatcatcatatttttgcccaagaaattgagttgttaagatagagagtggttttatgatttgtaatgatataaatacaaagtatgtatagatttaaacttaaggcttctatttgaggagtgctcctaggttgtaaatttatttgtgcaatataattctctgattcataaaaaaaaattataaaatttacaataaaattttatttttttacaaaaattaaac

SEQ ID NO: 103338 - DNA, 547 bp, Cannabis sativa
acatgagcaatctctcaatattttctagctgccctaaatgagatttctgtcaatctatttaaaggcattggtctacaaaagacttaaaccacctaggattacaaccaaaataggaaacagaccaagtgtttattgtctaactaatttaataggttatttattccttctgtgataaacctgacaagccctaggcctatcagtttatttgatagaaagaagggtattatatgcagtacttaaaaaggctgcgatatccttgtatacttataactttgtctgatgaagttagttaaagacaaattttatattcacaaattggtgtctttaaataacaggggtagaaaactagaaatgatcatggaatgactcttgtagagttttgtccctcaacttttttttatggagcctctgaaactatttacaaatctacccttgcaaaccgacttcattctgttcatttttctgaactatttgctgatgtagtactaatgtgatgctggtctagcgcaatttaagagtccgtacaaaaaatacatgcataaataac

SEQ ID NO: 103339 - DNA, 842 bp, Cannabis sativa
  modified_base (666)..(667): a, c, t, g, unknown or other
atttatagtcttttgtttagttttccatattttaattattgtttattttttattctcattttttttttttttgcattgatatatatattcttgacacattttattaaaatacaattgtaagattttttatatttttaattacagtagtagatattggcatattaattatatatgggatatcgatggctaaactacctgactttaaattttttaacacttaactacaaaaattaatttttggggggcaaaattacctaaactcccattttattttactctgtacccctccgttcaaaaatcacagttaagtgtcacagtggattgtccacgtgtacacacttatacacatgacaaatttttagtggcccacgtaatattaattttgaaaaatagttataaatatttaaaaaattaaaaaaaaaaaacaaaaaatagaataattttaaaaatattttctttttgggatattggcagctaaaccacacgaattttaaatttttaaacacttaaccacaaaaattgatttttttgggggcaaaactacctctcccattccatttttaacactttttctttttcttctcttttattcttcttcttaactgaagaaaccctagcacccagtcgcctaccccacgactcaaccttctccgactcccctctcanncactctctctcacggtgcacaacgtcgaccttctccgaccaccccatgtcagacgggccacagagctgaactccacgacccaaaaaatcccaatcctgatctgccctcttctctctctccttcgatgtttctccaatcccccctctattttttttcgttcagtccgaccccctcc

SEQ ID NO: 103340 - DNA, 519 bp, Cannabis sativa
tataaatatgatttattttgtttggtattttgcaggggaactgtcactcgttttaggctactatatgctaacccatgtaatccttcatactggcccaagtggttgttattaattttgtttttttaaaaaaatgtcaataaagttatgggctgaattttagttgggcttttagaaacttcttctgtgaaaacaaaacagtaaagtaaatacccttgaaagctagagcgtcttatttttcacttttatctttatttttttatccgtcaaatagatgaccggtagttggaggggaaagtgtaataccactactgctagtgtcatttattaaatccatgtcaaattttttttaaaaaaattaattacttttcttataattgttttcagccattggatataattgtaccacactcaatcgttatgatcaaaggagagtaacatgttactctccttaataagcgtgaatcgtttctctaatatttaattagtttctattttattatatacaatggtggcatataa

SEQ ID NO: 103341 - DNA, 994 bp, Cannabis sativa
ggagctattgtggataaattgaataagaacctaaactgttgggcaagcaggaatctttcttttgtagggcgagctcaattaatccactcggtgttgctagggataaggaactattggatgattatattcatcctcccgtccaagatcacagctgtaattgataagagttgtcgagatttcttatggggagtttcagggaacagaagtaagcttcaccgggtttcttgggacaaggtttgtcttcccaaaaacctgggaggtgttgggtttcgggaagggaaaaaatggaacatggctcttttggctaagtagctatgggcctttgctagcaaggcggactccctttgggtcaaatggataaactccatttacttgaaaaacaatgacatatggaattgcccgaaaaaggttgacacaagttggtacttcaagaaaatattgagtataagggacaacattaatgttatgattctcaatctagctgtgagggggaataagttcagtgccaaacattgttacaatctgctagtggagggaatcaagactgattattcaagggccatttgggacaaacttgtagtgccaaagcaccgttttatttattggcagatagcgaataaccacttgctcactcgggacttccttcaaaatattatgactattcctagccaactatgtcctgtgtgtgaaaatgatatagaaacccatgatcatgtcttttttaattgcagtttctcgacacaggtagcagctgatgttaactcttggcttggtgactttcaatggccaacctcaactgctgaactgctccagacctgctgcaacatggaacaggggctgggtcctcgtttatggaacacagtcttggctgcctctttgtactgcatatggaaaaatataaattcttgtatctttgatcttagttgtgctattcctagtaggttgagcatggagataaggaagatagttcaactaagaatcattagcaaaggtc

SEQ ID NO: 103342 - DNA, 604 bp, Cannabis sativa
ctacaataatattgtttataaaagtatcacttcacctttaacaactaagatcatatctaatgattacactaatttagtgtggaatctacactaatttagtgtaaaaatttttattttttggtacaacaacttcaataattttcacatcaaatatcatattaaatactctactaattaaatatattttacttaaatgatctcatattttatattttttacattaaaaccaaaaatagctagtttaacaaaataattagtaagaattatatcattgctactaataagaatttaaaatcttgaaataatttagtaaataaatatttattaaattaattaaacactaaatgttttttttaaaaaattttattgaagttttatagctgatcctaatatatacaaccatttttaaaacgatccaaaaatgattatacaaaaaagagattaccaataatatcaaacatatcaagaataccatcattctcaaaatatttaaagttcatatagtcaagattcacaagtgatcaatttaactattaaattattattttatttaatgttattatttttagttttataatttagtgttatgttgtttttattttat

SEQ ID NO: 103343 - DNA, 638 bp, Cannabis sativa
aaacacatttttaaaaaacacaatttttgaatcacaaaccaatttttgtttccaaaacacattaaagtatctgttgtatcttatatttcaaagaaagtgttgtaagtgctttaaacatattttaatcatttatttatttctctttgttcaaatatatattagattatttgttctttttggtttttgttatttgtgttgtattatttaataaataaaaatgtttaaaaatataatattttaatagaaaagaaaaatatagaaaagccatcgtaaaattcaaagtatttataggcaatacaattcaagaaagctaatcacacaagttacaaaattagttgcaacaaataatagaattagctaaagaagtaactaattcctaactgtgtttatgaagctgtgaatgtgtattgtcagttattgaatggtgaaaggtaaaaatttaatgtaaaataaaaaaaaataaagttttaataaaatattttaaaaaatagtgtagaaaaactgttgggagtgatataggaaaagaaaaacatgttgataatataagagtaatttgcggcataaatacttaagtttaattctcagttgcaaataagtacttaagtttaattttttgcggtaataatacttaagttata

SEQ ID NO: 103344 - DNA, 626 bp, Cannabis sativa
ttaatatgaatgaagctcttgaagttagtctctatcttggtctccctaacatcattggtcgaaataaaaagccatgctcggttttatcaagaataaagtgattgctcgtattaatagttgggatggaaaatttttgtctcgtgccgggaaggaaattctcctcaagactgttatccaatcactacctacctacggaatgagcgtgtttctcctaccacttggtacttgtaaagagatagaaaagcttatggctagcttttggtggaaatcaaattctaataaaggtcgcggtattatttggatgtcttgggatcgccttgcaatttcaaaggatgaaggtgggatgggatttagacacttacatgatttcaaccttgctatgcttgcaaaacaaggttggcgcctcttgtgtaatcccaactctcttgctgccaaagtttataaagcaaagtatttcccacataccgacttcctctcagccaagctcggtaataatccaagctttgtttggcgtagcatttgggggcacaagatgttgttcgtctaggtgctactcgggtcattggagatggcacaactacaaatattttgggtactccttggctgccgaatgtccacaacagatg

SEQ ID NO: 103345 - DNA, 569 bp, Cannabis sativa
tagatcatcatctacggtcaaaaacatctaattgtattttttttttcctatttttgtgggcctccttcacttataaaaagaaagttctcttagcttatttttcacattctgaaaactacctacaaggtcagagtatctctctataaactagagcttaaatacttaacattattctataattctcgtgaaaaataaaaactcaaagtaggcgtaacattattactatcgcaacataggaagtgaattattataatttttgtgtgtctctctaaattatttatttaaatttaataattatctcatcaatctagcaaatttatgttgactattttttaaggtcattaattttttttataagtaaaatttaaaacaatgataataccattctaaattacgccgaaagataagcaatggtcatcacatacatttcacaccacacacataaatagcaaaatttgattacaaaaagacaaaacataaagatgtcaacttttctaatgctcatttaattgttaattaattatacaaccttcttgtgataagtaactaccaattagtagtgactcatg

SEQ ID NO: 103346 - DNA, 632 bp, Cannabis sativa
tgttccttgaagttggccaccgctctactgttatcacaatggagaaccagtattttttctacttctgaaactacttccaaattagtgtagaatttcttcaaccaaatcgcttccttacttgctttgcaagctgatatatattcaacttccataaatgaatctgccatactagtttgcttaatgtttctccagactacaactccaccactaagagtgtatactgacccaaatgtagattttctactatctttgtcagatttaaaatctgaatcagtatatccaataggatttaactctcaactgaaatatacaaacatgcgatctctcgttctcctaagatacttgagaatgtattttacaactatccagtgttcaaaacttagagtagattggtaacgactaacaattcctacaacatagcatataccaggacctagacccagaccccgacctagaccccaaacccagaccccaaaacgggttcgagttcggggtccgggctcaggatccgtgatttgggttcggtctaaggttagatgggttcatgttatggtatggtgcaaaatattgatttttttttttttttttgtaaaaaaaacttaaaatagttttaaaaaacctgagccaaacac

SEQ ID NO: 103347 - DNA, 552 bp, Cannabis sativa
atagtgtcgtcagcacagtggaatataatgaagtaaagtagaggagatattttttttcttgtttccaaaagtgttctatcatcttattttgtatgaaatgatcccactgcgtttgttgtattgacactgaagaggacaataccatttagtgttcttagatagaaattcacactaccttgtcatagtgggagggttgttttaaggaactcaccctgttatgacttggagacaccgatgaccaaatctattgttagtttaaacaagtaatggattctcaaaataaggaactaagaagcaaagccaagagatctatggttaaaacaattcatatggtgtaaccaaaagttttctattacaatgataagaaaggaaattttgaaaataagtttattgaatgaacttaacaaaattcttgtttctagtattatagctttgaattatcaaaacctatggcttgtggtatgcctagtgatttaattactctagtgcgagcaacttgctttagtatgttgatggagtatttttctaattgtgatctatagaagcttctcg

SEQ ID NO: 103348 - DNA, 647 bp, Cannabis sativa
agtatatttattattttttttattagagctgaaagttgtaccaattgaaccaactaattttaagaaagatttgttgaatctttctgaatttgagtggtattgattgagtacttttgatgacgatttcataggaccaattagggttgttcataaagtatccaatctgatccaatccaatccaatccgcaaaatgcggatatctatacttgtatgtattggattggattggaaaatctaaaatccgcacttatgcggatatattggatgttgtttgactttaaaaaataaccgatccaatccaatccgcacttcattatatatatttttttgaaaaaattataatatatataatattgtattcatattaaaagaaaaaataacaaaactgaattttcttctaaacctaaaaaataatttacatttttttttacacaatccaatgccacaaatcatttctcctttcatcttcaatctcatagaattctttagcgttccacaattgccctcgtcaaccaaaatttattttttcaattgagtttgcaaatttctattcagcctgcatatatataaaaaagtttattgtcattgtgtaggatacttattaagttttactagttttatttgtttaggatcagttagtttaggtc

SEQ ID NO: 103349 - DNA, 546 bp, Cannabis sativa
gcaaaacatattttacatcaactttgaagtttgttgattgaattgcacaattttattaaatttttacatattaattaattatactaatattgatacattattttgtgacaatcattactaaagaaaaacagcgtgaacaatattaattaaaaattttgaagaaactattgttgcatctctagatgtggtcctgtggagatgcaatgaagaatactgttcatttttttattttgaatatggtttataaagctgatggaaatacaatacttaactattattttgaagatttagttagtttgaagacagtggtgggagtggtctaggctgttagtggtggctctatggaggtttgagtaaggtcaagtcaagattaacatttgtatacacatgtatttgtctcccgtagtgattatgacggtagtactagtagcgatattgtttcttatggttgagattccactcttcttcccttcatggatatttatgggagaactgtattggattaagaattatttatagtctacccatctatctatctatctatat

SEQ ID NO: 103350 - DNA, 610 bp, Cannabis sativa
cacaattttcatatagcctcattttaaaagttgaactacgacaattactcaaccacaaattactagcattaatttttagctatttttattttttctgctagttttatttatttacttgacaaaaaatttacagttatttcttcagtaacttttacttctacaatgatttatttttattcaaaaaaaaaagagattacataatgtatttcttattatatatgaacaattaactggaagcaggtggtaaaaataatttttataaatcagttttaatatttatatatattattgttaaaagaatttggacaacactattcgtgcgagtattcattgcaaataagaacacttaacttaaaaatgtgcgagtactcacttagagtcgtgagtattcaaactattggctactaaatagacgaaataaaagcaaaaaaagaaagagagcacaagagaattgtagtggttcagtcagaaattagtctccttagtcgacaattgtaaagattttcgcattgtttatttgatttggatcaagcctttatatagaaagcaagtgtcttttaaatttacataactgttaggctaaaattagtctaagtttcgggtcatattt

SEQ ID NO: 103351 - DNA, 797 bp, Cannabis sativa
tcttgatggttagagattattccaatgcgtcgaggaaatgaacggtgtcttgtattcagacttgagaaagaggtaactaaatttcccgcaattcctgaaatattgaatcacatagacttaatggtagaaagacaggttgaattttgtgctgtgcaatagtaatcagattagaagaaaaaatatacatatagggagctttttacatgggggcatcacttttgcccctaccgtagtagcgttttctgtttttggtatctagggaaattatattctaattttcttttatacgacaggtataggcatcatgtttgttttcaaaaaattctgaataatttacgacatcaaaaataaagtttaaaataattagttggacgcgtataaaataaaaaagacatgcatacaactgactatttgaattatattttttgcactataaattattcagaatttttccaaagtagacaagatacctactatgattataatgcatgctgttatttaaaaaaatcggtttacaattctctatatacctaaaaaatgtctctaccgtaggagcgaaagtgatgcttttgcctaagaattttcctataaactactttcctgcaattcatgtaatattggtcataaagactcaagatagaaaaggatgtgttactacacaaaatagagcctttggattgtgttggcaagagggagtttgcacatttttctactctcaatggtttttttagcaaatctgaactatatgcttgttaattatttttacaaacattctgtgatgtggctcttccagatta

SEQ ID NO: 103352 - DNA, 1130 bp, Cannabis sativa
  modified_base (427)..(428): a, c, t, g, unknown or other
  modified_base (512)..(512): a, c, t, g, unknown or other
ctcttagcagtgcacaagtccttgatgattttgacataagctgacacttgttttattacgtggagcaaaagaagattaatcttcacttgtgttaagtgcttcaggagttcaacttgattttcaagaattttcccaacgggtctaagagtttggggaaatggtactttgacttgagcattgagtgttgcactgtcaagggcaacttttggatttgaagtagtggttttgattgattgatcttccaaatttttaccacttcttgttgtgatgacgttaacccccttaacaatgggatcgttagaggtggaggtttcagccatgtgttgcccttatgcattatactgaggttgggaaggaagtctgcctttctcagaaatagtcaaggatgtagtcaattttgaaaattgactttttatttcttggacannttcctttaattggcgattgattttagcttattcctcaatgagtgcatgaatggtgctttcaagggagttcccttgttgttgagnattgtattgaggcgtaggatatgcttttggaggttgagcttaattctcatttctccattgtcctccagatgtttgagcttggttggagttatttcttcaattgaaattgggtggtttctccaactggggttgtacgtatgggagaactttttatattgccctaaggcattgcattgcccctcatgaacccccctcattttttgtaaactaagcaatctttcgttaaatgctcattttctccacaaacgaaacaaggttcgagtggtcttgtttgtgcttgggcaaccatgcatcttttttggccatctttagtcgtaaggatttcaatttgctttttttaaagcttcgacttgggcctttaagttgtcctcttcccgaagttggtaaattcccgttggtcgaattcggttggtgctttcagcaacacttggactagttcatgtgtgagatttttcaacaagctcaatgagaaactcaagagcttcttcgagttacttttgaagaaactcaccattgcacatcgtttctacgaattggcgctcacgacttgtgaggccttcgtagaagtagctggcaattccccaaccctcatagccatggtgtggacactgacttaag

SEQ ID NO: 103353 - DNA, 843 bp, Cannabis sativa
  modified_base (150)..(158): a, c, t, g, unknown or other
ataaagtcatttgtcaataatttgtccacctcttctttaagtgccccttgtcaatctttatcatgtctgaatggctccaggtgaattgatcctggttttccttcaagaaattaattaattgttaatttagtttttcatccaaatttttcnnnnnnnnnacacatttagtgggattgtctggatctaaaacaacttcttctagttcttcaattggtttaagctggttattctcatcttgaatttagggtctaaatcctcttctttcttctcgccttcttctgttatgaccaccattaattgatggttggttctactattttcaggttctacgcgataacattcgtgagccaacaacagtcgtcgcgtaccatacctactcctactagtgattggaattttaaagataggtttttgattaaactgactgtgtaaagacctcttaactttaatttagaaattagtagataattagggtgaattatgaaacttgcatgttagttatgaattatcagtttacggagatttatttgaattcagaacgcattttatatgtcatatatggaatttcataattttgcatgttttgtgtcccacaacattggaacgcgatgtttggctattagaatcacatctcagtatttttagtatagcggggcagtatagttagacattgggaatgtcaggaatagtcgagattttagaagtgactaaaatacccctaagtaattttatgattagatagttatgggaagggcaaaaaggtcattttccctaagttaatgttttgtcctttaatggacatttgaaggattagtatgctgaatactagattgttattagttt

SEQ ID NO: 103354 - DNA, 542 bp, Cannabis sativa
  modified_base (356)..(356): a, c, t, g, unknown or other
tttttttgattgattttccaaatcacatgtcatttaagtaagagaacaaaattagaatttctgaaatctgataatcgagtaaaaagttatgcacgttttagtctggaaaaatactaattttgccactattaacaatacgaaattccggttagaatccagaattacagttgtcattaattcggaattccagttcccacctgaaattctggttcacgaaattcaaaatgcgtgctaacggctataaacgactacttttcaccccaacactatataaagttggatgagcatatatgtcatacacctaacctatccaagtgagattaatgagcttctaagtttaaaatccaacaaacacntttcacacactttgagccaaaatttgtgtttattcatcttaagtgtgcttgcttatcactctatgtttctattgtattatcatacttcttaagtgattttgcttgtaattttaaatacattttcatattgtgattgaggtgaggttggaaccgatattgtaaacaactcggttatagtgagattgg

SEQ ID NO: 103355 - DNA, 732 bp, Cannabis sativa
ctagcattcattttacaattccctatcctaaaaatagtgggttagaggatccaaatggatgcatatataaattagttggagtttttagttttctttgaactctttagttcttagacttcgggaactcaaacattttcattttcaaaacttttatggttattctttagtgcctatggtaaactaaagcataagttaaacactttacatagttattactagtattcattatacaattccctgtcctaaaataatgggttagaggatccaaatggatgcatatataaattagtcggagtttttagttttctttgaactctttagttcttagagttcgggaactccaacagttttctttaatttgtcagcttttaaggctaaaatggctactttcttgaagtggtatcacaattaaacctacctcccccaatcccaagtatgtaaactaactctttttcgattttcactactgaagtctagaagtagctatcctactttgtgtttgccatattcagacaagcttcagtggaatactacagtatccttgtctatctgtttcattgtgtctatgactatcgaaataatacgagagttacctccttgaacacacagtccttttaggactaatattcatgtaactgaggtattagtgtttggtgctaatatctttaatttgtaaattcacttttctctgaacctttttctagggcttgctatggtgtacttagatttgtg

SEQ ID NO: 103356 - DNA, 514 bp, Cannabis sativa
taccggcggggataggacttttattataccccggcggaaaatcccgcctcgaaaaatgagggcgggaattttaccgcccatttatttgaaaacattattgccggattaatactggcgggtcccgccggtataaaattgggattctgaccgtttagattaataccggcagaacccaattaatactggcgggtcacgccggtattaaatatctataaatacccaaccccatttcagaaacccatttttgccatttcagaaaaactttccccctttcccgttttcaaacaggccccttctccggccttttttccccggcaccgccagtgcgccgcccgtccaccgccagtgcagcgcccgtaacctctagtgcaccggtaatgctcttcgtttttcttttttatcttttttacatattgttatttttttgcttaatatttaatttttttctccatctttaaagtttgagataaataatcggtggggaggagaattttgagtaaaacgccgggatcgg

SEQ ID NO: 103357 - DNA, 651 bp, Cannabis sativa
aaaaaaaaaaatatatatctaaaagagaaacaatgggcttcgattaaggtggaatcagactgtgttagtagactcggtctgggcatatgtgagttaggcttgtatttaagttccacctagttagtccaatagcctaaaataagtttgttcccttttaaaattgtatattactaaattgaagaactaaccttgtgtcttagtttagtccaagatgtgcattgttcaagcaccgtatggtttctccatatggtaatattgctcaggactgcaaaagttaatttctcagcttaataatgagtctttacatctcgttaaaggattattcacgaataaagtagctcatgcttttgtaaatacttttattttttagagaaaattatattgtatattcactttattttatttgttttaatttttatctctatttttatttttttaagatatacccacttttacaaatatgtcttcattagatcccttaagttaatgtaaattatatgttagatttaatagagagtgagaatatatttgagcaacctactaaaaaaatgagtatattttaataaaatataatataagattatttttgattaatagataaaaaaataaaattaacttattcttaatttcctattctttatgctgagtgtg

SEQ ID NO: 103358 - DNA, 715 bp, Cannabis sativa
gaataaaaataatcttatcatattttattaaggagaaaataatcatatcatatgagtttgagtattttttttattttgtcatatgaaatgcatgattcttctatggagtggaggcaattttaagtacaacactttcattcttgaaagaatgaaagtatattggcaagactatgatagttaagaatgatattgttaagttataaagcatttttttaagatgcctcttattgatttcttagtctttacttattttcatatcactttgtattataattagtgagtgattgtagactgtactttataattataatataatcataaaatcttaattaagtgtcatatgtgaatttcgtttttttttttctgtcaatttatttagtcgctttttatttaatattaaaattaattattcaaacaatatctatattttttatttaaagcatgtttatatatatttttttcaacggaatataaatccaaatattaaatttggtggctttaaaataatttataataattacatccaaatataaatttccacaatttactactaactgtcctttttttttttgttgcatatctatttatttatttttaaaaagttttttaatcattttttaatattaattatctttcaaaatttttaaatataaaatttttaatttaaagatttaaatcgatttcaaaaatagattaagaaaataaaaaaatatat

SEQ ID NO: 103359 - DNA, 1152 bp, Cannabis sativa
  modified_base (1040)..(1046): a, c, t, g, unknown or other
ttgtactattattgctatgtggcaccttaaggtgctcaatactataccgattcacatacacaataattggttagcaattttctaaacattttattatatactatttcctacttgttattggcacttaaagtattcaatgtcataccgatatatggtacccaataattagttagtgattttattctttttttgtcttttgtattttatttttcataaatgatctttgtactattttttttaaaataattttttgtactattattgctatgtgccaccttattaaactgctcaatactataccgattaacatacacaataattaattagcaattttctaaatctttttttatatactatttgatacttgttattggcacttaaggtgttcaatgtcataccgatgtggtacctaataattagttattaattttttttttatcttttgtgttttagtttttatgaatgatctttgtactattttttttaaataatttttgtactattattgttatgtgacaccctaaggtgttcaatactataccgattcacctacacaataattggttagtaattttctgaatcatattaaattaaaatttatggaatctaaaatgcactaataactagctagatgttaccttttgtagtacttgtttacaatttttttacaacaacttctctgatttttttttatttataattttttgtacaatttttttgttggtgaattattttagttattattaatagaatattattatttaacaatatatacctaacattatacaaatatatgagatttaataattaattaacaattttttatgttatcatatcacattatatgtccttgtttaatatataattttttttcaataatcatttaattatattgatgaaagtaaaatatatagttataacacaagttttgacagagattacgtgcctatagcactggcacgtcttccacaagcctagtatagtatatcactacaaaaaaacttatttttagtcgtaacaaaatttgtaactaaaagtannnnnnntgtgactaattataaatcatcatgcctatgttgtgactaaaaggtccgaggctaaaagtattagtcacaaaaaatataatttttgtgactaaaaggttcgtgacta

SEQ ID NO: 103360 - DNA, 670 bp, Cannabis sativa
ggtaagaataaccctggcgtccacctctgccttggttcccacggaaccgcttgctctgccccgagccaccagatgtaggggcaactttcctcttctgatcaatggtggaatcaccaccatccttaccataaacaggagtaggaagggtgggggttccaccaacactcggagtcacttggggctcctcaagaaattttactgcaccctcggctcgcagggctttctcaaccatttctgcatatgatgctgcttcgttggcagtgatcactagatcatgtttaatcttcacattcaaattggctaggtacttttctttcgtactgaaatttgttggcacaatacccacggcgagttcggccaaacgatcgaattttatggtaaactcagtgactgacatcccctcggtttgcactaactttttgaactctctacgcttagcactgcggatggcttcattataatacttggcgttgaataactcccagaattcttcccagtttataacagtgacatcccgggtgtgggacaccaattcccaccacactagagtgtcttcctagaacttaaaagtggcgcaggtcacccgatcattaccaaccacacccataaaattcaaaattcgctcaatcacagtgagccactgctaagccttcatcacatcaggacctcc

SEQ ID NO: 103361 - DNA, 601 bp, Cannabis sativa
acatgattataggtttaatatataagttttattaaattctgaacatatatagttattcaccattatcgtgatgtcatcacaaagaaaagtaattgtgattatatgctttaatttatttagtcccacaatttaccagtgcattagatttatatatacacgtgataatcaacgatgagatttacttacacatggataagtagaatttcttttccagtacattagtaaagtaaactagtatcggatatattggacatacatcacactagaccaatatttaaagtagaaataatatcgtaaacttaccgtaatatattttctaagtaaatgtcaaaagttgatcttagatcaaagatcttaatcctaacatggtgaggttctggcttaaatgtattgcatgtattttttgacttgtttgttacatttgaccagtaggattggcctaatacttatatcttaagaacacggtagtataattaagtaggagccctaattgtagatatggaatatataggttttataaatacttagaagtgaaacaatagtttctttagagctgggctaaatgaatttaaatggttgaggctgttggaaattattttac

SEQ ID NO: 103362 - DNA, 551 bp, Cannabis sativa
  modified_base (498)..(515): a, c, t, g, unknown or other
tgggcgtcccttcggttttcggttaataaatggtttgacaactcacgatggttgacggctgcactcgattatttttgatttcccatattcgcttttaaggaggaaccgaggcatctgaggttgttttgaaatgattaccccttttcgttgcttgcctataaataccagcaagcatttgtacacaactcattttcaccatccttctttgctaagtaagttcagagcgaaaagagagatttttgcctttatgtttgcggaagtgccttcatctaaattgctcgtttggtttgacattacctgaatccagacatctgattctagactaagttctcgatttcctttatgtttatttttgcatgtttactttttgaatgcaccttcgactttgttctagaagatatgtaggaaacactaagtttagaaactctgctattctcctttgtcatgggttcatgcgtccataatgtttgctttctgaactgcataatgcctgtcttnnnnnnnnnnnnnnnnnngcttcatgaaattttttgccctaattcgggaaaatt

SEQ ID NO: 103363 - DNA, 737 bp, Cannabis sativa
  modified_base (658)..(661): a, c, t, g, unknown or other
  modified_base (702)..(702): a, c, t, g, unknown or other
ttcttggctgagtcatggaaccctgaccgaccctttcaaggcttgagaaccttggccgagccttggtttcaagtgggtagccaattttctgtcctcctttgacttcggcaagaatctgcctatgtaggcatatgcaacctcagtctcatacgtggtttccttggaaactctgtatgagacttaatggtgagtctattatggatgaatgttcatcttatgactcatcaacatggcggcttggatcctgtagtaaggaactctgccttaactgtagcccagtacgtggcccgtataggagctttgtccagttcttttttggatatatggttctcgcaaggccttggcctcatgcatgtgaaccaatttcatatctagcctcaagggttttatgttgttattttgtcctgttttcgaacacaactattatttagccttaaagccatctatgatggacatatgatcgtcatgactatctttttatggccttgacaggtaagggttcaaatttactttgtcaagccaaagtatgcctgcacgacttagagccatgtttagtatcttattctaagagttaaaattattgggttttgtgccctaaataaaacccattccgatttactaattaataaacaatagaaatcgcttttatgttgcatgnnnnacatgatttgtttcatgattatacttaatgtataaattctnttaagtccagaacatatgtaaatatgtatatatat

SEQ ID NO: 103364 - DNA, 556 bp, Cannabis sativa
atgcattatcttcatagagaattattggtacttttttattagatgttaatccacatgttcctccagtatgttgtgtcattgatcttaaccaaacacattcttgacttgcctcgtgaattataagtatctcaatgtgatttgaagaagtagccaccagagtttgctttgttgaccgccaggttatagcagtgtcactacaagtgaacaaatagccagtttgagatctggctttatgtggatcagataaatatcctgcatctgtgtagccaataagttatgacgcacaattattaaaatagaacaatcatttatcaatagtacctctgaagataatgaagtatgtgcttaatccctttccaatgtctatatgttggagcataactaaatcttgctaacaaattgatagagaaagctttattaggtcttgtacagttagcaagatacatcaagattgcaagtcatgatgttaattaaaaaactgaagaactaaaccaatttttacttataaaatatggtaaaataattctatttcgtagagttatcaattaccgttaat

SEQ ID NO: 103365 - DNA, 714 bp, Cannabis sativa
  modified_base (410)..(414): a, c, t, g, unknown or other
  modified_base (441)..(447): a, c, t, g, unknown or other
aaactttgtaagtaaaaaagtaggtataagcgtgtatgagtaattttgtaataaattgtgtaaaatggatttttcatgtaaaaatttcaatatattatgtattgattttggtaggaaaaaaatggataattttgtacttattaataaaaaatatatttatattattatttcattaaaatgttccacttttgtgagtgggttgtccaatcactgtaaagaaaaatgtcacttttgccagcgcacattatctataaaagtatgtatatcataaagaatataaaaataaaaataaaaatttaatgacttcagcaattaaggattgccacatggcaatttacttaacacttaacagtcaggtacttatagaagttctagaattataacttaaatattattaccgctaaaaattnnnnntaagtatttatttgcaactgagagttnnnnnnnagtatttataccgcaaattactatatttcataataattattgaattaaattatgtgaaaatccaaatataatattggaaattcatattattacatacacattattaagaattgctaaaatgtattattggtgtcttgtatcttccttagtgtaataccgatattggtttaattaagtatcgagtctcatatataacttaataaaataactttcaaaaaatatcactaactaattgtgaggtcccagaagatgttaggcaccactaga

SEQ ID NO: 103366 - DNA, 501 bp, Cannabis sativa
ataatttacattaacctaaggggtctaatggagacatcatctataaaagtgggtacatcttaaaggatataaaaatagaggtaaaaattaaaacaagtaaaataatatgggtatttaatgtagtttcttcatgtttttattgctgtaaattatttagaattttttaaaaatgtatagagatactattgtaagtgtaatgaacattgataataaaaaaaaataagaaaaaaatattttgacatgtatttttgaatgcgagattaaaaaaatattgtaataggaaattataattaacattcttttattaatatatacaattttttatttttgaaatttgtagagagtttttgcatattttataaaaattttcgatataaatattagtatattattttaaattaaaataatataatttattattatttgaaattttcacggtaattattttttttttataaaagcaaaattaagtttctaattaaatttgacaaattttatata

SEQ ID NO: 103367 - DNA, 542 bp, Cannabis sativa
aaaatcttacaaatatactatgggccggcataatcaacatttatatagcccaaccaaaataataaaaaaaaatgcctcttattctaattttaaagtcgcacattccacgcaccagagaaccagagtcaatctatgatagaaggaggacttcaactatgaatcaacgtcggtaaactaaaaaacaccattaatttcagcaaattcactgagaagaataaaaatatcaaactaaaagtcaaccattaccgattgatggaagtttctacataaaaattagtttaaaatataaactcacccaagaaaatctttgaaattctataaaactaatcctcccaaattcaatttatagattaataagatgtagacctgtaaaaaatagatcccgagttcccgatcaatcaaaatctagtataatctaatttttttaattgttgcattaacattattttttgaaattttaatcttagatttattcaattctaattgcgaaaaaataactaaatttgcattcatctcgcatcttgaatctggagccgtcattt

SEQ ID NO: 103368 - DNA, 746 bp, Cannabis sativa
gagtgagagggctataaggcaaataagaccttagtctatgcagactagactctactaggagccattttttactctattgcagctttagttatttgtgaaaaacaaaaacaaaaaattgtctgtctataatgagttttactacccagatttattttatttggtggaggatattacagaaaatatgaaatgttttttgtgttatacaaaaatgtggccctttgtttcattataaaattttaatggtatcttttaattttcaacatttttataggatttttttctcatatatttgaaatgtttaatttccataacatatgtaaaaaaaaatttctagcaaattttctaaatatttgtttacccgaaaagtgatcttggtaacatagacatcaatgtttgacacttggcaagaaagaaaatattttggagttgagtagtttcgagtcatgacagtctatacttgggaggggtccctagtcctatgcctaggttgactccgagaactcaagaatagttgtttggatcctacttagttattttcaactcactacctttcaatattttacaccatgaagacatgaagaatccaaatccaaggtctggaagctgaaaacacacaaaacaacaactcggtagtcaactcaggtgcccaatgcccaagttgacaaacctactatggttttagttttcggacctatcttagtgcaaatgagcccaactttgttctgggataagaattagacctgtca

SEQ ID NO: 103369 - DNA, 932 bp, Cannabis sativa
tttaaatttttaaaccgttctcattgtacctcacatatattttagatattttaacttattcaaaattttatttttttataatcatttaatcaaagagatatcttaaaaaaaattaagaaaaaaaagttatgaaaaaattatataaactactctaccaataaacaaacactatatttggttaatacacactcaaattttttatatatatatatatgaattttttatgtagtaaactacgattaaaaaaattaagaaactaataaataaaaataattaaaaatattaaatcaacaattttttttatgttgttatattagcctcgtgatattatagaagcagaaaattaataaaaaattaataaattttatatatctaataaaaaatgagaaaattaaggagagttcaaatatatacatttagagtaattattctaatatttttttttcttagataaattatcatacaatttcttatcttaaaatgaaagtaaaaaaagagatattttcaaaggttataattaaaaaaaataaaataaagaatcttcatataaaataaaagtctaaaaagataattgataaatctataaaaaaaaaactcattatatgatttcaaaatcattatcaccgtgtctatttgttgttgccactatattcaaggttgttgtcattactatatctcacttgagttgccacctcattgaaaactgatatcatccccacatcttacttgtagtcgtcatatcattgtcattagttaggtttgctctcaacataaaataaaccaaataatgaattaactactatagaagaaaaacattatgttactgccttatatttcggtcattatgagttaactaatatgcaatgagttaaaggaaaaaataaataaagatatttaaagtaattttaaaagaaaaaattaattaccaatat

SEQ ID NO: 103370 - DNA, 503 bp, Cannabis sativa
taaacatatgatttgaacctataacattttataatatgtcaataatccaagactaaaatataaatatttgttatttataatacacttaattttacttaaataaaaatttaattatttttttttatttcggcctttaaaaaatgtagacgttaggcacggacctagcccgtctatacctagggccaatcctgactacagtattcattgacatgcatatgaaaaattagaattatataattattcatgtgcataaaacacgagatatataggattcgtttcgtacattatgctatattatattgtattgtataatattatattgaattatattttatatctacgtggtagattgacttttacagatactcttaaaattaaaatttaagataatataatatataattaactataattaatacgattttatacgacatactaaacgtgctcatagtcccttattaactgtggattggccgattttttttttcaataattagtacctt

SEQ ID NO: 103371 - DNA, 699 bp, Cannabis sativa
taggatcataatcccacttattacctgattaattcataatatcaatataaaccctaattatttaccatttaacttatcgggatattacacagacatagatcctcaattttgggatcctgcaaacaactttggacttttagaagaattcgaggaattttaaattgattgaagattgggaaatgtttagtgccagaaataaaatcactcttgataaaatttgtaagagcaaactttgaactcttgacatggtcgcatggaaacatggtgggaatagatccttccatgatgacccatgcactaaacattgatccaaacttatgacctatgaaacagataaggaggttgtttggtaaagagcgcgcccaagctctaatagatgaactcgaaaggctaagcaccaatgacttcatcaccaaagaatccgctttgggtatccaaccccgtactggtacccaaaccaaacaacaagtggatggtgtgcatagatttcacaaacttaaaagaagcatgtccaaaggactactttctgcttccaaggattgaccaactagtagatgctacaactagccatgagatcctaagcttcatggatgcttatttaggttacaaccaaatcatgatgcacccaccaaattaagagcacataagcttcatgaaaaatctaggcctatactactataatgtaacaccctaactagc

SEQ ID NO: 103372 - DNA, 531 bp, Cannabis sativa
aaagggattaaatctattgaattcaagtgtccttttagttaccttttctaggcttagtcgagccatttaacaaggtatgatctttaaacaagaatttagttctcaaatccttatgtattgatttccaactagtcaccactttacaactcataacaaaaccattgttatagtggtagacttagctgggtaagcccggtggtgcagatcgagcctagccaacaaccacaatagcttctaggtgtaataggagctccagttgctccaaccgttctagtggacaggctttaattcaccttactttgaccatcaagaaaatctcccaattaatatgggattcaagcctaaaactttcacatttaatcgtatcttggaagtcgtgatataaccatatcaactctccaaataaggattaagaactaccaatgactatagattagaaatttagaggtatatgttatcaaacttgtctcgtgtatagaaatacaggttcatcaaagagtctcattcctttatctttaattgtccacatat

SEQ ID NO: 103373 - DNA, 510 bp, Cannabis sativa
ttatttatttgaattttaaaaaattagtaggagttctaattataacttcttattataatttttttacgttttaaaattaaatgtcggaatattttttttttcaatttttacaatatcatcccagtaaattttttaaacaaatcttaattgtttaaaaaactttaaacctatttttggcaatgtaaactattcgaaattttttaaagatttacatgaatgatgttgtaactataataaacacatctatgaaaaataatattatataaaatattttggcatgtattttcgggcacagtagttaactaaaaggttgtaataggaggttaacagtactcttagtaaaagtgtactatataattaaaataaagaataattagcaagtttgctccttgaatttttgacactatctgatcttacccctaaaatatatgactggttaacaattctcctttaacttttacatttatagaaagtgaaaattacatgaaatatgggatttcataacaaagt

SEQ ID NO: 103374 - DNA, 647 bp, Cannabis sativa
  modified_base (438)..(445): a, c, t, g, unknown or other
aagaagaggaggatttcatcgcactgaaggagttggtttcgttcatttttctatttacgttttaaacataatatatgtataaaaaaataacacataaattttatatatataataataaaaaatcataataatacatatatcaataataatattaatattataaataaaaaatttattaataataattattttatcatttcttaaccactaagaaatctttaaccctagggtatttggtcaaccttgagtaccccaatatactctgacatttttaatattaacttatctcaataatctcatcaatattgctaactaaaatcgttgtgatatttttagcctctaatcgagtctcctgggtcgccgaacctaaaaatatttttgtttcacaaataatttacattatatccacataacctaaataaatctctgtaattaatnnnnnnnncttatttatccacttatagccaaatttataatttatgctaaattaggttagcaagatcgtaatcctacgcattactacctaattaattcataatatataataaatcataattattcataattaagttttcaggatattacatcctgttgtagcctgtcatgtgtctaaaggagctcgctgctccccatcacccatcacacgc

SEQ ID NO: 103375 - DNA, 670 bp, Cannabis sativa
aacataattaattttttaaaatattacaatttaattagtatagatttcaatacatcttctccttacacgttctcgtaaattgacaaacttactattaatttacttatgagaaatagttggaaggtgctgctaaatttttcacaaaaataaaacaatcttaagagcataaattgcactgtatgtatattacaaacctcaatgggataggttatttacccttttagtaatggagtgaaaatggggattaggacacttccacatttttgttgtattttgaattatttgttcattactttatagaagaagatgttgaccgacagaagttggatgactgcgaaatgacgctcagtcgagttttgaagtggcaccgacgaatttgttgcggttgctctaggaaccacataaattctgtctcaaattatctcgatgtccttgcatgaggtgtttgaatatgaattttcacacaccaaaaaatataagggttcatttttttgtcagcgggatccaaccttcatacaacactagattttccacggggagccttttctcaacctgctgttcaattttcaaaaaatgacgaagaagaaatggaaaatgtgttagcggacatgttaagaggagatccggagtttgacgactgcacaagcactacatattctttcaatgaacc

SEQ ID NO: 103376 - DNA, 649 bp, Cannabis sativa
taattcatgagaatcaaacaatagaatatagattagcggaagcgtaccggagtccatagaatcgatctttgattggtatgatcttccaatcaaagatcgattggaaatcaaatcaacaaccgaagtcaaaacagagaaccagatgagaattcacctgtgtactttaatcactcgatttcaataaagcttaatgatcacaactttcttctttggaaacaacaggtcctagctgccattcgtggaaattgattgctaaaattcattcaaaatgttgctcctcctccacaatttctcaatgatgcagatcaaatcaatggcgtgttcaatcctgcctttgtcgaatgggttgttcaagatcaactattcgtttcatggcttctctcatcaacgacagaaagtttgttgacaagaatggtaggatgcaacacagccaaacagatctggaattctttggaaaaatacttactcttcgagtgtcatccaagattctagagtttcgcaccaaattctaaaatcttcgaaaaggttttatgtccttgaatgaatatctgttgaaggttaaacagactatagatcttctataaaatacattatatattagggcaaccgtccaatttgagttctatatatggcttcacccatgccctta

SEQ ID NO: 103377 - DNA, 1132 bp, Cannabis sativa
actcaatcctcaaactagaaatacgatccttaattttttgctggcactctttgatagaattcagttcaacaaaaatctggtccaacttttcatgagaaacctgaataattgacaaaaaaaaaacatgaaagtaagtaatgatatacatataattaccaaaatatacaaacaaaataaattaagaaatcgggttttaataccttgacctcatcattaacttcatcagaacacacagcatcaccaaccctcttaggaatgtattggggatcaaacttaaatttagaaaaaaagactttgagacttttcaccactcaaagcaacaaaatcctttataacaatctagaaagataaaaaaactaaacaatttaaaaacaaaaaaccaaaaaaaaataaaacaaacaataatcaaaacaatgaaatttgaattaaaaaattaccttaggattgttaaacacatcctaaatcaacttgttaaattccgatgtagggctattctcccaattcagaacacgaggactcttgttgccgattcttttgcaaaaacgaggtgataaagacggaatgatctcgtacagccaaataagaaatgccataggaaatcttttaagcttgtaacccttctcaatcatcctttttttagcaagctgttcaaaggtatcgtttccatccttcaatgcaatcttttggtgattaaaagtcttttcccacaataactttccccatccaaactgattaaatacttcaataaaatcatccccattaaccatagcaaatataaagttgtcaatctttttgccttggggataaccatacaaatacccagcaaacaagtatacaagagctatcttcacataatcttcatcatctttcaatgcaccgctaaagaaaacactagcaacttccctcacagtaaccatctcagtaagcccatgcatacaaaaactatcctccttgtaaccaagtaacttctttgatttgaactgatcaacatcataggatttcttacaatccaaaccggttattagggaaaacttttcaattccaaaacgacagccttgtttcccaatttgaactagagctcaacatcttccctttcagtgtgaatctgctccaaaagaatgagatgaatgag

SEQ ID NO: 103378 - DNA, 709 bp, Cannabis sativa
tcgatcatgtacggattcgtaaaaaagaattccccatattgatcattaattgtttgttagcataataatatggttatgccttgttgttaaactgtagaaagcaaattgaaaataaaaatgcatgcatgatgaatttccatatcatgaaactctgaatattctatacatacttacataaatatagtagcggtttctttctttatttcttttttaaaaaaatataaccttttatttcttaaaattgttggattatcctaatttaataatgacttaaaataattattatttagttatataaaaaaatattcttatgaatattattaattcttattagttgcacaattataaaaatgtaattggttggcaccttgtttgtatggataattaattaatatattttttttcctattttaaaattaattattacctataaaaaataataataacaaaaataaatttcaaaacaaaagatgatgacatgttgtagatatgcagtgtttttgttgatataaaaataattagaatggactaacatacataagataatatttttgttgataagagaatgataatattttttgttttctgtaaaataataggcaatttacatttattatgatcatattgtttcaaaatattaaatactatatcaaatttaaatatatttatatacttttccaatcatcaaataatgtatatgtaaaagtaa

SEQ ID NO: 103379 - DNA, 543 bp, Cannabis sativa
aaacaatggtaatggtgataatgataatgatgttgaagttgattgaagagaaaagtttggtgataataatatataggacatgtttgtctataatgcttgccttttatttctctttttcttttatagattatgtcattggctttcatttttaattacccgtctgagttttacatagtttttcaacatgtcaattaaacttgtcatcaaagccaagttaccttataaaaaattataccaaaagagagagataaagagaacaaaattgattgggccactaaaaggggttgcaatttttacaaaatagtgtacataaaaacgtgggcaatttaatctggccaagggcttggtttccataaagtatcccacaaatacgtttgtagtgaagaaaaagagagaccccaaaagaggcctatgttatctctactgcaaattcaaactgatcaactacccattacttcccaaaagtagttctattctaccacatcacacttgatcttttctcttcataattgtcatcaattaagtgtggtcaatttgtgaccc

SEQ ID NO: 103380 - DNA, 663 bp, Cannabis sativa
agccggttttagaggtctggtaaaacaggctagctagtttgcaccagttcacccccaaactttccatttcttgctcaattttccaccaatgcaaccaaaccatccaaagtacctaattagggtatccacaacatattccagccaataaaccgcagaaaaacccactgaataaaaacatgccattagagatcaaagttaaggtttttatgctcaaacttgcacaaaacctaaatcaaacatcaaaacaagctacaagaagcgtaaaccaactcaaatgaacctaaaaatttgaactgcaactcaacctaaccctaacagccactaattctcaaaatcataaactcaaaccaagtaaaaacttaaaaatgaaagaagggtgctactaaggcttaccttgggttcaagaacctttgaatgcttacagaaattcctgaaaaatgagctgaaaggaggtgatctcctctgattttgtcccagccgaaagagagaaagagttctcgattttgattttcagcttttccttttttttttctctaaatgaaaatgaaggttaaactttaaccttagctgaaataaattaatgctaggtgtcactcctataggcagccacccaatactccacttaaccaaatgactaatttgccctttgacttaaaattaggg

SEQ ID NO: 103381 - DNA, 524 bp, Cannabis sativa
ctaatgagagtctgatagtggtacgatggttgcttgatgctacttatttttttaatatttttgtatataaaaaaatggtagcatcaggacaccatatcagactatcatcagaccagattatacatttatagatattaagctcgtcacgaaagcatcggaccactatcggattaccatcaaatcatatcttacatttataagtagcatcaggctactatcggacattcgccttcaacctttactcgttttaacaatagaaaagtatcgagcctggtaaaaaattatataaaagtaattacaattataaaaaatacataattttaataattattcagtaaaaataaaatgtaatattcaaattttaatagttttaatgattttttatataattttatataaaaagatattacaaaattatataaaaatattaaagttataaaagaacacataactttagtaattatatcattaactataaaaataaagtacgacacaaaatcaagcataacacgaattttagcatg

SEQ ID NO: 103382 - DNA, 553 bp, Cannabis sativa
ttttgatgagttcgttcagaaaagtttatttatccttccagactcataatactcagatgcactaaccaatggattccagggctgaggagcttccgaccaatccaaaccagaggaaccccgtgacctaccatggtcgatcctcacaagtgatccgagcgggtacagatcttgtgagcgatctcaaagatcctccccatgctggtggagaattccagaggaagattggcatggtttcaggtggatttgggaaggaagttggcgtggtttctattagagaaaccatgcaactcaagaccctatcctatgctaggagatctttgcgtcagcctctctctagtgtttaggaatttcttgaggctgggaaatagatctcggcttcaggaaatgggatcttctgatgatgaggggaatgaggcctgtgcagagaccaaggctttctacgtgtagccggtctgtctcaagctatgtgtagtcggtctttctccgagctacatgtagacggtctttttcaagttatatgaagacagtctttcttgagttcatcggctttccc

SEQ ID NO: 103383 - DNA, 533 bp, Cannabis sativa
tataattttgataactcattttagtattggtatttttgaacttttaaaactagcctaatatatagttattcaaatgtaatctagagttagcaactcttatttgtacacttgtaacttttctaactattataatataggatgatatttttaggttataatctataataaaaacgtcatgtgcataataaaaaatcaatttttgacataaaaaataaaattactaaaaatttgattataaatattttttccttttatgcagataatttttgtaacatacaagatattgatattatgcatgtgcattttggaaatttagttttaatctaaaaattaattaatagttggccccccctgctatttgaacctggctccgcccctggcaatgaggatataggaaaaatcaaaatgagtacttatcaatcgtgcatatagtgacccatgagagcaacatatcataattattctaataatgcatgcatatagatccaaccctttttttttcttcttcttattttggatttttattatttggt

SEQ ID NO: 103384 - DNA, 733 bp, Cannabis sativa
aataaaataaaattagaaaaatacaaattttgcatattgtattaattttgtttctttgaagtgtgttggacaaaaacaaaagttgcagattttggtttaaaaattccaacagcggtatcagagctaattaatttttgtaaagaaagattcaatttaatacattcaagaagcaagtcttaaagatattgaaaatcaaggacaagaagaattgatcttcaagaacacaaggatggcaatcaagaggaggaattagatattggagatttggaggacattctaaacctttatctaatttgattttttagcaaatacaatatgagtagtcttaaaactgatattgataagtttgatggatcaggtgactacagaatatggaggaggaaaataagatctctactggcacaacataagctgttaagggtccttgaagaacccattgaatggcctgaaggaatatctaagatacagcaagaagagtatcttgaaacagctactgggattatcatattcaacctaaaggatgcaatcattaggttggttgataaagaagaaactccaacaaagatatggaggaaattggaagttcaattccaatagaagtcactaacaaacaagatcgttctcaaagaaaggatctttggcaacaagatgaatagatctaaaagtcttgaagacaacttagatgaatttctgaagatgcatatagagttggctaactcgggagaaggagaag

SEQ ID NO: 103385 - DNA, 611 bp, Cannabis sativa
tcttggttttggaagagtgtcataaaggctaattctattttgaggaaaggggcctgtaagttggtagctaatggagagtctacggatgtttggggggatccttggattccgcactataaaggtttctgcccgaaaccgagagggggagcccactacaacctattcagagtttctgagctggttggtgaaaatgggcagtgggatattccaaaactaaaactttgttttgatgacgaatcagttacagctattctaaaagggggtcaacccacaggttccggcatagatagatggatctggacactggaaaataatgggcaattctcgtgtaaatctgcctatctagcccaagccttggaaagagcacctcaaagcgatgtcgctccaaagctttggaacaaactctggaatagcaagattctggaacgacataagatcttatggtggtgtattttatctagggctctccctgttagagcagtgatcggtgacagattccacatagaagatcctagttgccccctgtgtggaaggtgcgaagaatccattgaacacctgtttctttcttgtgatgtggctcttcatctctggcgatcttctccttggggtat

SEQ ID NO: 103386 - DNA, 837 bp, Cannabis sativa
agccaacgaagacaatccgtacttcgttggctccggtgaccatcccgggttgattcttgtgacacctcctctgtccgaccataactttcagcaatggtgtcagactttcacttagcaaaaccggtttcattgatggtacactctttcaacacgatcctactagtcatctattccattcttggactcgctgtaaccaaatggtaatgtcttggattattcattgtgtttctttggatattaagagcagtataatgtttcttgatactgctcatgagatgtggaatgagcttactaaccgttttagtcaaggaaatggacctggtctttttgagcttcaagaatctcttacaggtttacgccaaggtgatgaatccatcactgcatatttcaccaagcttcgggctatatgggatgagataaatgagctccgaccttgtcttccatgcacttgtcaagcgtctgccgataacacaaaatttcagaattaagagaaggtccttcggtttcttactggtctaaatgagtcataccaggcggttcgtgaccaaatactcatcaccaagcccttcccttctctttcaaaggtgttctccaccatcattcagcatgagcgacaaaggaaacttcgtctccttccgaaccttgttgctgccacttcatctcattcatcaaatccacctcgcaataagaaaatgcgacctttttgtactcactgccaaaaaccgggccacttaaaggagaaatgctatgttatccatggttttcctcctggttattttgacaagcgcaagtttgaatcttcacagcactcctcttcagatcggggttcccaagtca

SEQ ID NO: 103387 - DNA, 520 bp, Cannabis sativa
atatatttatttatatattatgatataattatttagtttttaaaataaataaatatcttatttaattaaatttttactattattttattagttataattaatataccagtgtaattctaaatctatatatgatacatttaaaaaaacccaaaaaggttaaattaattgaatatacatatactttttctctccaataaaattattcttgctcatgagttgaaattccaagaacattattttgtgtatcttatcagtccaaactgatccttatgtgtagtggttatttggaagatttggtgcgagttcattaccgttctttgatacaatttactaaaatatgggaagaatacttgatagatcatcaagagataactttcatatatacatagagtgtggtagaaagataatctttattaaaatattttcgatgcacatctcatttagtaccatataaccaacaaatagtatcagcttatgccatatataaatatgttaatgttgtttgagttttcttgcatta

SEQ ID NO: 103388 - DNA, 559 bp, Cannabis sativa
  modified_base (62)..(62): a, c, t, g, unknown or other
tatattaaactatatgggacccgatatttaattgcaccaataacgatattgacacgtagganggtgctaggcaccagtggtgccctttagcatttctcctattaaataacataaaaattcatcaaagaaatgttttgagtcacattgcataaggtcaaagttattgtataattactaagtcctataaattagtaattacattatattttttaatcaaaaaaaaaaattactccatattttaataaataattaatatttttatttctaaatattttatactattaagttgtgtcttatactacatgacttgttaataatatctcataaaatataacttttacggtaatatagtcatttcatcacattttattcaattttattgtgaaatgagtgaagtagatgataattgataaatagatgcaaattaaatacctttcacattttacattatatcttaaattaggttctttattttttctatatatcatttaaaatattatatttttcaatatattttattataaaaaccaaaaaaatttgagaaaattaaatgaaaaag

SEQ ID NO: 103389 - DNA, 821 bp, Cannabis sativa
tgtgaaccatgcaacatagaataatttctgatctttattaattaataaatctaattatattaaaatgggctgtatttagggcacaagacccaataggtctcccaatccaacagtcttcagagaacacgcctacacataccccggagggttttgatggcgtggcaccttggagaaataaagtaataattatagctgtatttttgaaacgcttgacaagacaaccagaagtcaccatcttgtgacaacaactcgcctgcctctctctaatagtttccttaattactcagccgtcagttgcaaaactaggggcatgtgttatagtgaaaaattttcacctaaaaacttgagataagtctcctatgaaattgacacgtggatccaatccccaagagatggatgagttgttaagtaatgactcctcgagagttgaccccgcttgacccaaactcgcgagatgatgcaaccttgacagtgtctagtcgcatactatgccatgcatagaataaaataagtaggaccaagatgggtttatacaagtcgaacatataccaataaatatgcaatgactaagtagccttttcttgcgatttagtaaagattgtttctttacataatgaacttgtccagatgacaaggcgtatttgatgactcgatagggacttgcatgtctcatgttgtcaacgcatatgaggtgtccatatatgcgactcaaacagaacgcaaacaccttaacgtaagactcattaaccctaaaaagatagaacatacacacccaaagcctgttagcttgtgtgggaatatgagcaggcaactcgcaccct

SEQ ID NO: 103390 - DNA, 935 bp, Cannabis sativa
agacagaagtatgctgctcttcagcggtatatacgatctgaagctccagctcggggtaatgcacctctccagcctacgcctatagcatgcaggctcgaggttatgattggagacccacacctagctgggaactcgagaaagaccttagaaagatatgttggtttttatggtccatattaggggtgtacatctgtcagtttggtcagtttacattacattttatttaacccaatgtaaagaccgggttacaaaaatctaagtgtaacacgcccaattaagaaaaaaaaagtttcaacccacccattgaattagtgagtttagtcgggttaacccgtccaaaccgtactaatgtttatttttttcacatttaatagttatattttaattattgtgataatgagataaatataaagattgaatttaaagttcaaatcatctgctataaaaaaatatagtaatttgaactttctattttttataaatatctatataaattatataatatatagattatatataatgaaaatacatataactctcttaatcggattggtcgggttagttcggattgattgggcgggttaatattattttcaacccgcccaatataaagattgggcgggttatatttttgtcgagttttttagttttcatttttcatctggttatctcggtttggtttgggcggttttcaaaaatttatgtacagtcctagtccatatcaaagttagaaaaatagaaacagatttgattaaaaataatttaatctaatatgaatcataagcccaaggatctcaaaataatatattaaatgtagactaataaaaagagagacactgccttttgtagcctatcaggggattcttgctatcatttcatattattatcgaacatccaatccaataacttttctaaagagttcacaccacaatctt

SEQ ID NO: 103391 - DNA, 685 bp, Cannabis sativa
  modified_base (544)..(549): a, c, t, g, unknown or other
actttcaaatactgcaccttcgtagtagtggattgcccaacagcgtacaatggcatccttggtcggtctgccttggtcgattttggagcaatctcttccattcgacacttatgcctcaagttccctactcaggaagccagagtggggacagtgaggggaaaccaaggagagacaaggcaatgctacaacatcgcaacacacttgtcagtactgggagtgcgcggggacatgaaccaagattgatggaagaagatgagttggatccccgcgtggggacagaaataattgtggaacctgtggaggacagtgaggaagtaaaagtgtgcgacctcgactccagcaaggtcctctgtttaggaaaaaacctagagccggaggaaagaagcaaaattatcaaagcattaaaggaagcaatatatgttttcgcgtggtgccaaggggatatgaccagcataagcccccacgtgattacccatgtcttaaatgttaacccaaacatgacgtcggtacagtaaaagcaacgtcctcttgatccggtaaaagnnnnnnccttagagaaagaggtagataagctactaaccaatggcctgatccgggatgttaactacccggaatggctggccaatctggtactagtacccaagccgaatgtgacatggcaggtttgtatagacttcaccgatct

SEQ ID NO: 103392 - DNA, 592 bp, Cannabis sativa
aaccaatagcggcgtgtagggggttattagtggtgggggactctgccacttataactataaattttgtagtgatatcatacaacaaaaaagaaatatattgtacaaccaacaacctacaataacccataaaaaaattaacctaactttgaaataaaaataattttaacaaaactaatatagatatactataatatttaagttatatgtttctaaatctttaaaaaaaatatatgaaaacaaattaaatactaaatatataagaaccgtgaaaattttatgtgagaaatgataatttaaggaataaaaagtataaaatagttatttctttacaaattttcaaataagaacatttacctatatagtagtatgtctttgggtcatttacaataatttttttaaaataaaagtttaataagatctttcatttttaattttaggccctagtaaaatatgggtcctaaacacgggcctaacccgtctatacgtagcgccgatcctgtttatgatggaggggataagttgaaaaatactacttttttgtatccattaattaaaaataccctcatgttacattttattaaaatataccca

SEQ ID NO: 103393 - DNA, 628 bp, Cannabis sativa
gctaagaccacacttgctacctcgagcacctcaatgaatttccttgttgagaacaagatcctcagaatagcctagaacgtgttcgccgacgttcacgtcaattttatcgccgataaagtgtaactttgtccccaattgctcttgacgcgtcctttcgattggggaagctctccacagtgctcatgatctcaaaacgatcaagatcaacgcaagaaaagaggcctaagttggcagatcggagttgtctccttcgttggcggtgtaccatctttaattgagtcaaaatcgtgctccttcattttggacgttaaagcttcattttcttacgtcaaaaataatccttagggtcccatacactcatatctaacctcccttgacccaagaacaagcttaaacatgttcaaatttgtgtccgttctaagtcgtacctttgaagcttcaacaatggtgaaactcgaaacagtgacctccgacccttatacaacgctaaaaggcttccttaggtcttacataagtgatcttaaacccccactttcacccagattgcaatccactccaagaacaaaaaaaaaaactcgatatatcgtataaccgtgtactctctctgtttcactcttttgacatacga

SEQ ID NO: 103394 - DNA, 593 bp, Cannabis sativa
aatctagatactggtaaaatatatccaacagaatactggttaagtctttcaaatggtgggtgtgtcactgtattccaatgctcatgcgtgcaattgcatgtcccttgaggtactgtgatacacccagccatttgcaacatatgccagcgttcccttttcacatacaaccgcgtatttcaactggtatgttttctcgaaacagtgaggagttttcgttagcccaatggttatgcgaagaaggcatgccccttgagatataggagattcctcagatgtttcttgagatatatcactagttggatatgcgtgatatgttcgcaggttgtgattggttagatttctcgaaactgtgggtgtttcccagtatctccatggtcatgctcgaaaacgcatgccctttgggtcactgggtaactccttgccgttttttgagatattcttctagtcgcacacatgcgatttatgccttgggggttggttgggttttcgagagaattcgaactagccttccaagaaaaatttgaactttttatgcgggtgaggtcacttgtattgttttcgcacattcaacacactgaaaagatcttctatct

SEQ ID NO: 103395 - DNA, 729 bp, Cannabis sativa
acccaagaaacccgacaaaaatatgacctgcccaattaacccaaattaacccgactaacccgattaagatggtttgttttttatatatatttttttgttttattatatatatcatataatttatatgcctatttaaaaaatataaagctaaaactaatatgtttttttttttattgtggttggtttgtgttgacctcaaaaagtgatcaaccgacagcagggtcgtgtagatctaatacttgccaggtgtgtgcacaaataagaatgaaaagtaatcgacaataggattttttatagagattcgacccccttgtgatagcgaataatgacctactccccttttagtaatattataccgagagaattactatccagatcactataggtgggatctgctgtagtacccttaggattacaatgtatgaatcaatgcctggcataactcaagtgttggaaagcctagggtgttggacaacctaaggtatgtgtgtgtgagagaatgaggaagagagaggcaacttaggcaacttaggtttttcagtcagaggtgaaggcctttatataggaagccttaaaccctaagtttacaattcaaatcccttaacaattgtatagttagttagatatttacaaaagaccaaaatacccttgattctagataatatttagccattctgttgggcttttggggcccaattcccagcacattactcctggccacgtgtagga

SEQ ID NO: 103396 - DNA, 571 bp, Cannabis sativa
aatatatcaaaactgtgacatacaattctgttgatgaagaaggttttcaattcaaacagacaattttttattttctccctaaggatgttgttgtattttcatcgtttcaacgtctcatttgttgcaggaattgcttccctactaaagacctaacaatctacatttgcaatccattaaacaagcaccaaactgagttgggattcactttgaaatgacagcattatatctttcgcttttgatcaatctcagaatctcatgcacatttctacagaattcaatttagtgacagttgaggcatttgagattggagaagaataagaaaagtgctttacatttgaaatacactctacaagaacaaaataatggttgaaatcaagagagatttgaaatcaaaagaacaaaagtatgttgttgttgcattgacaaatctcacttgatttataccattcttttgttcttgaagagtatatttcgattgtgaagtaattttttcttcttctccaatctcaaatgcctcaactatcacgaacttgaattttatagaaatgtgtgtgggattcttagatggacc

SEQ ID NO: 103397 - DNA, 596 bp, Cannabis sativa
  modified_base (519)..(521): a, c, t, g, unknown or other
tagtgtaaaatgtcaagtacatcagaccgcctagagaaccacactatcagttgtgaaaatgacttaacattccatgattttaaaatctggtgaagtaaaatgttaagggatcactataaataggacctttgaattcattgtaagggaactttctggtggagaaaacattaagacttttgaagagaaaaaattgaaagatttttatttcatgcatttttcaatcaagatctcaagataccatttttaatccttattgtttctttgacgagtttttaacgtcaacaataatatttatacatgtattacaatttagaataaagttattaattttacgtaaatagatttacagaatatatgcatatattttattaagatgtaattattcttatatagatatatactttgttaaaacgagatttagaaaatatataactaattacaatttaaaggttattcttatttataactggcccaaattggtttgttaggtattttgtcctaaataaaactcatttcaannnaatcagatttactagttaataaaagatcaaaaatcgttttatgttgcacgtttcacatgatttatatcatgatta

SEQ ID NO: 103398 - DNA, 618 bp, Cannabis sativa
gtcctggattggggagtctgctctatttgcgagggtggatttgggtaagtgtattattaattctggactaattgaagatttttgattgctatagtctggtttgttctaagttctgggtaatttggtttcacattatgcatttttggttcaattgacttgctttaggtggtttatggttgtgttggaggagctctatggtggtttgtttggggttgtgtttgttccactgagtggtgttgggttggctacggtgtggggttgggttggttacagtgtggtgtttggtttagttgtggcttagttcagttctggtgttgggagtcgattggaaccggggtgtgattacattttttttgggtgttcaggtgtgtcgtgtatcgggttgggtgtagtctggttgggaatggtcgggttcgggtcctattgggctgagcccgaatgtttaatttataggctgaaatgaattataaaaacaaaaagggtgagacaaaatattattccgttttagtttgtcaaagtagaccgtaaactcaatggagccagagagatttcttcaccatctatccatgggtttttcagttttttggtcagcagggtcggggcgggtgatcaggtttt

SEQ ID NO: 103399 - DNA, 595 bp, Cannabis sativa
gaggtctttttattgaagatgctcttaggttaggttgtaaattagtatattgagtaatgaactgattcattagaaaatatatatatatatattgtattacaacaaaatctatatgtcaacaactcataaaaactaaaaaaatcgacataactttcaaataatttatttttaacaaaattaatatacatatataccataatatttaagtaatttgattataattctaaaaataaaatatgaaaaaaaaaattattgattttttttatgtagcaaaagacaatataaataataaataatctaaaagagtcatttttttactataatttcccaaaaaaaattatatttaattacaaaattttgaatcaagggcatttaacggttcatacctcatagtgtaaattaattaagttgaatatatgtatatactatacggaaatattgcatttatattatctatttaatcatgttgtgtagtgtgtactattgcaaaaacaaccaaaatggtctttaaactgtgaaactctcacttgctaaaaataaataaaaaaaaaattaaagtcaagaagacaatataacttaattttattagtagcac

SEQ ID NO: 103400 - DNA, 769 bp, Cannabis sativa
cttagtggaagcctaaaacattctctttttttataaaggttatagataaacatattttaaagtcaacaaaaaatatattaaataaatatgaaaaacatttagctactacactattcatggttgagttacatataaaaatagaatagtaaatatataaagtgaatgaaatagaataaaatattagaaaagaaacaatttttattttattattttatttaattttattttaaagtattgaaatatcattcttattctagttatggtttcactcattttaaccaaacaatacttaatggagcatttgttatataaatttgagttggtaaaagtaaaattagaatagacttagcggaaatatgaaatccatttgtttaagatgattaacattactacagacttacatggaaacataaatccttgtcattcagatttaatttaaattttacattctcattaattctcatcaaatctaaatttcatactaaacgtcccattagaattattttacatactctgatgggacaggagtgctccaatgtcgtactgctaatcaaaaaatttacatttttttatgatattttttgcttttttttttttatataaaataaaatgaaaaaaataaaaattattttgaaaattttaagaatggctcatgagtttctttttattttagaatattggtgagcgagcactaggataaatcatatttatttattattgttagagatataattttaatttgtaatgatattttgtttttaattacttt

SEQ ID NO: 103401 - DNA, 573 bp, Cannabis sativa
aatttcaattgtcataagtttggtggatatatgctatccaagtaattttaaagtattctttatgattacttgaaacaaataaaaatactaaaatttcatttatatatatcttaaatttacatcattttgaagaattcaacagctatacacgagctactcattggtagtagggtctcaaatgttcattattccaaatatttttatcagtgaaccattcaaccatgctaatttatgaacccctactgctataacaacttctattgcatatggaccttccaaatttagattgaacgctcctgttgctgaatctcgcgtaattgtgaatactcttcataatactaagtctccaactttaaagagcctttctttactcttttgttgaagtgcctcatcatcctttggtgatacacaacatttctcacttgagattcatctctcatttcatctaacaaatctaaggatcattttgttgggttgtctgccctaaataaaattcattttaatataattagatttactaattagtaaaagatcagaaattattttatattgcatggtacacatgatttattt

SEQ ID NO: 103402 - DNA, 573 bp, Cannabis sativa
ctgttggaggggtgactcctagccctctcttggttcctcgggcgttcttcaggtttgtagaccaccctctcccgttggtttctcaaggtatggacttcttgtggataggtttggtggtcttgagatatttggttgttgtgggcgtcaatacccaacccttgaatgttttggttagaatagcttcgaaataaattgatagcttcttgagtgtgacgatgttggtcatcttggcgccaccacatttctcgagcatgatcttccaaccaagattggaactctctcctttggttagcgagacttttagttagggccgctcgagtttaagtttgctcctaatgtacagtttgaaactgaccttgcattcagcctatcgcgtcccgcaactgatccatctctgggtcaattcttttgatatccacatgggtttcatttcgtggtctaaagacgctaaggtctcaattagtttgagtttggcccgtgccatcattaggtgggataacattttggtatttctccttctggtggccccatcagtagcgccacctccagcggtagagacatttgtggtacgcc

SEQ ID NO: 103403 - DNA, 723 bp, Cannabis sativa
  modified_base (571)..(578): a, c, t, g, unknown or other
tttaattttttaatagattattattaatttgagatattttgaggtttaaatttaacaactgattattttatattttaatttatggttaaatttttaaaatatattaagttgttaaaatttactgaatatttgattaaaagattagatattttaatatttagtaaattttaaattaaaagatagtattattcttttaatttaaaatattatattaaaattatcttatatgatatatcaagtaattataaatttaaaataaactagatacttttatagatatcttaaccataatatttttaaatttataaattggttattttgtgaaatattttattctttataaattataaagttagaaaaatgatattttatatcattttacttattagacatttataaataatatttaaaacattcaaataatctatatattttttgtagaaatttgaaaaaggctaaatttgagatattttgacatataatttaaaaaattattatttgtttattattttactcttaaaataatatttcctaaccatatatattttaaaattagtttattttgttattnnnnnnnnattaaattataaaattagaaaataatattaaaaatgtctatttggttctttttaaatcatttatcttattagatatttaatttaatttgataaaataatctaaataaacctagatattttgaaattagtttaaatttgaaatttt

SEQ ID NO: 103404 - DNA, 540 bp, Cannabis sativa
aactcaaatttttgttttataataatttaattttaaaaattaatatgtatccttaaatttttttagtaactatcaatgtgtaataccattcagaaatgtaatttatatatatatatattcaagttttcaattgaaaaatttatattgttattaattttacattgttgtactgtgttgtatataaattataaatttactaatttagcaaataggccatttaaatatttaataaagataatttttaatttttttagaaattaaatttaggtaatgatgatgtttaaatattgattgccaattaaaaaataatttatatacttgcaggtaaatgatggagttatttatgattgtgttgatttctataagcaacctgcctttgatcatcctttattaaaggaccataattattaccatacggtttgttgtaatttatatatattaaacatataaattttattaattaattcaccaaaaatatttattagttattcttgataaaataatttatgttattggtatacagatgaaaccttcttctcg

SEQ ID NO: 103405 - DNA, 549 bp, Cannabis sativa
aaaaaaaccagtcaatgctgtaaaaaaaattgtaagacaaaagaaaaggagaatcaaagaactttcacgagttccaacattttaaacaacattgaccataaaaaatgaaataatcagatcttgctgaatctttccacaaaaacaaacaccatttcctcctccgaaacctttaagtatcaatcaaaagaaaccaaaaacgaggtattaccttagacaggaaaaaaaaactgaaactttattcattaatatttctcatatcataacccttattccagtcccattccttattataaatcagaaaagaattactagtaacaattaattaaggaaaaagcaatacagaactatcaataataaaatgtaaatcattcatataaatgggaaggagatgctgtcacaatcttttggaacggttttgttcttgataattgatatgcaatcaacaaaattaaaaatctagattagtacaaacattaacataatagcgtcgatttcaagctgaaatggaaatatatggaatgatctgtgtgtgagagcaataagtgagga

SEQ ID NO: 103406 - DNA, 517 bp, Cannabis sativa
aaatggcttgatgatctcaaggatgtcatttatgatgcagacgacttggtttacaagatcgacactgaagcatggctaaatgaactggaactggaaggtggtggtcatcatgattcccacagcggctgcacttgtactagtaaggtactaataaatctatggattggattaaaaagtaataatagtttattcagcggctttaattttattggttgatttgtcagtttggtttatacagtttatttggaatagagtgcctatccctaatagttattgtatgaatatttttcaatagataagaatataatgcaattcctcactctttatctgtcaattgatctattgcatgcatgcataatacttgtcaggcactcatgagactcatctcatcaactcctctaacttcatttgataagagcataaaacctgagatagaagagacacttgagaaattgaagcttcttctagacaacaaagatcttggtttggaacgtgtaaaaaatcataagaagccaga

SEQ ID NO: 103407 - DNA, 648 bp, Cannabis sativa
tgagttgttagagatttgatttaatattagaatatcacattatcattgccaattaaggtggaactatatgaatcttaacattatcaagacatggccttttatagaatgagcattcttttgatgattagtctttcaaaattaagttttgttggtgtttgtcgagataagaagaatgttataacattgagatatgcacatttggctttttgttcaagttttatgctgttttttgaagtattttctgtgtgttttcagaacctggttatgagttcgacaaggcgtcgttgttgcagtataaccatatgagctttggagggcctcctgtcacagtagagactatcgaagaagcagacgagctaacaagaaaagatgacaaggaatctgcgattggttagtttgtctcaaaacttacttgctattacttactaaagtagtttggatgtttgaagtggaaagacctggtgctttgaagaagctcttaagtttaaacttttttccctctttggaattgagctcatttagctagaatgcactgggtatgagcgaataattttgatcttgtgaatcgtagaagctaggaaactattggtgtttgtttggtaccagagtaataaccaaccaatttagagtaatgataggctactgata

SEQ ID NO: 103408 - DNA, 840 bp, Cannabis sativa
cacaagattttcatgatatatatatataaacactaatttaactagtcaatattttttatataacagcacatttgaattaattaaataggacatatatatataataagttgttttttaataaaaaattgaactttattaaccttcgaactctgctatatatcaaacaaaatacatgtagcaaatcagttaagacatatctcaaactaaaaatacaagagaaatttgacaatttgtatttaaaaattgtccatagtcttttagtatgccacattaaaatacatagaaatttaatactctaaaatttattaaatttcaaaataccctcctcataccttccctctttctcttggtcctctctccctctctctctaactctcaccaaacccaaccaatacccacgactacaaaaccatttggtggtacattatttttaggaggaaaaaatattaaaagtatatatatactatttctaatttggtggtatattaaaataatatattttacatttaagcatactaaatcaaattttctaaatataatcgggatataaaattgatactctaacaaagttgggagcaaccacattagctaccgcttaataaagaaaatagaaacattttgcaaatcacgtaataaaactttacaattttggataaccagatcaaactcagaatacattgtggaacttcataaagcttgtatcactaccaaacaatcagattctaacaccacgttttttcatggtatggttttgatccaactaagtgcctctcgaactcccatggcctcaactaattcaagcacaacagtatcattgaagagccttgtgcaaccttcaat

SEQ ID NO: 103409 - DNA, 859 bp, Cannabis sativa
  modified_base (272)..(272): a, c, t, g, unknown or other
tgccctaatcacataataaaaccgggtaaatcacattatcgaaaccctcatcccgggaaacccgaacctacaactctaggttctactatacactctagggataacactaactcaggaaatagggaaacacccaaccacgacactagaatggatgagagttgagaaaatggagcattcggggatcctgccaaaaccggctagccggtttacaccagttcaccaaaaaaccccatttcttggtcaaaactcctccaaatgccaccaaaccttcnagagtacctaattagggtatttatcacccagtaactcaaagaaaaactcactgtatcataatatgcctttaaagatcaaaactttgagctcaaagctcaaacttacataaattcaacacaacacaaccaaaccaactactagaggcttaaattaactcaaatcaaacttagaattccaaccctaagcatttcttaccctaacagctcccacttatcaaaatcacatacttaaactaacccaaagcttcaaaaacccaaaaataaaggttctagggtcttacctttgctttggattcacaaagactttgtttaatattcagaaaacaccagattgaagatgaaatccccttggtttgcttcagccgaaagagaaagagagagagttctcaatttttgactttttcttccaatttcccttattttctaaaatgagaattaaaaaaaacttaattattccttgctgaataaatattaggccatgtgtcacctcctagggcagccaccaaatcacacctttgcaaaatgactaaaatgccccttaatttacaacttaagcaattctaatactaggggtaaaatggtcaaat

SEQ ID NO: 103410 - DNA, 745 bp, Cannabis sativa
  modified_base (26)..(36): a, c, t, g, unknown or other
ttgagcaacacttgtcaaaaataccnnnnnnnnnnnaaataaatatgaaaaaaaaaaattcaagtttcaacaatacaataattagtcaaaatagagtgtctgcccatgttcatgctctgtggcagtttttttcagttactttcaacccactcccctgttttcctttctccacgatcaatcttcactgaacttcatcttatctaattctttatatcacactgttacaatgaatccacttcttgataaaatgaaatcgacaatgactcttactgaaaatgagagtgaaattctggccattactgacgatggctctgatgttgtttcttccccagaatttattctcattgctcgtgtattaacaagcaaaaaaatctggttatccacttttcaaaggcagatggcagaccattgggatgggcgttttaaagtgaacattaaggatcatcactcagatttttttctgctatgtttcggatgtgagggggatcgtactcgagtgttggagaaggaaccatggcactttcaaaaccaccacattgtcctcattgatccttctttgtatttaaacgttactccagacatcatgattcatagtccattttgggttcaagcctatagattgccttttctaagtaagtctcgatccttggctaaagcattggcttctattcttggtgagtttcttgcggttcatgatgattctctgaatgagggttggggcccttttttgcgctttcgggttaac

SEQ ID NO: 103411 - DNA, 844 bp, Cannabis sativa
cccaaacattcgtaccccggacgctaagaaggtaccctgggcggacattatagcctccggggaggactgatatcagaaatacctcttcaggagagaataggagttagcttatatcaaggctcaggctgccgccgggaggacccttcgactagaagcatgtaaggaacggacgccttctcggcctaattgctggtcccggttcctaacactggggctgctgatgccagcacatccggatctggtaagtctcccttaacggtttatcacgtcccttctgcccaagattattcccggtgtagcctatagaatttgatgagcgtctccttagatttaggatgcccccactcggtggggttatcatgccaaggccttttatttttccaacttaggtcattttctaggccgatcccggatgggttccaaacctcctggacctattcccatggatcattcagcttatctgtcttctagctagtttctccccttggacaactttcttggggatgattaagccaatattgtagtaaagactttgctagggctgagttagatagtcagggtaggactagttttattgctttgttttcgtatgcatattttcttatggccaccctgacacttaatttgtttgtctttttgaagaagctaggccaatggaggatcttttggtgactcttgcccagacctacagctctgactcagttggtgaccccagggaggtcttcttctggtgcccctctaggccaaatcgtcttgatcgacgaggatggagaggtcgaggaggaggaggaagatggtgagatcctggcccccttggactgaaaatgcaagggcaaaatggtag

SEQ ID NO: 103412 - DNA, 1288 bp, Cannabis sativa
  modified_base (206)..(206): a, c, t, g, unknown or other
tcctcgataactgcatcatagtgtctatcgatgacatcctcgtatactcttagtcagaagaggagcatgaccatcatcttcgaatggtattacagcgactcaaggatcttaagttatatgcgaagttcaaaaagtgtgaattctggttgtcaggggtatcttttctggcacatattgtcgggaaggatggaattatggttgacccnagtaagattaaatcagtgaagaatgggccaaagcgattcgtgtggtcagacaaatgtgaagcaagttttcaagagttgaagcaacgtttgataacagttttggtgttaggtttgccattagatcgtgaaaagtttgttgtttactgtgatgcatccagacagggtctgggatgtgttttgatgcaagctgacaaagttatagcttatgcctctcgtcaactgaaagattatgagcagtgctatcgcacacatgatttagagcttgctactgtggtattttctctatagataatggcgacattatctttatggtgaaaaatgcgagatttacactaatcataaaagtctcaagtactttttcacccagaaagatttaaacatgaggcagagaaggtggctggaactggttaaggattacgattatgagattttgtatcaccccgagaaagccaatgttgtggttgatgcactgagtagaagaggtcctgggcaggttttcactactgttatgatatctcctcaactggcttcataaatggttaatgcgggaattgaattcatagttggaaagttgcataacttgacactctagtctgatttgttagagataattagaaaggcgcaattagaagattccgagctagtccaaattcgagatgaggtaatggttggtcggcctaaagacttttcaatctcgaataatagaatgttactgtataaagctcgagtttgtgttcctagtgatgatgagctcaagaaagaaatccttgatgaagctcacaccacaccttatttactacatctgggaaccaccaaaatgtatcaggatctaaaaccccactcctggtggtatgggatgaaaagagatgtggtagattatgtgtctaagtgcttaacctgccagcaaatcaaagctgaaacatcaaaggccggtagggttattgcaaccattagcccttcgtgagtggaagtggctggacattgcaatggattttgtaactaatttgcctaggaccacaggaatgtatgattcagtatggttttgggttttgtgccctaaataaaatacattacaatctgat

SEQ ID NO: 103413 - DNA, 502 bp, Cannabis sativa
tagttctccacttgcaggccatttaaagctaagcttcaaacaatgtcttacaagtgagaaggataaacaagaaatgacttcaataccttactcatatgcagttggcagttcgatgtatgctatggtttgtatgaggccaaatattgctcatgcagttggagttgttagtcgacccctctctaatcttggcaaggatcaatgggaagcagtgaaatggatattgagatatctataaggtacttctaggttatgcttatgctttggcagtggtgaacatatgcttgatgagtacacagatgcaaacatggatggtgattgtgattccaagaaacccacttaaggattcttgatgacatttgcatggaaagctgtttcatggcaatctaggttacaaaagcgtgttgctttgtctactacagaagctgaatacatagttgtaactgaagcttgtaaagaatatttatggatgaaaaaatttctacaagagttgggcttgcaacaa

SEQ ID NO: 103414 - DNA, 897 bp, Cannabis sativa
tgaaatagggaataaaattccataataataattgaaactaaattgttcattagccaaaacaattaattcaaaaataaaataaaagacaagcttcactttcaactttgacaatctccacccttctgtccaaacatccgacttaactcgctaggatagcaatccaagtttaagcagctggagctaaaataagaaggaaataaatattgttagtagatctagaattaataacccaaggggataataattctctaaaactcatgagtttataacaaagttagaaataccttgtttctttgccaaaaacttagggcacttgggtttccagtggcccttttcgttgcaatagaagcactttcctttttcctttgacttgggattagcaggctttttcttattagccgtgttaacagctttaagaggcttcttgctattcttccatttcttctatttcggtttcgaagtagaggcaatgcctgcctcaagtttagtcgtaccattagcagcattactagaggtaggagctttagttcctcctttctgcaatcctccaataaaattttcaaatttctaaaggttattgattaactcgtggaagtcaaaagtcaacttattcatgacataattgaagtaaatggaggaaaagttgaagtcaaactatttaagatcaaactcacttgagtttcttgatctattatagctccatgattctcagcctcttagaagtaactagccatttggagtaggtgatcaggcacgttatgatgaggcttcatttgtgcattgataaaaatcttggtcgtctcaaatgagcttaatctaacgccatccctaacagtttagttaacttgtttatgatttctgtagtcgtgagagtgtttgcaaaccttgttttcaagg

SEQ ID NO: 103415 - DNA, 618 bp, Cannabis sativa
ttactaaaattagaaaaaaaaaatccttaatttctagtatcttaatagttcattggaaatttttaacggcaaaaaaagttcagagaacataatttggtacatgttaaaatttagggagcaaaaatcttaattaacctaaaaaaaatatatacataattcttaatggaatgttttgtagttattgtgatgaagggttgtgattttggtaatgagaatgtaaaattaaatctatgtttattatgatttcattagaatattaaactcttaagattgccttaatcttaacccttattaactaattaactccctagtaaaacttttacaccaaacacctcaagtttccttgcctaacttaccgtacgtgtaagcaatttactaatcaaattataagaacaagaggtatgcataaatcgattcaataacaatcgatcgatccaattataacttaccgctattggatatctaattgtcatctgattgaattgaatgttatttttaaatattcaatcagatagaataggatcggatgttggatggggtatccaaaaattcaatacattcaacatccaatcgaattaattaatattttcatttaatttgaatgagtaattagatttt

SEQ ID NO: 103416 - DNA, 747 bp, Cannabis sativa
agagattttgaataagtttgttggtttcgaaataatgaaaattgcataacaagggataagaccttggaagcacccggggagtattttgtcaaacgctcggtctcaatgtcatacttcaagactctaaagcactccattctttcctctaaaaagagtgcataggtgcggacccaagcagaacagtcccaagctgcagaaaagacatgttttcggggtctaagaaaggaatgttattattggtaacgaaatcaaataaaggcgcaccagtttgacatgaagcagtgtaccgagggggcttgagtcatctttgaagtttgatatttggagaacatgtgccttatgtgaatagttcaaaagttcctctctaaaggttggatcaccttctcttaatgtcctatgaatcacaatcaatgcctttatggccacctacattcacatagttacattaaatagttttaacatttgactgtaaaatgaaaaaaaaactaaaaaaattctgcattgtttcaaatagaagttttaactttttttttttattgctcttcaattttggttcttttttctcatatttcattactattactacaagaacatcattatagaaaaaggacattacaatccaatttcttgtctttgataatctcttggccagggcatggatgcaatacgccacatctgcccgcggacgaaccaccgatgttgcagaaaagatttctatgaaaataaattaagaaagaagaaaaaaaa

SEQ ID NO: 103417 - DNA, 589 bp, Cannabis sativa
aaaaaatataactaattttgtcattagatccgattattattaagttttaatttgacaatagtttaagatcctatttatataattttaaaatatatagaatttattatattatttaacaaaacaaagttcaattaataatttttacaaaatcatccaaaataatatttatcacgatgatcattgtacagggtcactttgactttgttgttaaacgttccacaaaatattatattgaaattcattaatgatgttataaaactctacaagatctcgcaactcaatatcagaagaatttattgtttgggaaatctaaaatattaacattgtataaaatgactttacaatcatcatcattattattattattaatgacttcattaagaagctaaaaatataaacaaaaattataagtcattcaaaaatttagaaacaagtttttggtggcttaaaagtcaaactcaaccaaagaattagaattcaaattatttgagtcaaaaatgattattcactctaattatacacaactaatgcaactcaacaaaacaaaagacttattatcaagaccgaaaaaggttaggaactaataatg

SEQ ID NO: 103418 - DNA, 603 bp, Cannabis sativa
cactcaatatcgatctgattgatgtgattcaatttgcgttttgaagctatttcaatgctctatcaagtcatgtctcacacttcaatcgtaattctaaatctaccggtcccaaatttcatccctaagggagttacaaaaataagcttcggcttacacggagtaggtcccgtcgtcgcgactcgaactctaaaaattgatgatcaactttagaagttaattttcaccgttagatcatcatctatggtaaaaaataaacaacttttatttttctcctatttttgtgggcctcctttacctataaaaggagaactcccttaattcgtttttcagattcagaaaactaccgacaatggcagagcttctctctctagaaattggagctttgacactataataccatcttgtgagaaataaaaacttgaagtagatgttactccattactcttaccatataggaaatgaactacgataaaattgttgtttctatttttacttttacttaataaatatttcattctcgacaatctagcaagcgggtgtagcttagaagtttgtgtccaaatttctgagacaacagtaaaattacaataaagaaaaaaaaat

SEQ ID NO: 103419 - DNA, 691 bp, Cannabis sativa
atcagaaaaaccagctagacatttttctttttcaatccatttttgtttcaaagcactatgtttcttttgaaaaaatttcaaattaccaaaataatttgttttgcacaaattttgcatggtgaaaaatatttaggtcaaatatgccctttaataccacaaaaatgaaagattggaacaaaccttcttacccgagatcttatccgttttgaacttactggagactttgcttctgtagacgacatttttgttgcagcagcaggtaaattcgctggaacactagattttacaaattttgttttttcaaaacttttagtaccatttgatccaagaccagcaaagtctcatagacctgcattctgaacttcctcaaaaatagaagatccagggttaagcatttgaatatttttcttgaaattttgaagttccttctttaatagaataatttcttcatctttaaaaaaaaattagtctcaaattctttaattttcaattcaagagatttagtttgatgagacaattgtttatttatttttgacaatgatctattttcagaagtaacctgtatccacttttcatacataacgttgtaagacttagccagtgactcctcacagatgtcagattcattagaatcagagtcagaattttctttttcaatggtattattcaaacataccaatctttctttcac

SEQ ID NO: 103420 - DNA, 782 bp, Cannabis sativa
aaatgaagaagtagtaagatctgagtatatatttaattgggttggtatatttcttttccttaatattattaaataaaaaaattataaaaaaaaaccgcaaattagataaagtagaaaattaaaaggagattaagtcaccacacctatttttcttttaaatttatatgtagatataaatataaatagataaataaataaattagaaaacaacttaaaactaaatattaataattcaaaattaagtttattagtaacaaaagaaacttcttaaattaatacttttttagaaagttaaataattaaaattaataaaaaaatatactaatatataatcttcaatgcattagttatattgtataaattattaaaaaaatcaaaagatatcactaaaattaatataaatgtacgtaatttattacaaaataattaagataataaaaaattaaaactcgtgattgaaggagagaaatataataaaaatttaattattcattatgaaaatgtataaaaataacatttaagaaaaaattatattagctcttatatataatatttttttaggtttttttatatatacatgtatatatctctgttataatatatatatatatataaattttatggagagagataaaaatttatcattttaatatactttttaattaaaaaaataaatgaaaatcaaattaatatagatttttaaagtacgaagaattactaatactttgaatcgaaaaaatctattagagaagagcttgatacttaattatatatatatatat

SEQ ID NO: 103421 - DNA, 584 bp, Cannabis sativa
attctattatctttccacacatttagcaatgtgagactctctaacagagtgtaaaagggtttagtgacacgcatgaagggtcactaaaaactgtttttccaatcatcctcattagtaacgtgcaatgaagtgtcattatagagttttaaagtcacttaacataggttactaaaacttgtttttccagtagtgcttgcacaattatcacaatttttttttttacagaaacagtaaaacactaagagcttgctagactcaacttcttcacataataaaattctctctaaaaatttgaaaaaaaaaaattaaaaataataaacaagagagatgatcagaaaccaatgatataagaatgtctatatacaccctagagacattttagatagtagaaaagagaaaggaaacaatcaagaagtaagtgtaaaatattccttaaaatgatcgttcataacatgttctaataaatagtaaattcgttaaagtaaatttaatgaacctaaatattttttaaacgaagttttttaaaaataaataaaaatttcatttactacaacaatatccacacagttctagacagtacaaga

SEQ ID NO: 103422 - DNA, 641 bp, Cannabis sativa
aaataccattgctgagcggcttccgacagagtggcaggaaaaattctgcaacccacatctccacgtactccttgcaaatccaattgcatttcgaaatactttagatgggaaaggggatcttctctccccgtatacatcttccatgttggaattttaaaattgtggggcaatgccaagagattgatctcaagtgagaaaggagttctgcgtgctcggtccagctcgagatcattgtttctctgtcgaaccatgccatggaacatatttttcagtttgtctagctgcgcttgtacaactgggctaacctgcttggcatttttgtcaatttgaatcacgtcaacatctttctgagcgggaatttgagcacgggctccgagctacacgatcttcgtgacattcttatcgtctactcctctccttctgttcagatcattccttaggtcatgagtctccccctaccttttgtcgactacgattttcaatctctgtatgatgagcccttaacggctctatctctttgtctctccactcggtaaacatacgcctttgttcttcgaacgcaagatttaccgcagtgcagatttcttcctcatcatgatgtagggtattgttatgaccctgcatcagtccaagagcgtcac

SEQ ID NO: 103423 - DNA, 662 bp, Cannabis sativa
ataataattattaaatattaaaatatgtcagacttaatagttaaaaacattatattatttaacaccttcaagtgtctaatactatcctgatttgcgtgagaacaagagagaagaaagggaattttgtttgggttttttgaaattttgagtgaggcagagagatgtttagaacgatgggcttagggttttgttttaaacatatatgagttttaagtttcagtttataactgagactaaagaatatcttttagtctcagttattgtagaatcttagaatatgaaattagagaaaacagagtaaaagaacaatgaagcagaaaaacagagaagaggcaaagaatgtaaaaccagaactaattctttattgagtagagaagcttatttatacacaacctttaacatcattaacagaattagttaaaagatagaattgtcagaatacagttgaaaaacagttacaagattacctgtaattaacagcctaaacagactttattcaactatgttaacatcccccctcaaattaaatggtcctgaaaccattttttgtttggattttaagtatagaaacctatcagttgacaatgccttagttaaaacatctgcagcttgatcgaccgaaggcacttagcgaacaaagagttgtttgtctagaatttgat

SEQ ID NO: 103424 - DNA, 566 bp, Cannabis sativa
taatgtgaatcatttgcttttcatcataaaaacaagttcttcaattttaaatttttgactaattagaatctttactatttaaattttgacgtgtattaaattatgtttttaaaattttttaatggttaaaaaattctgatgaattattaagattgttgtatttaaaaatatttgtctagttcccttttcaaaaaataaaaatatttgtctagttctattcaactttgttaattatgtgattatttatatactaaattatgattctcaaattctgtcacattaaatatttttccaatcaaactcgtcgtccgattattagcatttatttggtctgattgctctacactctttacagcccacagtaaggagtaggacctcccttaccctatcaaactccattgcctcaacgttttttccaatttaggaattaagattaggcagtcactatttcaaagtcaaattaattaattactgataattccgtttcaatcaaatacaaacaaaactaatgaagaaaacagaaaaactatgattatatgcttattactatataacatgtaacagaa

SEQ ID NO: 103425 - DNA, 979 bp, Cannabis sativa
aaaatattctatttttagtatttttctctttatttccttcatgatatacaatatattatatcacatataaatgatatacatagagcaatatgaatataccaagtttaaactaatttactattaaattattatttttttctttccatgatgtataatagcatacaaaagtcatatatcacaagcctaaacagatataccatagtgaaaaaaaaaaaaaaaaaacttaaagttaatattccacaagttttttttttatttccttcatgatgcaccatagcacataagaacaatatactccaataaaatatatctatatcacaaacttaaaccattattctacaagttttttttttttttatttcattcattatataccatagtacataagaataatataccatagtgaaatataactataccacaaatatgctaatattaacaagtttttttcctatttcgttcattgtataccatagcaaataaaaataatatactacactcttaaattaatatactacttttaaagtttttttcttaatatattataaccccaaaaacaaatataaagtcactataccacacacttaaactaatattccattctttcaattttatttttttttcttttcttcattatataccatattacatacaaacttaaactaatattctatcaaaagtttttattttttttcttttcacaatatataccataggaaataaaatccatataccacaaacctaaatatatatatcatagtaaaacattaatataccacaaatttaccatagtcaaaaataaatataccaaaaacttaataaatttacgatatacctcttttaagtatttttttttttcttaatatatcataacacataataaagatgtattataatgcaaattaaatgtatcaaaaacttaaattaatatttcattcttgaactttttttttcattctttcattcaagatataccaca

SEQ ID NO: 103426 - DNA, 602 bp, Cannabis sativa
taagttttttattttttattttatctattaatcaaaaatagtcttatattatattttattaaaatatactcacttttttgagtaggttactcaatatattctcactctctattaaatttaacatataatttacattaacttaagggatctaatgaagacatatttataaaagtgggtatatcttaaagaatataaaaatagagataaaaattaaaacaaatcacataaagtggatatgcaatgtaattttctctaaaaaaaaataaaagtacttacaaaagcatgaactactttattcgtgaatcctttaacgagatgtaaagactcattattaagctgagaaattaacttttgcagtcctgagcaatacggtgcttgaacaatgcacatcttggacaaaactaagacacaaggttagttcttcaatttagtaatatacaattttaaaagggaacaaacttattttaggctcctagaccgactaggtgaaacttaaatacaagcctaactcacatatgcccaaaccgagtttactaacacagtctgattccaccttaattgaagcccattgtttctcttttaaatatatattttttttttaa

SEQ ID NO: 103427 - DNA, 747 bp, Cannabis sativa
ttagtaatttgtaaaagatgtgaaagctataaatatgtaattgtgtagctattatgggatagagattgaaaaaataaactttgttcaattgaaatttggcactgactcgaaaaatgtattttaagagatttgtccggtcaagaagaggactattatcacaattggtgcttttattgagaaattacagtgaaagattcactataagaactctcggccatggaagatgaaaagattgttcaactcttcaaagctatagagttgcgtatggagcagcgtttcgatgctcaaacgatggcaatgaaattgtatttcagagaacttctcgatgctcaattggagaaactagatgccaagtttaagagctatcttacatcaatagagacacttttggttcccacttcttcgacaccacctacttctctagaggtcgacaaccacattgatggtccacttgaattggagagagaggagaattcatcggtgattcctggagttgtgtacagtatcgatgatcttttcggcaaccatagatggcagtgaagctcatctctgtatcaatctaagtagattgaaatcaaatctcattcgttctacgacgaagaaggcaactcgtagctcaatgagagcaccaattgttagataaagtcctctttgagataggacaaattttctaaaatgcactcttcgagtcagtgctaaactctaattgaacaaagttctattttctcaatctctattccataatag

SEQ ID NO: 103428 - DNA, 520 bp, Cannabis sativa
ctccaaaaacttttaaatacacttcattctaattatttttattttacataaaatatatatcttttattatattaatttttttcttcgaattcatattcttcaaaactgtacatactaaataaaaataaattatattttaaatattataacaaaaaatattaaaataaaaaatcatatgaaatcttattagaattttttcaaaagcaaaatatacgcaatttaaaaaaattatagtgtgagaattttttccttagtttatctttgtcacattgtaattaaatactattgtctattctctagtaaagaagacatttattgtagatgagtgttgtgtttgatcgtcggagctttccatagatctaattgtttgattttgtgttgttctttgtattttggaccttttaggctttgtatcgtttaatgaattatttttgtatttaaaaagaattattttaattttttaaattaattcaattataagaattaaaaaaatttatttttttttttgaagagaatcatt

SEQ ID NO: 103429 - DNA, 672 bp, Cannabis sativa
tttctgatcctcaaatattaaagggttagacaaagaatttagcttaaactttttctatagtttccacttacaaaacttgttcatttacaattttattgtctttttgaattatggctctcttttttttcacattcttcactaccatttatgtaaagatcaaaactattgctaatttattaaaagaaaaaaaaataattttacaaaaatatcattttatctatgaagttattgttaaaaaaagtggaaattacctgtactatgagtttttattaaatgtttagatatatatggataaatttttattttaagtaagttatggtatttttctattttaaattattatgtgggttcttttttttccatttttttaactttttatttttttatatttttccagaaaaccattttctctcttacctctttgtcttcttctccaccattgttcctcttcacctctctgtcttctcctccatcttcacccctttaattcttaggcgaagcttcttctaaaactcatctccatcatcttcatcttcccccatcttcactcatttccttctcgggttggtgacaaccatgtgtgagtttcttcttgttgtgattggccactaatagagaaatagacatctttggctaacacattccaattgccccctaacggttttacctaac

SEQ ID NO: 103430 - DNA, 664 bp, Cannabis sativa
  modified_base (116)..(121): a, c, t, g, unknown or other
ccctctttgtaattgatcccatccctttattttttatttttttttaccacatgtaagcctagccaaatacagatttttccacaatataccctttgagcaccttattattctaagannnnnntttgttgtgtcatgaaggggatggaaggagaggaatttttgttgagtggtaattgggaaagtgttttcattgtgtcattttattattctcaccattggggataatgttgaattttaagttgggggagagttaccatattttgtgtacattgccattattatatttgtattgttagttattaaaaaaaaaaagagtgtctaaattaagtttggggtgtgccaccccttgcaaaaaaaaaggactttttttttagaagttggaagttccaagtgttatagcattgcttcagcattctggagcagagatgcagaaaaaaatgttatgctaaggcattgctataactcttgggaccacgtcattttggaaaattttggggcaataaataatgacaatattaatattcaaattttttgtgggatattctttgagtaagtaagtgtggggtctcattttggtcttagaaaaattaaggtgcttttaggtgatttgagccaaaaatgacttctcttaaccaccttcacctaagccttacattacaagctt

SEQ ID NO: 103431 - DNA, 583 bp, Cannabis sativa
taaaagaaaacacaatctcatcaaaacattaataaaacagataaatagtacaaaaattataaaaagatgaaacctcatttgatttatgttttttttttatataaatatgtagaagataaaaatatgagaaattagaatatgagatttaaaaaaaaaaatcacaaaatagataaattataaagtacgaattagaacatgtcacacatggccggccagagggtggggcagccggggccgaggtcccaggccccacaattttggaggccccaaaaaattaaaattaatattatatatataaaaataaaaatataatatatgtatatatataaattttggttcaacaattttcataaaaaagcttacagcacaattggtaagagagggatttattgttggttggttgatgatctttcttcaaaataaataaataaatcatatatttttaacaaataactaacaagagtagtataacttaaataaaaagcacatttattaattattatttaacttcttaaatttataaaaacttataacatatattaaaaaaaattaacataatttttgacatactattgattttttt

SEQ ID NO: 103432 - DNA, 685 bp, Cannabis sativa
tatctagtgcagtcttatacctttctttcctttacctttctgctagtctcttgtatattggtgacaatacttgtagttgtttgatgttatcaggcaagtccccacaaacaaaaatattaccttttaaaaaattaataggtcacctattggtaaatacttgcccacaaacaaaaataatatttttgttcgtggggactataaaaggcaatattcgtggggactattaatattggtaaccagagacggacctagtctcttgtatattggtggcaatacttgtctttgggtcacctattggtaacatagaaccttcatatgttgcaaaaatacttcttttgtgtagtagtatgagcaatattcatagcatttcatgtgtctttttgatattacagccattgcatgagaacatggcatttcatcatattgacatcgttgacacgtgcatgttcttttctggatatccataatgtaggatcttttcaattcttttagtgtgtatatgactagattggatgtttttacttgtgtaaatgtcaaagaggtaagcattagtataattttcttatgttttttttttgaagcaacagaatgggcataatctatatatataaataaaggaaagcacaatagaggtttaggtggcactctacattcattctatcactattttctttttttttttttt

SEQ ID NO: 103433 - DNA, 570 bp, Cannabis sativa
tatattgcacaatttttgtatctacatatatactataatacgatatatataatgtaaagacaaaacacttacttattactattattttatttttcaaactaaaaacttacttatcataatcatatacaaataattatataagcaatcatacaaaatatacattatatattatattgtgtaattgaattaattatagcacttacaaaatatacatgtatattaattaaagatttaaaaagttatttgagtagtaattaaatgtttggagtgtgtaaacatcataaagttaatttatgagcattgttattaagtaatagtgttgcctagaatcttcttaatattcgtgttgcgataaactagcgatactttccctaaaagttattatattaaattatatgaaacccgatactaattagttagaccaatagatactaattaacacatatgagggtgctaagcaccactgatgccctttagcatttttcttaattaatttatttagcgacataaacaggatgcgaggcgattggaggatggagcaccacaggttagtgtcccaagccccaagcc

SEQ ID NO: 103434 - DNA, 888 bp, Cannabis sativa
tatatatatataataattttatttttgaagttatcttagtatttaatgcatgtaagttataaaatatgatgaaatgtgtgcaacatgttaaaatataatttttcctaaaaaaaaatgaatgtaatgaaaaagacaaataagataaaacaagctctttttaattcttgtttggatgagtatttgggaggctaagtgcatgtttgacattataactaaaaattgttttttatttttaaaaataaaaaaattattttttaaaaaacaatttggcttgtttgtccttattttttaaagggattttttctattttaagctaaaattacttaaaataaacttttatagtactataatgaaaaataaacatttataggatttaatgtttactaaaatactatttttaaaatttcttatttacaaaaatacagtagagacaaagaaaaaaagaaaattgatagtgattaggcgagcaagtgaaagacacgctcgacttggaaaaagtgctcaaacaaattaatacatgcaagttattaatctgccacgtgtaaaattaattgacaagatctattatttaattttattggttttgacaaacactagagactacttctataaaaaagaattaattttataaaactgtacataaaaaatatattttatttaaattgagataaaatgtagtgtcagggacttttttttgtttttagaagattggtgtcaggaactttattcaccatagattttattaaatactttttattttataacatgcaaaaaataatattatattcaatctttgtttgataaattggattgaaattacttttcatgtatactattattactattatattattattttgataatatttttgtaggatgattataatt

SEQ ID NO: 103435 - DNA, 617 bp, Cannabis sativa
  modified_base (32)..(38): a, c, t, g, unknown or other
tgactactttattcaatggatgatgctttgannnnnnnctaaacgggacactgtatcagtctgttgaaaaacttggaaaataaaaatatatttcaatgttgggtatttttataaacatgtttgttatacttgttattttcttaatttgtgtatgaatttattgaaccaagtgatttacttctgtttattgatatttgtagtgccaaaataaataacccacaccccgacccactcgtagtcaatccctttgcaaatgaactctatagtgtgaaaatgcaacctggtagttgcattaactcgcacctgttgatgatgaatctgatgttccaaaaagcaaacctgcttggaattgaattatcaaaagaacaatgggttcagttcatacttaatagtcttcctccagagtataacggatttgttgtacttatatgatcaacaattttaacttttccgacatggataagctagaagcagaattgcgagctcatgaacgaaattctattgcaatgctgctccccggttttgcaaacttttgtcagaggaaaagaattaagaatgaagcttctaacaatgctgcttcttcaagtacaattgatagtcatactcttcaatgttca

SEQ ID NO: 103436 - DNA, 505 bp, Cannabis sativa
tctcatagttctactagttgttttcataagccttggtttaccagaacctttttcaagctgttggcctaacatttacatgaggattgaataaattttgtatgttattaacattaacatatgatatttcttttataggtagtggacctagctataacgtttccaatgtgaagagcaacattatgaagaaagcaaaattagattttctcaagtggtatgcctgtgtactctattttgttagataaattttgtgctgagctaaaacagagttatttgagtctcattcatttcgccaaattgatttctctcttctttggcttgatccaatatttacttcccaatacaaaaaagttttctttttcttggctttcatttctaatgctgtactgcattttcattatcgtatttcttgcgggaacattatttcaccatcaaactcattagatttcctttgatttttgggttttgactgttgaccttattcttttgaacagtaatgaggtgaaaa

SEQ ID NO: 103437 - DNA, 505 bp, Cannabis sativa
cctaccagttaaaaacgcactttgattggggctaataatcgagtgaaggaccgatttgagacgattagccaaaacttttgccacacatttgtacaaggtgttacagaggctaatgggacgaaaatctcttacagttttgggatttttcttctttgggataaggaccagaatcgtgttgttgataggagtgaggtcgccctgattgttaaggatatgtagaaggccctgacacagatcaggtccaatagtgtcccaatttttctgataaaaaaaagaatttaacccatcaggaccaggggacttgtcaccagataggctgaacatagcatctttaatctcatcagtggtgaaaacctcatcaaggtaatcgtattgggcaagagatagggtattagtaacaccttggagaatggatgatgttgcagaggaggaggtaccttgggaggaaaaaaggtcagtgtagaaagaaaggaactgggaaaaaatggtttgggagtcatgagtg

SEQ ID NO: 103438 - DNA, 691 bp, Cannabis sativa
aactttgaaaagtctaattctataattatatagaagaatgataaaaaaaagtggtttttgtgttattgtatagggatgattgttattgttgggcactagtggtgtctaacactttctataagtagcactttatgattgattagtgatattgtttaaaagttattttttaagttatataggaatcgagacttaattacactaataatagtatatcactaaggaagatattaagcaataataatgtcttttagccattttcattatacaaatttattatttattttttttttttttgaaaaggttatacaaatttattattatatcatattttttctcagtttttatcttattatacaagtttattattatatcatattacagtattatcatattataatattatgaacaattttattgctttgcttttttttttgtcctttcttttttctttaatgtattataaaggattagaaaatatatatatatattttttttgaaaaattgaaaaatataatttgctcattattttaattattttttcttattatatgttatatcattttatttatttcaatgtgaacaagttaagttttgttattttctcaaaaaaaaaaaaaagttaaattttgttattttatattacttttattattttatcaaaatttatatcaacttttatatctatatatat

SEQ ID NO: 103439 - DNA, 557 bp, Cannabis sativa
agaagtacagatgactataaagagaaataccaaaaatctcaatctcgggtcggagtgctgaagagtcaggtggaagagccaaagctgataaatcacgacttagagaggaagatcaatgccgcttcacaagaagtagatcgattgatgagaaaatcatcaaaattcataccccggagaagagtaatgagcatctgaccagtcttcgaaatcttgtggtggatgccaaaattgatcttaaaaacaagatggctatagtggaatctaacttttcagtcaagctttcttaagtggagcacgatctaaaagagttgagagcaaggtgaaggcggagctggaagcccagctaaaacttggggaagagaagaggtaggtggaagaggagctgattgaaaccaaagaggaactagctaagaccaaggctaaaagagttgaagaattatctcatgcccttataactactctccatctactttggtaaagggatatcccaattttgtggagattcttgggttagaaaaggaaaaatatctccttaagatcctagagatcgagaggtt

SEQ ID NO: 103440 - DNA, 740 bp, Cannabis sativa
agcgagatgactgtctcgctatacgtaacctgaggttgccatgtgtgattgtatttattctacttcaaatagatgaatatctacttagacagtgtactccgaggcaagcagtgtctcgtcaatacaattttttataaccttttatccttatctcacttaagattatatagtcaccgaattatgaatattttctattaaacatttgttaacgagttattttatcttgcatttaatgatataactttattatattaggtggttcatatttcactacaagacacgtgtcactttctgaagtgtagtcgaatttcgggtataacactacttaaaaaagcaatcaattgagttgcttaaatttgtagagcctttctgtggaagggaaaaaaagattacttggtctgaaatatgtaaaccgaaaataagaaggaggccttaatttcaaagaagctttatggaattgtgctcctatagggaagtatgtgtgggccattacttctaaaaaagataatttatgggtgaaatagttgaatgagttttacataaaagatgagaattggtgagattatgattgcccatcaaatagtaattggtattggaaaatgaattgtccaaaccaaaaaaattatgaagagtaaaatgaaccaaaagagcttaatgaataagaattactctattgctgatatgcatgatttctttagatcagacaaaaagaaaatttggagtaattattttatctggga

SEQ ID NO: 103441 - DNA, 612 bp, Cannabis sativa
ttagggcacaaaacccaacatgagtttcttcaagtatttttagaaataaagagcagccatcataaactattgataaaatggtccaaaaaaataatctgatccccaaataaaacttatattctggtcgtttaacatttggtttaggctgccaagtcctgtggatccgtgtttattttctcctagttttcaaccatttcatgatcatggtatattggaaggggtggttatgaaacacacaactatacctccacagcaactttcctgatcattatctaaaaagcttttgatttgaatctgcccttgcaaagattactatgaaaaagtttggtatcttgccgggactaacactaaggataattaattattattattataattattataattattattgtagaaactaactagatccttttgtacctgttttccgggtttctactttttagttgaagaagctcatggccaaaaaaatatttacatagctattttaagttaacattcctattatagcctctattttgatttatagtttcagctcttttattgacgtaatacttttaactttttgtgttgctttttttttttttatttaatttaagcgtttatatatta

SEQ ID NO: 103442 - DNA, 607 bp, Cannabis sativa
atagtagaagctagagttcttcttcccactgattatctctaatagcagcatcccatagctaatatttatttcagtatttcaatgagacagcaatgacattgcaagtccacttaagttggtaatatttaacttccatccatcctgagaataatcttataaatcctatacgattggaataaggcctgtaatggttccacaatttcatgaacacttctttaaacttacatttccaaagacaaagatgataagaatcaaagcttacccaaatactggtagaatctattcattgtacaattactttgtaaataaataaaataaaaatgaagatggctctaattcatttaatcatctcatcacttgtaaagcaacaaaaaaccttctctggacatcaccttccacccaccttcaaagcaatgcttaacaaaattatcaataccaatgtctagtgatcattgaattacaatataaaatactaagttgagaaaaacatattgaaatgaaatgtttgttatcatataactgaagaagaaccacaaatattgagttgatgttttgaacaaccacaaatgacaagatttaccagtgctcactcaatattcttgtagca

SEQ ID NO: 103443 - DNA, 529 bp, Cannabis sativa
tacaaatattaggtacttataccgttaaaaataaatatttaatttatgacgcttacaaacttaaaattttaggtacttatgtccctatttaccttaatattatctatagtgtgagttttatcacttttattgaacttatttttatggaaatttatagtgttctactaataatagtaagcacagtaaattacgataaattatttttttttttaatttttaatttttaataattaaaaatgcttttaagaaaaaaaaaataattatatgtattaaaatatttttattatattaataaaataatattataataaacaatataattttttggtgtaaattttagtattgtagatgaaattatagaaaaatttatctttttggtgttaatttaacaccaatttaaattttgccattggccttagttcccttatctctattttggtgggagcgaaagccaagtgagacagaagacagagagaaataagatagcttgttactttcgtaattaagtcgggaggccaattccaccaca

SEQ ID NO: 103444 - DNA, 529 bp, Cannabis sativa
aaaaaaaaagagagaatcattcatgagaaaaaaaaaaaaaaatgtattattaattaataatatatcctcacttttctctttactaattcataactacccaccactcacatctccactatcatgtatcgtaaaaatgagtttataaaggaagaaaaaaattcagactgagaaagaaaagagagagaagagaactctactaaaatttacagaaaaatagtacgatatattttaatcttcaaaattcttaaggggtaagtattagagttctcatttatcttcttctctactctcataaattttcttattttttttctatgggccactttgatctaggctttttaagctacacaagatcttcaaaagtgagatataaccaaagaaaaaataaaagaatttaatgtcttcatgttgttatgttgtccaatttttcataaatttttgtgtttctctttgatttcctaagcttcagaaaataagtcaatatgagagtgcataatcaaagagaaagatagaaatcttaaccaaaaaa

SEQ ID NO: 103445 - DNA, 767 bp, Cannabis sativa
ttaatagaatttatattttaaacatataatcatgaaagtaataatgtgaaccatacaacataaaataatttctgatcttttattaattagtaaatctgattatattaaaatacgttttatttagggcttaaaatcctaacatgaacatcagagacctgtaggtttgctacaacctttgacccttcctaaatagaaatggaaaatgttgctatggattttgaggtgggattgcctagaaacaaaggattgtatgattcgatatgggtgattgtagactgttttaccaagttagcacacgtttcaccagtggagacaacctatacagtgtatccgtatgtagaattgtatgtaaaagaagtagttaatctccatggagttctaaagtcagttgtatcagatagagatcccaaatttacttataagttttgcaagagtttttaaaaagtcatgggtacaaagctaaaattaattacaacttttcatcctcagatcgatggccagtctgagaggataatacgaatgttgtatgatatgttacgagcttatgttatgcactttgaaggttcctagagcaagtatctgccattgatagaattctcctttaataatagttacaagctactgtagggatggctccgtatgagatgttgtatggcaagatatgttgttctccgattcattgggatgaaactagagaaaggaaatatctaggtctagagacagtatagaggagcaatgatgctgttgaaaagatcaaggctcaaatt

SEQ ID NO: 103446 - DNA, 511 bp, Cannabis sativa
tattattattatttatttattataccacatggtgtcctttctaatttcttcatcacttcttaactttgtgaaggggagttaattaactcaactcttgttattatcttttaggagttaattatgtattattataaatctcaaaaatatatataatactcattattttggtttcaaatcattaattaaaataaattgtattactcaatcctctattcttgctataataattcttttgcattatggcttttactacactactacgtaaagagtttaaactacaaacctttaaattgactttaaaaggattgcgaacttctaaatcagtttctaaatgagtttgagctcatcaaaaaaccctaacaaacgcctataaaaccttaacgaacatccaaccgtcttaaccacaaaaaaaaaaacccttcatgtgacagtcagtagtcctgtgatccgtaaggagaaataccgggtaagctgtacaatctcacaccgcctggggaaggtcaagtgggat

SEQ ID NO: 103447 - DNA, 739 bp, Cannabis sativa
ccttgaacacctcaccgtcgacacttaagagaaaataaaactattaagtacacgaaaatggactaacaccacattcccttcaaaaaaagatttttttttaaatacccacagtaaaaagcgaaatgtatgaaaagtagaactggagaaacttacttctacaacccaccgtcgacacccgcgactgtaaaaccccaaaaatggcagaagacaagtaatctacaccacagtgaagaacaaaacgtatgaaaagtgaagaaaatgtaaaatatgagttttacctaagctgaaaagaaaatggaaaatggaaaatggaaaaagaacatggaaaataaaaaagaaaatagaaaatgaaaaggagggttttgccctaagaagaaacgaaaatggagaatggaaaataaaaaagaaagaaagtgaagaatgaagtagaagagtggaggacggttgatatgactgatggaggtcagtttcaactttttcaaatttaataaattttaaattcaaaaacataactggttaccatttttttatcctaattacccatagatcaaccccaacccttagatcaaataaccaccccatccaacggctgtcgtacatcacggaagaaatccccctaaagtacactaacgggacaaaatcttgtcccatattatgtaagttatatatatatttataaaaaatagaaagttcaaactactatatttttttatggtggttgatttgaactttaaattca

SEQ ID NO: 103448 - DNA, 537 bp, Cannabis sativa
aatacagtatatgccatagatggcatattatatagtaaaatattattgtccctttaaaaaatctaaagtgagggggagaaacataatatacgaatatgatataatatattaagatattagataacatctccatgtagtcgattcagagatgcaagatagaatatatgtctttaagccattattaagagcgacaaaaaccatattcaatcatacataacaccattcaattctaaagatatatatcaatacacataacactaaaataaattgtggacatatcatataagaaaaatatgccattgatatttaagccccaaaaaaaattgcagtggctaaattagtcaaacaaaaaacaaaactctaattatcaaaattcccaaattttatgaataaaatcatcagatctttaattaatttagcaaaaggtggctctgataccacttgttagaattcataaaacactttagaaatatatatatcacagatctaaacatattcctaaaagtgttttaatatagaaaatcctaaatcaaaaat

SEQ ID NO: 103449 - DNA, 536 bp, Cannabis sativa
ggctggccagacctcaacctacagaacttgcatggtcggccataccatatcttgcagtgcatggctgaccagacctcccctgtagatgtatgagcggccaagattgacctggcacgactctatgtacagactgatacatggacaataattacctgtgaattgagcccttaacagcccagccaattgatggaaaacatctactttctaggagcaatttagtcttttgtatttaatcaatttaatatgtaaatatctattaattttagttgtaaattagggtttaggctttcatatataaaggccttaacactaacctaaaaaggttaagtctaattctagcctccaaatcactcaaactctgaaaccctaatctctcttctctatatctctcttgtacatgtctaaagggatactttcttcctctctcacacacctctaaagctatacctctctctcattagagatctgcctacttgatccatgctttgtcaccttatagagagctctatcaaatcccacttatagtgatctgaata

SEQ ID NO: 103450 - DNA, 635 bp, Cannabis sativa
caaggatcatagtcacttgagtcctctcgtcaattatagcctcatgtgtctctgcctcatacattagcttaatcatgtccaatacatgagatcaaaaaagggacacatttcttcattttacaattcatgtagctacgagtagcatcatgtcttgttagaatagattgctgcccaaacatggcttgtagagaattcattatttgagatgcattctccatatgttcacgcgtcttacgcagaacatcgtccatgcttacaagcatgaaatatttggccttatttttggattgaatccaagcatcatatttgttccgaatattttttagggcattggcagcgggctccttaggacgctccacagttaggacaaatttgtaattctcacaaaccagcattaaattcacatttgatctccatttataaaagctatcaccattcagcttttcaagtgctagtaaagtagtaaggggattgggcatagtagacatgaatgaaataaacaaagtaacataatgattatgcatgaataataaatattattttagaattacagcaaacatgatgcatgagcgcatacaagtaaaactaggagtgttcatcaaaccgctcaaaccgcctgcaccgcaaaaaaaatg

SEQ ID NO: 103451 - DNA, 574 bp, Cannabis sativa
ctcatatcaaacactcatttttacccttctctttacttttctttctactttttctatgttaacttttctttcctcccattttttcatcttaccaaacatagggtactaaaattaatgaattttgatggtgacaaacaaaataaagatcatggtgtggtaaatttggaaggaatgattcttctaggacattataaaattttatagttttgttaagtgaaaaatgaatttgatctgaagtaatatttatgaaatctcatggtcgccagaattccatgagcaaagacactgagcaaaatgcaaggaagaacattctgtattaagcataataataggccataagaatatttttaatggagtgcaataaaggtagtgcatatgtgtatatgtattgtttagtttatttttataaattcaactttaatggtggtgtatacgtgggtaaaatttgatagatgctaaaagttttgttaaatttggcttaaaatataacataggctaaatttacactataataatgttgatcccaaatatttcggttgagggctcgaggcccaagaagggaacagcccaatcc

SEQ ID NO: 103452 - DNA, 618 bp, Cannabis sativa
actctcccattcttcattatattttaaatcggctctctatataattattttttgtacatttttttctcaaaaagatacacataacacccacatatcttttatttttattataggagattttaatatacaatcatgacttgccatcatatatttttattatgtatttattttaaattcttattgtataaagtttggatcatgtggtcaatctattttaatatacaacaccaaacatgctcttagtaatgtttttttttttttttactttgtgactaataattttacttttttgttcagaaaaataataaagaactttaactttggcaagatgaatttagttttttatttttttcctcaaacattaagattctttttattaattatttactattttttctttatttgttttttttgggaattagcccataacttcttttaaaatttacgatttgggttgctccagtaatttctatgtggattgctatatgaattttgggttctcaattaattgctatagtggaatccgtgtggaatttcataaaaatacaaaaaaaaaatatttcaaagtgtaaaaatgaaaaaacacttttttttttgctacaaatttcatttataaac

SEQ ID NO: 103453 - DNA, 723 bp, Cannabis sativa
tatcatacttattaattaccagattgtatatatcaaaacttaactttcaagatcttgttcacagattgtatcttcccaatataaaaaaagagtaattaagtatcaagcatttaatttctttattatctattctcaagaaactaaactcccacaataaacaaactccacacacccgtaaaaatgacaccaaacatatgtttggttttacattatcattcccaagaaattaaacccccacaataaacaaacacgttataactagatatattttattgagcattgttattaggcaccttaagtgtccaacatcatatcgatgtgatatattatgagtagttaacgatatcttatattaattattaaattaaaacatgtgaaacttaatatacaatctaagatgtttgtagtgcttggtaacttaagatgtctcttccttaatatttctctcttttttctaatagaaagtttttattagagtatctctaattattctctctaaatacttttaacttaaaatagggaaattgtctttaaaaatagctctaactataagaaaaggaaaaaaataagccactaaattacaatgaggaatggatatagttaagtatcaaattattatctacgtatttttttattagtaaatttaaattaatttctaaataaagaataaaaatttaataatctggaccaattaaggactgtcacgtgactattaacttgaca

SEQ ID NO: 103454 - DNA, 522 bp, Cannabis sativa
  modified_base (32)..(63): a, c, t, g, unknown or other
tttagaaagttcttatttaggatgttaataannnnnnnnnnnnnnnnnnnnnnnnnnnnnnnnaaataatttccaacagtttttacctcgagacactattgtttttcaccaggttacctaaacctcgaaattatgacttcacaagtccaaaaatccaagacttctcaatatcccacagttacattcgaggccgaacttattgaatcaaaggttaggtccagagcagcatatgttggtgatgcattaagatcatgtggcatcaaatacgagaaaggatatcgtgttaaatttgttgctccaggagaatttagttgtttttcccgtgataaaataatcagagagagggttgtagtaccagtggctcatctagaataggcgcttggagccttcagcacatcagagctggggcagtactccctctgagatattattacaaggagatctataattatctcgtaattatcccttttcagttaattctaagttcttataagattttggcctgtttaaaggtcttatatc

SEQ ID NO: 103455 - DNA, 515 bp, Cannabis sativa
aggctgcaaacagcccatacgcgcgcgcaaaggagcttgctgcagggtgtctgaccaagtaatctcggtcacttgcagcatcagcgtgcggcccatcgtgtttgaaggctgggcatgacacggtttcaaaaaaattttgtcccctatacacgtgcactaatggtgtcttgtgcgaagttctgcgtgcgtgcgtgcaccaagcttcaacacctatggcatccaattttcaaacctccataactttctcaatttttatcgaaatccagttctgtgaaaaccaaaatttcttaatttttcacaaggaatctaaataaaatattttcagaacaaaaataaaattatttcatcgagaaatttcgtaaatcatatacattcatcaaagaacacataaaccaacatgaacacatccaaatcaacgcacaaacaatattcgttgttttaaatccatatttcatgaaagtaaatcattaacctggctctgaggccatttgttgggaatattttaccagaatcta

SEQ ID NO: 103456 - DNA, 548 bp, Cannabis sativa
acattgttcagaaaagaaaccatcttgcgacaatcgtgtactaacataccaaattgatatggcatatgaacctccccattaatagcttcaacaactactaaggagtcagtttctattgagaggctatgtttttttatccagttagagcttccttgaccccaataacttcaacaatttctggagtcaccacaccaactttactaattgacacagctacaactagttgagcattctaatcctgaatgactattcccacaccaaaatgattgtcagcttcaaaaatggctccatcaatattgatcttgtatttataaacaaccggctttctcgaatgctttatgtcattactgtaattcacattaagtaatggatctgatctttgattttgagcatttctccaacttacaagattagttctagccaacttaactacatcaaaagctttaatacttttattgttatcatcacgggccatccatatacgccaagcaaccattcctgcttcttcccccactcctatctgtttttttgtcaataaatctccaaac

SEQ ID NO: 103457 - DNA, 881 bp, Cannabis sativa
  modified_base (602)..(607): a, c, t, g, unknown or other
attaataaattagtggcctctaacctagttcactagattttattttatttattaatatatcttgtttttttttataaaagattaatatatttttcttttagaaaaatattccatgagagggttgcgataacaaaactaaaagtcacaattacttacatatatttgtcgaaaaaataagataggactagggttgtattgataaagtcaaaaattcgcctaacacacttattaccctaagggggcgtttggtacgaggtgttcaaaataatttgattataggaaatattattaaggagaatatgattatagggaaatgtgtaaactgtgtttggctgtgtaggatagtatgtaattatattcttattaattaaattacactgtttgattgagtacatgaatcttatatattattttaaaaaaataaaataaaagtatgagaaaattaaataaaggtaaccaggtacccttaggggctgtttggaaatgagttaatgctagcaagagaatagtaattaatgtaaaatattaccttgtttgtttggagggtttagtcttggaatgttattcccccaagtaatataactacccttgaggagggtaannnnnntaccttaaaaaaaggtaggattgaattattatcttccattatcttcatttgaatagcatttttgaattgcctttttgaattaataaataaattttaatactaataatattatcatttattataataaaatattttgatatatatatatatatatttagtctgtgaaatcgttttctattaattgagttatttttgtattattagcaataccatatatatatattatatattaattttatgcggattggtgtatataaatgatagtgaacaaaaa

SEQ ID NO: 103458 - DNA, 520 bp, Cannabis sativa
atttatagaatatgaaccctagagacaaccacaaaaactattttctagatgtacaaaattttctttaaaaaatcccgattcgcagtatcaaaatcggtctctacagcagcagattcggatcagagagaaaactttctaaattagaccatgatcacgaatttggacttcaaatctaccaaatacaatttgtttaatcttatcttatcaaggaaaaatcaaaaacataaataagaaaaggaaaattcaagattcctaaatataggtatctttccaaatagagaatttcttctcttgcaagaaaagtatctcaaataaatacaaccagctgaaaatagaactttccataacataaatggagcaattaggacacgaatttatcacaataaaatcaatttaattgctcaatataaataaaaattaattagtaaatattttgtcaactaatttattaaaaaaaagactttacaactttaattttcataattcttaaaaaagtaattcaaaacttaaataataagaa

SEQ ID NO: 103459 - DNA, 683 bp, Cannabis sativa
agatcgctaggtttcaggttaaaattcgaagaaaatgagtaaggggaggtaaaggtttcgttggagaacgaaagtttgttcattttcttttctttctgtaagttttatatataacttaacttatatatatataaacgttaataataatataatatattaataataataataataacaatatattattattattattattatatattaataataatttttattaatgattatcctatcgtttcttagccactaagaatttccacttctgaggcattaaactaaattccacacactcttgattgttccaatatcaacattatcaacttatcacaatattcccattaattctatcaattaaatttgttatgacatttctagcccccgatcgagtctctaaggtcgccgaacctgaaaatatttttattccacatataactcatattgcattcacacatactatataaatctccgatatttataaattacacttatttactcacttatagcaaatttaaaatttatattgaactagattagtaagatcataatctcacttattacctacttatcctaaaatataaatataaaccctaattatttaccattaggcttatcgggatatcacaatcatcccatccttataagaattttgtcctcgaaatttacctgaataacttgggata

SEQ ID NO: 103460 - DNA, 690 bp, Cannabis sativa
aatcacaattttgaagttatcgactccaaatttcactcccaagttagttgcaaatgtaagttatagcttactcgaagggagtcccacagacgtgacttaagatccaaaaattggcgatcaatctccaaagtaatttttcatattatatcattatctttggtcaaaaatagcctaaatatattttttttttcatattttttagattgttttattacaatttaataggacctcctttccctataaagaagaattccacaagttcatttctttaagttcaaaaaagtagccataaggttagagcatttctctttagtttctctctctagaaattagagtatcgagacttagttttttataatcaatctcgtgagaaataaaactcgaagtagacgtagctctattactgtcgcgatacagggagtgaactattataaattccttttgtctctcatatatatatttaacttataattcattctcgccaatctagcgaacgggtgtggctcagagatctttgtccaaatttttgcgttaacaatttagtgctttcattgagagccacaactcaaggaagtcactaacaagatggttgtaacacgctcctcaagtattgaaacaagatccacaataattgaccagcaaactaggtgtaacgccctaaataattaggcacgctacccaaaatgctta

SEQ ID NO: 103461 - DNA, 569 bp, Cannabis sativa
  modified_base (132)..(142): a, c, t, g, unknown or other
atatttacatatgttctggacttaatagaatttatacattaaacataattatgaaataaatcatgtgaatcatgcaacataaaagtgatttgtggtcttttattaattggtaaatctgattatattgaaatnnnnnnnnnnnagggcacaaaacccaacactttcagaaattactcatgctcagactgaacttctcaataccaagattgatgtatatgatcagtggatttctaagaatcaccgacgtttgatttttagttctacaactgacttgaatagaatgtatttttattttggaaggtaacaatccttttacttttggggttgatctgaattgtcctcgcccaagctctgctcaacctgaaattgatgtccaagcgagcttagctgcttctagtgctttagcttgttcatcggtctcctctggtccccaagcttcaatttcttcccttctacatatccctccttaagcaaaaggttcttgacataaaaagtggaaacagtctgagaaagatcatctcgctccagagggcaataattctaagaccctattctctctctctctctct

SEQ ID NO: 103462 - DNA, 799 bp, Cannabis sativa
  modified_base (430)..(433): a, c, t, g, unknown or other
tctctctctctctctctctaatatctattaaaaattatcaacataactaaaataaatcccccatattcagcatataaccccacaaaagataaatgaaaagggagagggttttccaacaaaagacccttttgcccctaaataaataaattatttaaaactttccaagggcaatttagtcattactacttccgacaaaaccctactaactcaaatgcctaccaaagataccctgctaaaaaacattctacatcatgcacgtgactctctaaaagcccaacgtcgctttccacagcttccgaacacaaacacagaaattgaaaaatttacataaatagcataataaacatatacgaacttaaataaattcccataatatgtatttttataaatactaacaaaatctcttacataaatcctaattatttaatannnnaaggtattaatcatatgcggtctttacatatatgatcccagaagctttgatacttaagccgacatggagacttcgctcaaagaagaggtggttaagttagtttttttctaactaacttaacaacctcgtttcttgcagccactgactttaggatcttgatcctaagcctataaataccaccttcacttatcatttaacaacagactgaatacatgagtttgagaactctgttaaagtaagattgagagtttaagagagaaaagattgagaggtagtgagaaagatgcaaagaaaagagagagattgggttaggattttgtaagaagaatcttctgtagatgaagaagattcttgggtgtgagagtt

SEQ ID NO: 103463 - DNA, 746 bp, Cannabis sativa
gtgttagttagtggaatatgaactacttggtatcataaagttgtaccattgaacgcaaagagaaataactcattaaatatagaattaatagagtatattcataattcgctgattgtattgtcttaagcgagacaaggatataaaactattaatacctatattgacgagacaccaatctacctcagaatacacatatccaaggacaagattcgtttattttaaaaagaaaaagtgaaattactcaaggcaacctccgacaatatatagcgaagcattcaccttgctattcataagaaatattgacgaggtgaatcagttgttaaatatttagcgtatttttcacattacaataactaagtgtaacaacttagaaatatgcaggacactattgtccagtctgcgaggccttatggtcaaagagcagttcttgagtttgctcagtacactggtgctcatgtcgttgctggaaggcatatgattctccaaatcaccattgaccttctgacaagttaagcgagatgatattgtccaaatcagcatctaccatctttgaagataagaatgataagcagttatgcgattatcaattgttatccacacgtgtttaaatgaaacgtgatcaattctcacgtttcataaaacggttatgtattttgaatttaaatgtaaaaaattgcaaacctatatttctataaatagggatagatcccacagaaaaatccttgggagaaatactatcaattgta

SEQ ID NO: 103464 - DNA, 569 bp, Cannabis sativa
  modified_base (163)..(167): a, c, t, g, unknown or other
ttgtaaatttgagatgttggatttgcttatgcaaaactaaaaatgtgtatgaaactgaaaaaaatttgtgtggcatcgatctggttataattgccaaattttttttatttttttcaaaaaaaaaatttgcttcagtttatgaccgaagcaaaaaataattagnnnnngtgcactaattttttgcttcagttatgaaacgaagctattttttttgttttgaaccgaagcaaataattaattagtgtcggttcataactgaagcaaaaaagatcactatttgtgtctacggttataacgtcggggacaccaaccgaagcaaattctttatatgtcacttaaaaatgaaagcaaaaagtcttttttgtagtagtgggcgtccagtgaagaggtaggacctgtggaggagcaggcatgccttcaaaaatgaaagtctcaagctggagtggtcgaggtctcaggagtgatcgagcattcttaaatctcccactgttagttaaattatataagtcttctttgctttttgttatggagtccaggttatgtaggggtgctattgacaatattacagt

SEQ ID NO: 103465 - DNA, 578 bp, Cannabis sativa
tatggtgtgtggtctaggttaattttaaagactcgtggcacatgcaaacctacttgtaatttgcaagccatttattaatggttttgtactctgtttatggatgctcgattttcataggtgatgatatactaagtctctgtaatttttaaggccacttgaggctagctcaagcggttagggaaatgaatcaaatcccattgtattttaagataaaaaggcctgtaatgtttttttcccccttaatttagctcatgtcaagagactttggcttctttgttgtgaatcattgtaggaacttggaagagctgtctaggattattttttatttcaagtaaagaactttgatgagagacaaaggcagtggtcttatagatctgaagtttcaccaccttatttatttagaatatagaggattagatggttttggacattatcttatggaaaaagaatagggaatccaagaggtttgctatctttgccaaaatgccatacaatatttgttgtatactttgttttcgtgccaacttgtataattgaaccatcggtttactccagcagtcattcaatttgattctttg

SEQ ID NO: 103466 - DNA, 877 bp, Cannabis sativa
atattgatattgatattgatattgatattgatattgatgattgatattgatattgatagggtcgacataaattatgaagaaagaaaatggaaagattttccctatttttataaggaagcttccctttcttaatttacttacttataattttattaattaaattaataataaaaagataaataacccttaaaaatttaagtaattatattttttttcaatagcatcaatttagtcaaattaaagcattttaattacttattctaattatgtaaataaaataaaatattattaattttatttttaatcaatttagtaaacaacataataaaatattacttttaattattttatattttaaactcatttattaaagtgaactaactagtagaatttgcaagatttttattaggggtattcaaggtgtgggcaatatagcttttgactattttttcaaaccaaactgtaaatgcggtttttataattcttcaaacagcaaccgcactgcaagtccttcaaatcgtagaaaccacaccacaaaaatgcaatggagtttacatgatcgccattatcattaaaatttaaaaattaattaaataaagctttaacaataaaaaaaatcttattaaacttttaacgtcataacatatacactaatcaagtcattgtattgaattatctcaaaaaaaattatataatgaatatatatatatatcaaaaacactatgttaatagtatgtatattacataaggaataagaataattgatatggatgttcccttaaatttaattgtatgacttgaattttgtaaacatatgagtttttcatatatgaaaaaagacattatttcacatgtacacaacaataacaaaaaaaaa

SEQ ID NO: 103467 - DNA, 669 bp, Cannabis sativa
ttaattcaaattagataaatatttgaatttaaaaagtggtgaagatattttaaagttgttgagagattccctcgtaaatattagtaaccaaattcgattatagatatttatttattaaaataataaaatacaatttaattaaggattttaagagaaatcaaactaacactttgtcgtagtatttttaaaatacagagaaaaagaacacaattattttctctcaactgttcttgctcatgtgttgaaaactcaacaagaacaactctatatactttatcataatagcccacactattctttgtgtgtggtggaacaatttggaagacactagtgtgagttccaattgcatcattctcatcacctggattaagagacacaacatacaagaagtttcaagtataccctaatagtcacaagaggtatttattctaaacttactatatattattttaatttaatatacacacatctgaagatctgcaaaacctttttgttgtgtatctgatttagtaccacaaaactagcagttttcttatatcgacaatagaaaaataacacttcgtatttttatgaaaaaaaaattaaaatccataaaaatataaaagaaaatgtagatttgtaaaaatataaattgttcatttttgatatttatgaaataattccaaatgt

SEQ ID NO: 103468 - DNA, 746 bp, Cannabis sativa
gattacatttaaagaggaataactcactaaaaacataattgacagagtgtgtttataattcggatgactaaatagtcttttgcgagataaagatatacaaactgtcgccttgtgcacgagaaaccatgaaacttcaggtgtatatgacgaggcactaacctcattacgtgaaggggatataacgacggtgaaaacacttagcgtataatttacaatatacaaactaagtataacggacaggtgaaccgaagcaactgatagcgaggcgtccacctcgccacaggaagacatgctcatggtaaagatcacctcgtcactaaaagatgcgattgttaaagagggtgttaggtttctagagtaaaagcgattagatttgcattattaaccttggaaagaaatatgacaagctccaactcgctatcaaggttacctctgctctattcccagcgacacattccaaaataatacggtttacaacgtatttaatacacatttattttgacccagtaaaaacaggatattaatagttgtctgatattcaaatagtaacttcatttatttaacgcgatatgtaatcagaccccatgatttcaagggataatcgttgtaaaaatatcagtcaaactgcctacaatgttattataaatagaggcaggacagtctgaagaaaaaaaaaagaaaaaaagaaaagcataaggaaaaaggccctaaaaaactatcagaaataagattgactcatggactat

SEQ ID NO: 103469 - DNA, 1011 bp, Cannabis sativa
tatattaatttagtaaaattagttactagttagttacaaattatatttagtatactatggttagtgactaactagtaatttagtaggctctgcgatatattgtattgtggtcggatcgattggtggaataatgtgcatgttagatgagtttgaatatcttaaatattcattcgtagtgaagtaagttctacgaatacatgtactgcggtcggatggatggtaaatttttgtattgctacatgttgttgtgattgttttatattattttaaattatattttgttgttattaagagctttaaattttttgaaaacgttcaattatagctgttattctactgaaattttagtagaattaggtatacttttttatcctacttttataagaattaacaaatacatctattgattctaatacttaacataagagttctattaatttattttaagtaaaacaacaaattaaaatattgtacaatatttattattcaaaatattaattattatacaaaacataacttaaagaattataaaaatgatactaatatactagcaaaatacaaacccatattataaaatttaaatgtataaaaatattaaattacatataattaaattaaaatattacatattatttattattcattatactaattattatacaaaacataacttaaaaaatcataaaagtgatactaaaataaaatacaaacatgtacatattctaaaatttaaatattaataaaaaaatagtttatatagagtaatgtaaatgtgtatttatttaactatttaatttaattttaatttatacttattatatataatttatacttactttaattatattaataataaaataatatatacatgaaaaaataaaattagatttttaataaaaaaaataatattaaaacataaaattttaaagctggaaaaaaattataggaagcccctatggagtcagttatttaataggaagcccctacggagtcggttattatgaaataacc

SEQ ID NO: 103470 - DNA, 523 bp, Cannabis sativa
tagaaagaagagataagtggagaaagagtaccttttaatctcatcgcgtatactttagcaacaagtttatacaaaaccttgcaaatgctaataggacgatgctcctttactagcgatggctttgtaactttcagaatcaacaccacattcaaaatagctagccaaaccgatgtaacccatggcctaataatttcccaatactactagaaaaatggcatgaaacccatccaaacctagtgctttcgtggccccaatggcattgaccgttcaatgtacttcctccaccgtaagtggcgccaccaaaaaatcctttttagcccttgaaattttgctctcaatgccaccaatacctgccttcacttgttgaagagtcgaacacaaagatttaaaggtagttccaaagtatctcctaatctctccaacaatatcctcctcagtactcaactcttggccatccttagtcataatctcaaaaattgtattctttttcttcctacctgaagctttattatgaaaaaattta

SEQ ID NO: 103471 - DNA, 552 bp, Cannabis sativa
tgtcataatttgactccttaattttagaaataataaaaaaaaaaatataccataatttgaccaagatttaaaaataacattcattaaaattaaaactaaacagaaataaataaaaacataattgatgaaaaagaagaaaaaaaaaataaaataaattaagccacaagaatttttttgacataaataatctctttaaatacaatagcttgatttttttttaatctaattatgagtggtgatgaatgttgctaagcaacaccttaattaattaataaaaaaatttcttcaacaaaagaaaaaggagaaaatgttaatcgaatggtcctatttttgttttttttttttttttttgagaaaagtctgatattataaattaggtagagtcatttacaacaacaaagagaataacagtgggaattttctcatgccagatacaaacattatcctgcactaaagcttattttactaatctatgagctgcctgattaacagttcgtttaacgtgaacacaaacttgagaaatattgaataaatgtcgtttaatatttatga

SEQ ID NO: 103472 - DNA, 669 bp, Cannabis sativa
ttcctttgtccactcaaatttttttcccctgagaaagttaaagatgggtacgaatttgtttataaacttggacacaaatctactaagtgcatcctgtttagctttgtactaacttgatggttgtgggtgacttcacgttcaaaagagattagatcttgtctgggtttgagcttcttcatgttgtagctgaagaggattttgaaattttttgtttaggtcctccatatgcccccagcccttttggacttgacaagcatgtcattcacgcccatctccatgttgcggccgataggatcattgaacatcatgaagcttctatgctcctgatctaatggatgcatcttctaattcttggcttttggataaggccatgttttgacattgatggccagattactattctctcttgacatcttactacatgcctttgtaggaattttaggcataggtggtagatggatgttatggcttcaagttgtatagggctggttagcctattatggcattgaatgctgagggaacgtcgattatgacaaactgcaccatcacagtctagtggttggattttctccaacagtaaagggtaatctaatgtaccagatgagtgcgatgctttggccaaagaggccatacatcacatgattacagggtgccaagtcagcgagttgg

SEQ ID NO: 103473 - DNA, 552 bp, Cannabis sativa
aattgctcgatgccccaaaggcatatcaatcactcaacgaccattcactctccaactattaaaagaatcaggctacctcagatctaaacctacatcaacacctatggaacctaacataaaattcagcaacaataatggccagcttttgccaaatccaactcaatatagaagcttaattggtaaacttctctataacaccatcacaagacctgacatgagctttgcagtcaacaaactcaactcattccttcaatctccaagaaaacctcacatgaatgttgcaaacacgaatcttacactatctcaaaagcacccctggccaaggactttttttctatgcaacctgctttgaccctcactttcaggcctttgctgatgctgattggggagcctgcctcgacactcaaagatcaatgtccgcatcttgcgtctttcttggccaatctatgatctcctagaaatcaaagaaacaacccacagtgtctcgatcatcagctgaggcagagtacagggccatgaccaatgaaacctgtgaacttacttggccccaca

SEQ ID NO: 103474 - DNA, 522 bp, Cannabis sativa
tttgatatagtgtaaaaagaattatttttttaattaagtagttaaattaagcatataaattcaaatttgtgatttcattattcgttattagatcaaaattagatagtttgatatttttaaaattaatatttataattaaatttatttaagtattaatacccattaaaaagtgttccttatatattataattgggataaatgtcttcattataatggtttaaaaaaaatgtcttaattataaagataaatatttctgtatatagacatacgtagagtcaaaaagcctttattggtgcatgaaattccatataatatcatattcgaaattaaaactatcaatttagaatttacataataactgtaatgaattgaaatatttattaaatggtcccaagacaagagctatatgtggctcgacattctagtctacaaatcacgtgaaaaagaagagaatctatctaaataaatttcctcttcattttttctcttttaattataaattgtaattaatcacccaaatac

SEQ ID NO: 103475 - DNA, 780 bp, Cannabis sativa
atatgatttagtttggtcatcatcctctatggggtagttagcagtaagtatttttattttatttaattagagcatgatgaaccaaaaaaattagaaaacaattatctcaaaaaggaatacccaaaagagaatcaaacctaattttagggcttcaatattggtacactctgattttttttctttaattgttgctgaagtacagaagataactaaaacaataacgaacaactccatcctaaagaagagattgcaagactaaaaaccacctaaaacctgcagctttgtggactgcttcggagttcatcaagtagtaatggtgtgcgacttgacggggttcaaaaatccagacgatctggtagagaactcgggcgcaaggatctagaactggggcaacaatgcttggcgtgggaatgataatgcttggatcgacgaccatggtatcgacaacgatgaaagagagagagagtagtgaacgcaagggcgagagggagaaggcaggggtttcgatttcaaggctttgggggcttcgagtcaccataggccatagatggtcggaaaatgttcatcgggctagaagaaggaggaggcgataggttgaagatgaagaagcaagaaaacgaaaagatagagatttgtgtataactcaaaaaaaaaatgtttttttttatttcttataatttaaaattaatttttaaatttttaaatgattatttaaaataaaaaataaaaataaatccagctggaccaatcacaacatgccatataggtactgatctgaca

SEQ ID NO: 103476 - DNA, 524 bp, Cannabis sativa
ggcagacataaaaagttgcaaggaaccccaatatgatagcaaatgaacctgttaatatatattgatcaattattaaaattagtaaggtatataattaaaaaaaaaacaattatatatatatatatcaatatatactatatagtgattctcaagacactaaatttaaacaaggtagtagtagtgcatgttaaagagttccaatgtgtgtaaagataatagaatatataaaatgaatggactactcttctcattatcaattagtattcaccttgttttaaattctagaattcataatcataatacaaatactcacctgaagtcattaatgaaacttgaaataaaacacctgttaaaaaaaatatagatataaataaacacacaagcttgttttatattaaaaatattagaaaattaaaaagtaataaccaatcataaattaattaaaaatacctttcattgtatccttggaacattgggtggcattgtttgagttaggcctcttgatcagtgtgcatttcttccct

SEQ ID NO: 103477 - DNA, 524 bp, Cannabis sativa
tattattataaataaaaatttataagaatataactaaacaattttaatgatatatttaatattaacaagtaatttcatggatcacacgtgttgaatcagtatcatgttgtcgtgtcatagcttggatttagggttggcttaagtattaggcagttggaccattgcacaagacccctatattgaaagactccattttttatccctatataatatatataatataatattttttttgagtaattggcggtaaaactctcttatgttttaatttttatacattaaagctccttatctttttttttttttgtggcaaaactctcttaagtttatttttctttgcaaatttgaggtgtcagttaaatatcactgttaaatattaccgtcaaatatcaattgaatgatcattatgtatacctgtgtatacgtgaaagtaaaactttgaaacaatacaataataatctagcagtgatgtctagctggtacctcaaatttacaaagataaaaataaaagtaagggagtttat

SEQ ID NO: 103478 - DNA, 764 bp, Cannabis sativa
  modified_base (542)..(544): a, c, t, g, unknown or other
gaaaacagacatcaaaaacataaagcataatagtcaagaagcttaaaagcaggacggagtaatatgcaagatgattgctcgagcaggcctagaaattccatcgcacctgacatgcctcttatttcggacataatagctttcccttttccgagcacgggaggaggcggccgagcaagagagatgggctccctaacgcgaattgcatgttcaacaggcctgggctgggctagaagtttcttcctccttttgagcggagtcacctgctctttctcacccttatctacaggattcaagggctcttgagcatatttcttggcccttgcacctccgttcaacttagcttcgcgcttaagtttaatgagttcattctcttaatgagctcattcagcccgtccagcatcagatttcctcttcctcttcctcactgatttaggaatgaaatcctttggataaagcccgtacctcacaaagttatcctcagaggtcaagcggatgatatttcgatcttcccccaacagtcgagcaagtttttgagctctatnnntaagagcaagagtgaggggaggacagtggtatgttggaatctgctggaactgagtacgggtgatgcccgcatcatccaccaagaagtactcatcaacaaaacgccctattttgctgatggcagaatcatcggtgcgcgtcaaccacttgaagtctggttgagagaaatagaagtaccccgacctgccttgcttggaggtggacttcaaatcaaagaacca

SEQ ID NO: 103479 - DNA, 510 bp, Cannabis sativa
tatatacatatatggttattagtgaaattagatcttatatgatttaattttttagagaaaaataaagatgtctcttacattatttatagtatgtagaagaattgacttaattttataatcatttgctctgaatgctatatgaccaaaaaatttgggacgaaatttctctaagggggtagaatgtgaagactcggtttgacccagtcaaaccgagtatatatataattaaataaatataatataatatatatgtataaaaaaaaatatattttatatatacagaaaatagtgttgtcgtccctctctctctatttatctatatccttttctctctcttcaaacacaaacccaaaataaaatctacaaactaccatcaccaccacactccggcaaccaacctccgacgatcgcccgaccccacgtgcctgacagaacggaactctacgtggcgacctcaccccccaagcgccgccgctcctttcgccaccgttagctcgggatcgcaagtca

SEQ ID NO: 103480 - DNA, 503 bp, Cannabis sativa
catgcacatcgcttcctcgcggggactgctttaacagaggaataatagacaatctcaagaggagtgggacactcccatcctaaaatttggtatagttgctttatacttccaaggattctgtaagaaatcggaaccaattgaaagggggcaattccaatgtagtttatgaacgctttgtagtaatctctcaaggggaggactgctttagccttgatatgctcgaggctctaagcgcctatcccagtcgagccactagtacttgtaccaccgcactcctcgcaaataactctttctgatggaaagcaactgaattcaccaggaccgacagatttgatgcgacatcgttgcctttgattgatgacgcatgactttaaaacactgccaacatactctccaatgaacctaaccttggattcgatgagtttagtctcaaaggtgacattggggtcttgttgggtctttgatttacgaggcttagtagacataatttcaaaatcaaggtc

SEQ ID NO: 103481 - DNA, 528 bp, Cannabis sativa
ttaattttattcatctagtcgatccaacatttataaaatgttagattggatcggtatcgttcgtttgatgtattttatgtatatttattagtttaatttaaatttattcaatactttcgacctagtatttttaaatcagattaattcatttaatattttaagtccagtattttaatatgtataattttttaggtccattcaatcataaagaaaaaaaagagtaaaattttaatattaatttttttatatatatttttacgtataacaatataaaatctaattattcattcaaattgaatgaaaatatcaattagttcgatgagatgttgaatgtaatagattttttgacaccccatctaacaacagtcgatctgatctaactggatatttaaaaataacatctaattatctgatctgatcataattgaatatctaatttggcggtcgattataattaaatcaatcaattatcattagattagatcgacttgatagagaccactaaaaaatagtcacaataatatatat

SEQ ID NO: 103482 - DNA, 625 bp, Cannabis sativa
agtattataataatgtggtctaggttattaccctagggtatatatgaaagtaagaaagcaatgatgtacagtaacgtttgctaatcaagtaaaagcatgaagtaggattattactctctatatacgttattttgagcatatcataaagtatgttatatgggtaattaattagtatgcaagttagggttattaccctaagatttcatatattatagtatatgttgaagatgttgaatgtgtggatatatgtcaacggttttgtgaataagacaaaaccgggttagacctgatatacatcatcaagataaaccactgaaggaacattatatgtggattatgtatatatgaataggattatgcgttcaaggtataatcaggttagactcggtaactataaccgagataaactctactaaggcattctcataaatagacgtgtgagtgtaacatgtgggtttatgctatatagacataaatagacgtatgagcgcaacacgtgggtctatgctacatagacatatttagctgtccgctttcaagttgggcagtaagggtcggagaagggcaatcactcattcttaaaaccagcattcttaagaccaaagagtcgggtggaaaagggggg

SEQ ID NO: 103483 - DNA, 630 bp, Cannabis sativa
gggcataaaacccaacactaggttacaagaaatgtattctaagtagggattttgtctttagagaggtggaaatggcaatgaaatctaagacagatgctaaaccaaatgaaaactctagtactgaaccaattgagtttgaggtagatgcaggcactacagttcaggcacctgaagaacaggttgctgatcaggttcaaacagaagaacctatgggagtagaggctgacatgagtgctaatggttatcagctcactagagatagagaaagaagggttcatagagcccctgccagatttggttttgctgatttcacagcttttgcacttgcagcagcagaaaagctagacaactcagaacctgagacttatcaagaagcaatcacatgtaaggatagcaagaaatggaacaaagccattgatgatgagatggtatccttgaagaaaaacaagacatggattgttgtcaacaaaccagagggtcaaaagctagtaggatgcaaatggctattcaggcataaagaagatgaaactggcaatggtgaagtgagatacaaagcaaggctagttgccaaaggctttactcaaaaggatggagcagatttcactaaaatttttgcccccattgtaaaat

SEQ ID NO: 103484 - DNA, 533 bp, Cannabis sativa
tgatctaatctaggcaaaatcacatattcttggaccaattgggcaaaactccagaacatttagaccccatgacaaagacaacaacaaaaataaaagtagcatgttcatgtgtaccccattgccgaagacaaacaaacagaaagcttctttcacaattgattttttcatcactttaatcaatattcaaagcacaattaaaaccacatctaccattccacctaaatcgctcctagaacctctcacagaaccctacgaaccctctacaaaccagaagcccaaaatacaaacccgaacgagaaaccctaaaaataagtttacccaagactgaaaaccctataaataactatgaactagataaacttaccataatcgggtgggggatcatcaatagatggcctgatgtatcgcattgtcaccatcgccgatcgagctcctttcagaccaaaattgcctgagttatccttcttccatccagtggttcgaatggtctgtttatcatctttctctttcatttctatgttaacgttcgaaat

SEQ ID NO: 103485 - DNA, 645 bp, Cannabis sativa
atataatttatatttttaaatgaatatgattcctattaattgtataatgattttgtattatcagatatctgtatactgatgcttattcatggcagttccctgtagtgattttgaatccatcttatgaataatgtgtaacggtttgatttagattgtgtctaaatgataatattcgaataataaattatatgattattagtattgtttttcttcctcagtccttgtgactcacaggtactatgtggtccaggtaagggtaaggagaagttagagctgccattcggtgactaccttctccagcaatgtacatattggccccaccggcctgtgtgccgagttgttaggagttgttttggactggctgtatctggtgcattttgaattgtgttttgaattgctattgtctataaatctttttataacagcaatccccggaacacctttttactgttgttataatgtccgtttctagtcttttattttattcaagtttttaatattctcacaatttttaataattaattaatattttagtattaatgtagtttataaaatcacacttgtggtgtccttatggaatagggaaatacaataccacacaagttataggcttttactttgtaatttctaatgtgactctatgaa

SEQ ID NO: 103486 - DNA, 542 bp, Cannabis sativa
aaaaatcataggctgccataccctttatccaaatctagagctgagcaacctctagctttggtgcacatggatttatggggtccttcccatgtctcctctaaagaaaactataaatactacatagtgtttgtagatgattatagtcgtttctcttggatttttcctctcacaatgaagtctcaagcttttgaaaccttcattaggttcaaaagccttgtggaaaaacaattcaattttcccatcaaagctgtccaagccgatgggggaggagagtataggccttttgaaaaattcttaagtgatcaaggcattgttttcaaacaaccttgtccacatagtcatgctcaaaatagtagggttgaaagaaaacatagacacataactgaaactgggttgaatctcttagctcaagttggtcttgatctttcttattggtggtttacttttcagtttgccactcattgtattaatcgtatgcctacccctattcttgacaatcttagtccttatgagtgtctttttaatgaacagcctgattataa

SEQ ID NO: 103487 - DNA, 531 bp, Cannabis sativa
ctgttggaaggtttttctcattcaagtgctctcgcaaattcggttgggagtaataactggcagaccttgcctttctcacggatcgcgtcctactcgtagatttagtctttgagtggctcgtggatttactggttcccatactttctcgatcattagcttgatgtgtactttctcctcttcgagttgatcgactatgggttcttgaccacctcgaagtcacacttgcttcttcacgctccccgagagcaatttgtcttatttcccccatcagggtctgtacgagtcctcactctatgggtttgggaagaacgttggtgatttctagcaggtgacctccgttctcccaattgagtcccaagatcttccttattctcatgaggggtttctcgttcatcagttttcggttgtctccaatttgacttttcgttctaattttcaaggagtgtctcattttcctcgggttgttcttcccgggccttttcctgtctcctggtttgtgagccacgaggtctgcctcgtggtcttctcact

SEQ ID NO: 103488 - DNA, 508 bp, Cannabis sativa
aaatgttaagtgttaagatataatacatttcatggtgctcctttgtcgtttgaaaggtattagcgaggtggttacttccatatgtcaaaagcgaggtgaatgaatgttgaagttgtttccattccttaagcacagccacgagtatatgtgggtcaaagctcttactcacgagtagtgggtcaatgagctgcaagctctttgtttatttattcttaatagctttcattgtgcattctatttatcccaagatggacctgtttgtcgctggtctcattagttaatagttattactcttcatcttttgattgcctatatggcagcgagttcgaatagttctattaactgtatttttcgaggtgagtcatttaatgtgcatttaataatatgcagtttggagctggttcatattccagccttgatttacatgtcagcttcttattatattggtcgaaatttaggtataacaaccacgaattcgatgcatgaatttttccacatattttttgaa

SEQ ID NO: 103489 - DNA, 589 bp, Cannabis sativa
catgaaattattgtctttcatgcacatccaaggtggaagattatagtttgctaacacgacaggccacgtattgtatgctaggctcatgttgctaaatggattaaagccatcagcaactaaacctaagcgaacatttctaggtattggcaaaattaggatgtttagcatcaaagtccttccaagctaatccatcaaccggatgacgcatcactcattcatccttagattttccactatgatgccataccatgtattttgctgtatgtcttgaaccatataatcttttcaaccttggtgtcaacggaaaatagcgcaacactttacgaggcaccttttttccattagtttttgttgaagtaatccatcgactacttccacaaattggacaagcatctttaattgcatgctctttgtaacataagcagcaatcatgctcacacacatgaattgactgataccccaaccctagctaaaataaatacaaagaaataatgtaatatcaaatatgacaatagtcctaccataccataccaaaaacgaaattatcaatctatttcatttcaaattttccttttattttttctatttg

SEQ ID NO: 103490 - DNA, 604 bp, Cannabis sativa
ataattttaataataattaattaatcaaattatgtagactcaatatctaataatagcgatgttactctttggagaatactagacaccaactactttttagtatttctcttatatttatagaaataaatatcatgctagttggctctatcaaatttttgaccattcatgttgttccacatggcttcagtcgcctaattttgtcagaatagaaagtatttttgctttagagcatctccaatggtaatatcttttaaggatgctaaaaattttcacatcatgtaaaaatataatattttattttatctcttttttatattatttttgacactcttacttctaaaaatactctaatggtataacactcttcaaagatactataattatgatatcatacaatattaaataatatttattttaatttttagcaaaaataactttttaactttaaatttttattaaaataaatgaatagcatagcatcaatgttggattacattcatacaaatttttagaatgaaatacatttctctccaatagtatagcatctcaatattttgtcatttaatatgtccaccttaacaagtattctctaaatttttaccat

SEQ ID NO: 103491 - DNA, 524 bp, Cannabis sativa
  modified_base (408)..(413): a, c, t, g, unknown or other
taatatctaaaaatcccaagtgggcatatatataccaagagattgagataaccagataaaactcaatctctaatgtttggaaatttcttatcttaccctcacggttgtttgatttttcaagtttgcccccacaccactggcggacccaatgaaggaccagtgtgggtttaaacccatgctgatatttcttttactttttaattataaaaaaaatcttttaattattttaattgcccacaacaaatgggcaacaaaatgagagatcaatagttgaataatagtttgacagtatatctcaaaaagaatgtattcaatgctattgataacgagcttatattattcatcattttcaaaacatgaaaactcgtcgagaataactttaaagatatgagctcaaaaattgatatnnnnnntaaaattttaggatattgagtatgttatatatttcgaacattgttttagattgttttttttttttttttttctattagaagatttttagtgcttgatatttaatatctttt

SEQ ID NO: 103492 - DNA, 677 bp, Cannabis sativa
  modified_base (645)..(651): a, c, t, g, unknown or other
ttcacattagatttaataaaataatacgcataattatagtacataataaatgtaaatttattaataaaaataaataataataaatcctattttataatatatgttaatattacattctttggttagattaaaaaatatatactttttagtatatgtaaatcacataatgtatttaaatatatatatctttagtatctatatacaatcatttaaaaatatatatacatacaatttaataatatatacctataagtatacatatacaatattacataacataataaaatatatataccttttagtatatatatatataatcacataatttgttaaaattacaaaatataattataactactttctattgtatatacatcatacttagaatataatagtgtgtagaaattattattattatatataaattaaaataaatatattagtataaatatttatttatgtagcatcaatatttaaataagttgttagtatttaaagttatatataatttgcaccaagaatatattataatattgacagtgtcttttatttgattttcttaattagtataaaaaaattgcacatcctcgtaatttttataattaatatattattagttacaatatacacatatatatatatatnnnnnnnactatttaatggttacatttttattg

SEQ ID NO: 103493 - DNA, 505 bp, Cannabis sativa
gtttcggcatttgggaactgcattaattttcctacatttgtcaacgcttatgagttcttacacattgaataaaatagcaacatcttcccttgaattttccccatcacatgttaaagattttagatgatcaaaatatattactttttaattgtaaaataatattaattacataatctctaaacacgctatatgtatataataaaaaaaaatagaatagatgaatataaaatacaatattatataatatttatgtataatataaaaaacaaatatcactcactcacaattattattaaaaatttaatttttagtcataataaaaattgtggctaaaagtcaaaaatatcgtgactaaaagttttagtgacaattttttcttgtgacaacattgtgactaaaatatccatgattaaaaattttagtcacaataaaaataatgttgtgactaaaagtcacttttagtccaactaatctttgtgattaaatatcattacaattagtcata

SEQ ID NO: 103494 - DNA, 663 bp, Cannabis sativa
tatatattgataaaatttttgcagaaaatgttttgataaattttacacaacagataattaagtgcagaaaaattaaaacatgaagtattttatcgttgattaacttattgcataaatatttaagtttaatttctggttacatgtaaatacttaagtttaaatcttgatggtaataatacccgtaagtacctatcttttaagtgtgaagtcaatggtcacgtgacagtccctgattggttagaattataaaaattttatttttatttaaaaattaatttaaatataccgataagaaaatgacatgtggataatgacttcacacttagcgactaagtacttacgggagttctaaaaatattacttaggtattattaccgtaaaaaattaaacttagctatttatctgcaatcgagaattaaatttaagtatttacgtaaattactcaataataaataaggttaattaaatttaagtatttaagtattaaatttaagcttacgatcgtattgagtggggatttttaatggctatgatgagtaaaatggggtttcataaccgcttcattgatctgatttttcacacgatctctacggtggaatacaagatagtacatgggggacatgaaattggtcctattgctccgagtaggggcattcgacaagg

SEQ ID NO: 103495 - DNA, 783 bp, Cannabis sativa
atatgaggaaattacattgtatacatactttactttacttgttttaacttttacatccattttcatattcttaaagatatactcacttttataggtgttgttcccgttaaccccttaggttaatatatgctagatttaagtagaaagtgagagtatattgagcaacccactcaaaaaagtgggtatattttaataaaatataatatgaaagtattttttattaatgaatacaaaaaattaaggtatttctcaacttatccattacattgtgtacccactttctatatactttatttgtttaatttttatctttattttcatattatttacgatatacctacttttatagataatgtcctcattatacccattaagttaatgtaaattatgtgctaaatttaagttgagggtgaagatatattgagtaacccactcataaaagtgggtagattttaatgaaatttaatttgaaggtatttttgattaatttttaaacttattccctctttctcttcaacccagatccaattttttcatcacaatgcattgggcctgcctagaaaatgcattttctaacccagaaatcatagattcaaatctaaccctaaatctagtccaaaacacacatatcataccataaatctatcaataaacaatattttaaccctaaatcaaaaacaaaaacattcaaaaataccataggaggaaatcttaccttggtggttgttcgtcttcgtggtgggtcgactgggtggtgggtggagtgggtcttcgtcctcggat

SEQ ID NO: 103496 - DNA, 673 bp, Cannabis sativa
tgaaatgaaagaaaaattgggagaaaaaattaaaaattgggaaagaaactcattgaattgccacatcaaactctctaaaacactcatttatatatatactaggtaattaaaccgcgcttcgcgcgatattaagaaattttataacctttttaattaatttatatttttgtactaaatgaaaaatcatataaataaatataaacttaaattattgaaaaattatataaatattagattaatgtaaactatgaattataataatattattaaaatattaaattgaatcaactaatgaaatgaataaaatgctttgctcacaaaagaagtattcggacaacaattctttattatgttcatttttctttaaattttcgtagaacatcctaaaaaaattttttacaatttttttaataattcaaattcttatccctattaatgagaataattataacgaaaaagaaatgtaatgtaaaaatttctattatttttattaattaaattaatcaatagaaataaatagtaattattttctacatatattagaattagttttaattaagttagttgaggtactcttcaagttgttaaaactttagttagttttatcaaactaaccgtgtcttcatttactgcatatattaagccatactaccaaagcatctttagttaagta

SEQ ID NO: 103497 - DNA, 773 bp, Cannabis sativa
tgttgcctgtactgtataaaaaaaaaaaaaaatcttatcggaattttgtaataacaaatacaattttaaactatgttttataactcgggatcccgatctttataagtaagtaattataatatattaaagttagtttgcaaatttagtatttcaaatacgggcgttacattaacctcatctctgatactgatttgtggaggcttgaactcccaacaagaaccaacacaacaccaaaaataacacagaatgatcaagaagacattccacataaaaccagcaacattaaaccagaaaaataaaccagtaaaatgaccttaatgaaagcagtaaagaacaataggaacttacatggttgggctacataatcaatgtgattatgagcttaatccacgggagaaagtagccttaatcattgctgtggtaatgatctttattgaacttaatagagttacaaaacagggataaaaccctgaaacaaagtgcagacttgctccttacaaaagtgtctctcaaatggctatctctcacaatctcaagagaaaccaattacaacactcaacaacactctcaatcctctcttagccctctgaatttgtatcttaacatcacaccaaatgagaggacttcaaggtgtatttatactgttagtaactaactaacttaactatcgaaatagttaagttagttgggaagttactgtttgtcaaatctgacagtaaaatccaacatcaagagatcaaacctcaaaaacttagtatacaccattacttgat

SEQ ID NO: 103498 - DNA, 533 bp, Cannabis sativa
gtagaaaaaatatacttaaaactcttagcagcattgctataaaagtctcataacatcatttctataaaagcaccagcaccacgaggtgacacccttacatttaattaccagtattaaattatgtaacacctatacttttttgaatggaatgtaacacctatacttgctcgtgtaaccatatttcgggaattgtttattcggacccccccacttccccttggctcctatcttgtgtttatggcccaccctatttgcacgtgaagaaaaagttctggaccgagttcttgaaaattggcgaccggtttggcgggccttggcttattttgggagataccaatttcgtgcttagtaactctgaaagagagggctcttcaagtcgggatccctttattccaattatttctaatctgattgagagtcgaggccttattaatatgcctatccaaggggacaaactgacttgggataaccataggcctggaaggcatcatgtgaaatctgcactagacaaaggcttagtgaatggggcttgg

SEQ ID NO: 103499 - DNA, 627 bp, Cannabis sativa
gtgtaatttgagtttgtaacctttatgttttaatatagaatatatatatataaaaatagaataattagtatttttgtctcttgaactttcgatactacctgatattgcctcttaaaatatatgacttgttaaaaattctccttaatatatagcagtatataattatgtcttttatgttaggttttgtttttttaccgttaaaaattaacatttttttccataaaaaaattaatatttttactttctgaactttgaccagtacaaaatttgccctattttattaaaaaaaattaattttaaaaaattataatattctattagtcctgaaaaaattattaaaacctaataaaaatattaaattaattaaaaaaaataattacgtttactaaaaaaacataaattattcttaaaaagatattttcaaattttattttatttataaagacgtattgtaaataataaaatcaaaattattgaaaattcaactaagatttttttttatttatgtttataaattcatatcttaaaaataaagaaaaaaataattaaaaattcaataaaaatatgaaattattatttttttttaaaaaaagaagaagtgaaaaattaaacttaaaaaatattatg

SEQ ID NO: 103500 - DNA, 716 bp, Cannabis sativa
tagatatctagaggagtgtggaattgtcccacagtacactatgccaggatctcctagcatgaatggtgttgctgaaagacgaaaccgtactcttatagatatggtaacgagtatgatcagtcattcaaccttaccagaatcactctggggaaaggcagttaagacagcaacctacattttaaatagggtacaaactaaagcaggtgcaaaaacaccttatgagctttggatggggtgaaatcctagtcttaagcactttcctgtttggggatgtccagctaaggctaggccttataggccaaatgaaaagaagctggagctcaaaactgtgagaagctactttattgcaaattctgagcgatctaggggcttcaagttttatgatcccaaagtaaggaatatatttgaaacgggaaccgcaaagttctttgaggatgttgagtttggggggagaaatattgttaaagactttgtttttgaggaggatttagaatcaaccactcctcttgaagatgagttaattcctattccaatagttgcttttgacaatgttcaagattctattcctaatattgatcaagttttagatcaagagtaaccaaacatatagtcaatcaaaccccaaaggtacaaactcaacaacctcaagaacaagtgcctttgcgacgatccactagagaaagaagaaatgctattaatccagatgaatacatagt

SEQ ID NO: 103501 - DNA, 1120 bp, Cannabis sativa
gaaacccaagcctccctcttcctttggtttacacatcttgtcccaagtgctccaatggagttttttattttcctttgtgtctccccaccaaaaattggctgccaatgtatggaggttgttgatgagttttttgggtagacgaaaacagctcattgtatagcttggaattgcttgtacaatagctttaataagaatttctcggcctgcttgtgaaaacattaaactcttccatcctttaagtttattccaaaccttatctttgataacatcaaagacctccttcttccttttcccaacaaagcttggtaatcccaaatatttggcatggttcgagacaaggcgaactcccaatctattagcaaactcatgtccttgttgaggtgagatccgtttccccatacaaatttccgatttctctagattaatttgttgccccgaaagtctagagtatctttgcaacacaagcttcatagtatcacattcacttgttttggcattgaggaacataaaactatcgtcggcgaagaataaatgagaaaccttgactctatcttttccaaattgaactccattgagatggccagctctctcggcttcatgtatgagacaagataatccctccgaacaaagtaagaagaggtagggagagagtgaatcaccttggcgaagaccccgggttggttggaaaaaccccagcttttctccattgataagaactgaaaacgaaacacttgttacacatctcattatttttccaatccatttttcctcgtacccgagccccctcatcatagtgattaagaagttccactcaactctgtcgtaggctttggacatatccaatttcagagccattttcttaccattcccaaatcgttttgtcttcatgcaatgtaggctttcgaatccaattatagcattatcttggataagtcttcctcccacaaaagcactttgttcctccgatatgacttgatgaagactatttttcattcttcccgctaggcatttggccactattttgtacaccacattacaaagacttattggtcttaaatccgtcatctttgtggcatttgaagttttcgggatgagacaaattaaagtatcattgagttcc

SEQ ID NO: 103502 - DNA, 565 bp, Cannabis sativa
cgacgtcaaataaataaactatggtaaaacatcgtaaaacaacacaaaacaaataaaaaaaaaaagaaaaaaggattaaagaaattaaccatcttctacacaatctcaccaaatgcaataaaggttatatttgtaagcccaattctaaaatatcagaataaaaaaaccatactcttaattttactaaaaacgtgactgaaaatttcaaaaactaaaaaaaaaaatgaaaagaagatgaagaggaagaactgaacaaaaaataacataaaaacttatatgttaactagtaaacatcctgcacttcgcagcggatatataaaatattttaaattatatataaaaaagctaagaaataaaccgcgcttcgtgtgcgattgtattttgtttaatgataataagtcatataagtatatcaaattttaaattttaatattttttttatatatatatatctaattttcataatataagtaacttttctttatcttaataatacaaaaagaaaatactattgtacaaattattttaaatctagtaaattaaaattttttaaattaattaattt

SEQ ID NO: 103503 - DNA, 542 bp, Cannabis sativa
  modified_base (228)..(232): a, c, t, g, unknown or other
tttgttttttttttaatttaaaaagtgaaaatattttcaaaaaatgtattctataaaattgtttttcacttttcaattttttaaatgaaaatcaaaattttaaaagttttgaaaacaaaaaaaaatcactttcacaaatttgttaaatatttttttttctaaattaatattttagacttcgaatccaacttaaaccttgggatccggactccagcctcgactccagtnnnnnacttggactcgacttaaataaatcaaaaaataaaaagtaaaaataaaaataatagaacacacttttattttttgtttttaattacaattaaaaaaaacaaaagtggttatagaacatattttattttttaaaaacaaaatttaaaaatacaaattttagttttatttttgtaattaaaaaattaaaaaacataagccttatcaaacgcccgacaagtttgcttcaaacattgcacttgagtgacaacaagttttcagggaacatccccatcatcttcccagaatttgccaaggtaagagacacttaggtg

SEQ ID NO: 103504 - DNA, 657 bp, Cannabis sativa
cttctttatggttttctttagctcaagataggttaattgcatgattttagtgatttgagattttgtagtgggcagctagtttgggtttgaattctggagttaaggtaggttaacaacgaataataaaatattaaattataacaaatatattataaaaaaaaaagtggtaaataaatttaataaatagattaaaaaaaataaataaactataataaaaaataacaacatacctcatgctcataataattatcaatactagtacatgcatcatctcttttctttttgtctcctttaaatggggtgtttacaataaatttctcactagtagagtttgagaatttctcttgtttttggaacactctgtccactttcttaaaaccttctcctaaagactcaaaaatatttttgagttttaactctaattttgttcctgaaattcattttcatcaaaaactttttcttttttcttttcttttgccttttctttcttcttttcttttttctcattagcaacacatatttcttccacacgtttttctataaccaatgaactaagttgaagttagagagcttaagttggctctctaatggtgtttttaatttctgagctatttgatgtgttctgttgcttgaaatggatttagtatagtatatgca

SEQ ID NO: 103505 - DNA, 847 bp, Cannabis sativa
accaaaaattaaaaaaaaaaattcatcgattgaatcagaaaaactaaaaattaaaatttttaccgatatatatacacacgtaaaatacattctaatatcataagttacatcggttggagcttttttttagaactcactctctattttaactaaaaaatatttagaaagcatggttggagatactggaattgctcttatagcttaagatataaagtgtctaatagagatagtttttacactacaagaacttcccatagtactggcggagacatccgccggtattaattattcaaaccgcatgtattaattattaccgtcggaattcgccggtaattatcgtcggtattaattggtcgttattaatgactattagcggccaaaatgaacttctgccggtaataatattaataacggcggattaatatcggtggggttcgcctgcacttttacacgctaacacattaatatcgacggaccacatttagtatgttgccggtattttttatataaaaaaaattataacttttaatatttatataataaaaataattataattatatataataattattttataaatatattattaattagaatttaaatttaagaaatcaaacattaacattaatttgtccataacaatataaacttttatcttaaataaaattaggaaattgtcttcaaataaactttaaaacataaaatttacaaaattaaaaaacttaattatcattgttcaaatcagtaaatttcataaattcatctgcattcgagataagtcttgaaccatcgggattatcacgagattaaggagtcggcggcgtagggtaataaggttgtccagtc

SEQ ID NO: 103506 - DNA, 723 bp, Cannabis sativa
ttttttttttttttttataacagaggtgacatttagtttgaagaatggaaacttaagaataagagtataagaattagaataaaaataaagattgaatgaaataaaatatcattctaccaaaatagtaaaaatatcattttattcaaataatattttaatactttaaaatgtatgccaaacaaaacaattgaatgaaaattgcttttttttatttttttattttttttttctattccatttaaatttaatatttctaaccaaacaccactttataatattgctattagaattttgatattaagtattaatattaaatattatgaacgggtcacagttaatttaagtataatatataaattcaatatatacacactacattgaatatttgtactactgcgaattgggatctaaaatttacatttgtgtgaattgaatgttgatatgcaaaagtaactcatataattcaatttaatctacatgtatttatgtactttttaaaaaaaaaattaaatatacaattaacattttaatgtaaaaaaataataatttaaaattttaatacatacaatacaaatacattttaaaacttaattgatcaaatgtatatttcaatttttaatttatatatatactttttacatacaatttaaaaaaaataaatatttctttttacatataattttttttttctttattcgagtttgttattttttattttattta

SEQ ID NO: 103507 - DNA, 612 bp, Cannabis sativa
gtcttcaggatctaaaaaccttggtgctctgataccatgttgtaacgccctgtccaacagggacgccacatgtgtgtttttataaaattcttatttaatttactatataattatactaaaagtgtgcgtaattaaatttttatatttaaaaacagagatataaaactactttatgataaaagataagtaatattaaccacgcggtccccctgttttcaaaaatatttacaaagtgttttaatagtgtttttactacataaactttgtattcccaaaaaacattccaaacagagcatcctgttcactgggtcgtgccactgtggctgatatgtacattgctgctacgacctcaaactcatggctgctcaatctttgccttccctttacctccaccataaagcacccgtgagtcatagagaatcaggaagaaaagtgaataaaacaataaccagtaatattcatcaattcaatctcatatcaacatgcttacacatttacacaatatcataaacacacaatcctggtactttataaagtacatctttacaactcgttaaccacgagctgaatatgtcactatcgttgccggatgaagcaaacgataagtaagaa

SEQ ID NO: 103508 - DNA, 695 bp, Cannabis sativa
caatacatataaaaagagatatgtttcaaataaatataaaattagaggtaaatttaattaattgattaataaaagtgatatttttcaacttacccccaagaatatatacgacagtttttcaaccgacacaatttatatactgatattctaacatcaagaattttttttgttcttacaatgattgaatgattttttttttcttttaaaaaaaataacttacgaaaacttgatcttcatatttttggatgagaagctcagcaaattgttgaggagtaaaaagatgacttgtattataaattgtagggagtaagtagttttgaaggtagtcattatttcctattgtaatatgatataagcacttctttaagtaatcattttttgttttattttttatttttgagattgtaatttggtggttgtctatttgtttgtccaggctaatacattcaccctgtaaaaaaaaaaaaaaaataaataagttggggtaattttatgaattgaaaaatattaaaaaaaaatatttgaaaaatttataaaatttgttttttatattaatgtatttattgaattaaaataagaaatataccaaatattttcctgattctggaagaattccacagcctccagatgcatagtttacacctttgactatgtcataaccagtagtatttgcaaagggtggtatgaaatcatca

SEQ ID NO: 103509 - DNA, 795 bp, Cannabis sativa
  modified_base (198)..(198): a, c, t, g, unknown or other
  modified_base (340)..(347): a, c, t, g, unknown or other
cataaattattgtacaagatgccctatatattgataaatttgggtgtataagtttatcataaaattattttcttttgtcaaatataatacaattttttacatatatttaagtaagagtctttatttttctaaggaagagagagaacattacacacacattcgaaggctgtataattttttttttttgagtaatttgcngcataaatacttaagtttaacttacagttgcaaataaatacataaattttctgtagatacctagttcaataaattgccacgtggcgatccctaattggtccatgtcattaaatttttattattttaaaaaaaattaatttannnnnnnnaataagaaaatgacacgtggatataatagcttaatacatttaacggttaggtacttacagagttctagaccaataagaaataacacgtagtttatttatattgtatttattttaggtattattaccgccaaaaattaaatttaggtatttatttacaattaaaaaattaaacttaggtatttatgccgcaaattagtgttttttttttatttatttataaaatatatatactaaagtgctacctcaataattaattgacttaaaagcatccctataaatataaaaactaacattattattatgagttatgacgacttcctcttctctttatacagatctctcacacttgaaagagaacaaatgaagattcatatatatgggactccacaagtttctaaattattatgattatcattatttcttttgatttgaatgttgttgaaaattg

SEQ ID NO: 103510 - DNA, 606 bp, Cannabis sativa
  modified_base (46)..(59): a, c, t, g, unknown or other
atattattaattttaaaattatgatattaaaaaaaattaaaaactnnnnnnnnnnnnnnatacgtgacttggcacgtaacatcaatctagtatgtatataagtctgtttaaaattaattaatatccttaaagaaatttaatagtgtaaatataaataattatatatactgatataactatagataacgatatattaggagaagttaattaataaaagactttttgatattcttgaaaagggaaaagttagcaattaatgaggtggctgtaatttattggtggaacagggtagagacagcatattagggacaggtgatttgtttccatcttatttaaggataggaaataaaatttccctttctaaattagatttttagcctagctaataagatcgttgcaaaatgtggtatcgttaattagagacgcagaggaactggaaaccaatatcaatatttgagaaaatctacagtctccattactcttactagctaggcttctatctaggtatagctagagctaacatcaattaatttgcttctcaagaatttttgtcttagatatggaaatatatataatataaggtttgaaattatattatatatatat

SEQ ID NO: 103511 - DNA, 520 bp, Cannabis sativa
cacattggctcgtgttgagtcttcggagttccattgatgtagaggtggggaatcaggttctacccaaagtgatgtggttcccttatcccttcaacttcaccgttcagaaccacattaggaagccgagtgtggacatctctagtcggaagatggcagcgctcgcttgcttttggtatgcttgcttcgggtttttgtggtagcctcctgtgcgttagggggaagatctttaaagttgtttttgttccttgttggttaggtttgtttattttagtttgtttggtgttgtgcactctatgtccttagtggcgttggctttaagccttttgtggggggtttatccctttctatgctcctgcgtgagtcttgagctttttgctcttttgcttatcggcgtagttgaccaatatttaaagtcatctcctagtgaaattgtgtagttctttatccgtttgtagggctacaacctttgtttaaccttgaatgaagtttacctttctcaaaaatatataaatatatatat

SEQ ID NO: 103512 - DNA, 709 bp, Cannabis sativa
tagataataattatgaatacatacttgattgatcaataacaattataacaatttgatagtgcaatactatcagctaagtcttcttctctagatatctaaattaaaaacagttttaatttctatctaattatcaaaaagtatataactgtgatgagacaatatgtatttatagagttagggaggagacttagctacataaacctagttagactgagtctactctttataaacacagatgctaagctcattaactattgatcactaacaatatgagataatacaacaaacaactatccaattaattcaagttttaataaaaaccaattaaagttaatctaaactaaaataaaagtttaacaattttatttcagtaaaattctaaacccaataatattagacactttggtgcctaccccatcaccactaataatgactcatttggactatagttcttgagatgagtttggtcaccggatcttacccaccatagtcaatcgtaacaacacaagtcaaactaatgtgagactacaaacgactctccaatgagggagcatggtactcccggtggtaggggatcacttccccatctcctttttaaatttcaacagtagtttaatgcttctgctttttggacctttgtttgttctgcttttaaacagacacgcttttctctctctatctcttctgatagagtaacgttaccgaatca

SEQ ID NO: 103513 - DNA, 560 bp, Cannabis sativa
ttaatagagttacaataaaaaaaaatatcaaaattactgacaataaataatccttaacactatatcaaaataaaattattttgattaaatataataattatacttgtatgtactttatcaatgtataataattcttatgtaaatgtatattttttataacttattataatttaaatattatttttatttatatttgatctaaattaggactttattttttttataataaattaaaatttaattttaaatagagtattcttagataaatattctactgtactatatacagagagatagatatgatgtagcactcaatatttatataagagtcttaatctaattcaatctgtactattttgtttataatgcatctaatttacattatgtgcagattttatattttgaattcaattcaatctgtataatattcaaatctaatctaatccaaaccgcaaaattacaaattggatcgattattttaaatttatttctttttgatattaaattattgaatatttgttagaagatattttttctcacataacgaacaaaaatataaa

SEQ ID NO: 103514 - DNA, 583 bp, Cannabis sativa
tagttattgaggttcaaatagctactatgatggtggctagggtaatgattgacgacgaagcatcatcaaacatcatgttcaagcaagccctactcaggataagtttaactttagaagacctggaaccatgcgaacaactaatgtatggtttcaacagagctagcattcctttatgtggcaatatcaagctgccacttactgtcgacattgccccaaagtagaccaccatgatggccacgttaataatggtgggcgtgaagtctccgtacaacgtgatgctcaaaaggcccaccctttatgaccttcgagccatttctttagtgtaccatttatccgttaagttcccaacgatggctggtatcagttgtctccttggaaaccaaaacttcccacgagtgctacaacacatcattgtcactcgccaattagacctcctctattgctatggcctcagaggggacaaacaagacctcatctgctgttataacactaaaagggatgagcaaggggttattttagcaccaaaatatccttaccaaggggttattttagcaccaaaaggcttgttttcttgatctcaaaa

SEQ ID NO: 103515 - DNA, 1100 bp, Cannabis sativa
aagtgtagatctccaattcactgggatgaaactagagaaaggaaatacctaggtctggaatcagtgcaacagactaatgaagctatagaaaagaataagaccagaatgcttgccttgaagagtaggtaaaagagctatgcagttctgaagcgtagaaatgtagaggatcatgtattcctacgggtgtctccaatgaagggatcaaacatttcgtgaaaaaaggcaagctatgtcctaggtttacaaggccttttgagattctgcagaaggttgaactggtggcatatcgcctggtcttacctccaacactttcagcagttcacaatgtattccatgtcgctatgttacagaaatacatttctgatcctactcatgttttgagttatgaaagtttagaacttcagctagatttatcatatgaagaacaaccagttcaaatcttaaacagaaaggataaagtcctttggaacaagaccatagctttggtcaaggtactctggagaaaccataaggtggagggctcaatatccagagctgttcaggttagattttgaggacaaaatccttttaacgatgggataattgtaaagaccgcttaattttctttgtttgtaattagcaggtaattagggcttaattatgagtttagattattacttatgatgtatgaatatatggagatttatttcaattcagggtgtatcatgtatattgtatatgagattttgtgtttttcatgttttgtgctcggtaacattggaatgcggcgtttggccaatagaattacattttcatagttttgtggtagcggggcaacttagatagacattgagaatgtcggaattgttcgaggatttaaagatgaccaaaatacccctaagtgtcaagtgtgctttttggcttaggcaaggggcaaaatggtctttttagcctttttatctcttttatcttttagtgacttagtgtgtgactctatgtattgttagaattttgattttgggatttattattgaataactaaggattatttttttttttttaaaaaaaagaaaagcaacaagactctttctctttctaaactcgctctctctctctctctc

SEQ ID NO: 103516 - DNA, 567 bp, Cannabis sativa
cttctaacatgcccaaacactggattggacaaattagcctgtctaatccaatccagtcctgcgtaccaaacgagctctaaggggattagtcgaggtttaagcctaatccagctagtcaaggccgaccttgagattggtaggctttatgaaaataaaaattattagaccctttagttaattcccaatgtatttttgaaaactactaaaataaatatatattttttaaaatatatatatatatatctgagctattggattgggtgagccttaagtgtgagcctaattcattctagctcaagtctgagccttctaatatggaaagagctttcttttagaaacttctaatatttagaaaacgagaagacaaaaaatcgaaggcaagttcacattaatatttatttagtatatatccaaaagagtggagccatgcatgcatcttagaccaactcctcctccaacttggtccactcttcattggaacaaaatactatcaattaatattctctcttatccctacctaaaattagggaattccaccttcacttttccaaattgaatgattctttt

SEQ ID NO: 103517 - DNA, 500 bp, Cannabis sativa
tgcaattctttcttccatataatcttaccaaatcctggcatactaacacattttgttatgcttcgagtttgagctcttcctcgagccatgaacacaagaagagaagaacaacaaaaggagttgaaaaaagaagagacagagatgagcacgctatgattgtgactctgataccataatacaaatgaaaaaaaaaagtatgaaaaaataaatatgtatttaatgaacaaaaggactacaataacagagttgtttggacaactctaaacaaccaactcttaaccaactaactaatctgtctaagtgatctcataattaattaatcaatgaatagagttctagctatgatttaaaattaaaggctatgtatataatttaatttgtaattattgataatgatcataataaaattattctcccataagcattatcatgaatttttatactttttatttatattatgattattattattattaggaatggattagattattgggagt

SEQ ID NO: 103518 - DNA, 524 bp, Cannabis sativa
  modified_base (28)..(31): a, c, t, g, unknown or other
tttatgatatcttatctaagttcaatannnntccaatccaatgtatactccatagattcgatactagtatactttgtaagtgtcatggaaagaacataacacttatccaaggtgtaagtatgccttatcgccgattatcatgtcaatctaaatccagtatactgaaaaatcacgagacttaagcttttgaacatataatcatgattatattccattgtgttgacaaaactataatcatgaataaatatatatgttctggacttagtagaatttatacattaaacatataatcatgaaacaaatcatgtgaaccatgcaacgcaaaatgattgctgatcttttattaattagtaaatctgattacattaaaatgggtttatttagggcacaagccgagaaaactcccacttgcactaatataaaactaaaggtggatttcaatgaatctcaacaccttgatatccagatcaagtgtagtacgtagtattatctctgtaatagaatctgacaggttgtattcaata

SEQ ID NO: 103519 - DNA, 526 bp, Cannabis sativa
ctcacaactcaaacaatcaagttcatactctcattgaacttcacttgagcacttgtcttcacattcttcgatttttaattgatgtcttctttcttcaaacaacctttaatgaaattggagttttctccaccttgccgcattccatcactctaactgaatttctttagtgaaatgactccaccttcacacagttcaacctaaaatagtcttctcgactaatttatacaaatctcgctctttcttacccttcacaactaccaagccaccttttttatggttatttcaccatattttgtaaaatagtcataaccacaagtatccataactctcaaagagattaatttcctctttaatgtttcatcagtcagtgttctcacaacactatcaaacatacaactttagagctagagtcatttcccatcaatacatcatcttcctcataagtgccaaagcactccttatatgggcacatgtggaacgaacaacgagaataaagaatccaatagtcaaaaaataaaaaattcat

SEQ ID NO: 103520 - DNA, 748 bp, Cannabis sativa
cacagcttttttgaaaagcagcttttagctttttcaaaagctgtgccaaacgggccctaagtgtatatcttgaatattaagtgtgtaattatattatcataatttcttcaagcgtcagttatattaaattattagaactaacatattgtattcggtattatttttaagttgcaacaccatcatttaaattattaaaatatacataaaaattactgcacataaattttttaaaaaaaagtttttcttaaataaatcactttattgaaaaaattaaattaaattataataataaattaaattatatgattatttattgaatcatttttaattatattataaatacctaatataaaactaagtatacgtgtcttgcacttagctttctcctagtacaatagatatagttcaaaatatctgtgtattaactaattaattaattttattagttctttcttatttttttataaaatatatatggtatataattttattttatttaaaaaagagctaaattaataataacatattattattattagataatctaatttcaaaaattttataaattaaaattatcattattaaattaatttgtattaataattttcttttatcatactaaagtttttttttctcaaaaaactaaaaataataataaaagggaatatatatttaaaattaccggagggaagctaagtagtctatttatgaaaaaagaagaggtgttattgttggattttatgcccta

SEQ ID NO: 103521 - DNA, 746 bp, Cannabis sativa
gggaatgtaaaaataagggaatgggcagctgagaagctactggaaattagaactaaaaatttaggctgctatattaattgtaaatatgtatgttgttgctgggaatcggaacatgcttgcagaggtgagggtgttcatgagagacttgggtgtgaggaaatcccctgaacgtgcttgggttgatgcgggcaatagattctgtccctttttggttagggacatgtcaaaatctaatatttacattgtatcagatggattgatctagctaatgaaagatgcttgttatactgcaactgaggatttcagtgcagcggaagatttatgttgtgaggagtagaaaggacaacatgaatggatgcataaatatttatcttttatgaactgatttcattcatttatttctaatatactatttttcactctctttgtaatttaaaccagcattcatgtatgcataacccttcaacatgtatcagttgttgaggacttcctaggagttttgagggaatcaattaaaatggtaagtgattttttaactagaccaaaacaattgagttgctttttctctcagtgaaagagcaatatcaaatattttagaggaagtatgcgattagttatcgggcttagttggtgccatttgtctgagtttacattgacttcatgtgtttcttttacaatatttttaggtgaaagtcaataaataatggactagctcacttatattgctgctgcctgggaagatgcca

SEQ ID NO: 103522 - DNA, 1134 bp, Cannabis sativa
caaagaaaaagttgtatatcaaatgaattagtgtaattcatttttaaactttctagtttctagatactatatatcaagcaatgtacatagtatggtaatccaacaaaaagcgataataatgaccaacattattcttctatctttgagtacaatggttggcttcgaaatccaacttctggtctagtagcatagacaatccaggagacagaagtaacttcctatcagcatctaaatcgaaatcagtaaatataagcacactcgtcgggtgggatatccaagtcaaagaaatttaaaacaaaaataagtgtttatttagacaatagattgaagacacctacaagctaaagtttaagtctaagcatagcttttaagattattttttttccaaaacaaagtagattttgttaaaataatttataatttcaattaattgatttcaattagtttattgctttcaatattaaaattttaaatgctggttaattttttatttttaagtactcttttccatgtagttaagttttataattaaaaaaaaataaatattatttgaatttaatttgattaattttggtctaatttagtatttttagtttaatctattttttttaaaagaaaattaatatattttattaaacttaaaaagtctcaagatacaaaaaaaaagttcaaaagattaaacaactaaattcagaaggagcctcggcctcccgatacgagactcatctaaaactagctctctttgcaagagagtgagcaatagtatttcaagacttattacaatgagaaaagaataaactataatagttgatgtcaatatttatttggttgtttttatttatatttataaatttcctacataatggtcaatgctttttttcacataatggtcaatgcttttttttttttttcacataatggtcaatttttgaatagttttgttgaatgatttttttattattattattacataaagtggtgtgcagtgacaacatagactttagatatagagatataacacattacaaagaaatactcattttatataagagaagaattacaacaagataaaactaatgcctaaatgaatgagagaatattttttttagttatgtgtattttgactattcactt

SEQ ID NO: 103523 - DNA, 632 bp, Cannabis sativa
agctattcatatttttcgtaacaattactcttcgacagaaaggaacaagggttagagatctgcgcggaatgagacattatattccactgccatcaatgtaagattttctaaactttatatatttttatttcatcgtattagagaattcatatttagggtgttaatcaaatctacatgttagtaaatctagatcttggtaaaataagttccaacaatttacccatttacataattgtgacatagggcatccattcagtgtgtgattttccgttcaggtcgatcaccacacttgaattcaaaaacgaggtaagactagcatagaatgtatttatatatgaataagtgtatgtgtaatatatgtatgttatttatgattcgtatgctaccaacactagtgcagtagcggtattgagtgcattggtatagtttatggtgttcaatgagtacaatactgtgttaccaatactagtacggataagtatgtagtgtatgtggtacaacacttagtagtgctcagtgtacggttcaaaccctaccgacactagtatagtagtggtacatagtgcatgtggtatagtggtcgtaccttagttgaagaacgttcttactcatttgttaagccttgtggatag

SEQ ID NO: 103524 - DNA, 511 bp, Cannabis sativa
  modified_base (26)..(29): a, c, t, g, unknown or other
  modified_base (161)..(164): a, c, t, g, unknown or other
gttataaccttgcagtggccaaggcnnnnaaggaagtatcctccagccagagttcagaaaatggaaaaaacatttccaagtagcgaacttcccaaggaggggatgaagatgtggatcctagacttggggacccaagcagtaatgttggacttgtggaagannnngaagagatcgagatcgatccaaatttcctgaccagaaagctaaagatcggaaagggtttattgctcgaagtaaaatcaaaattgaaaaaatttctgagagcaaacctaggtttttgcctggaatattaatcccaatttccggccagtacagcaaaagcgaaggctactggacaaagagcgagcactagccctaaagaaagaagtagaaaagctacgcaacaacaatttcataattgaagctttctacccagcttcggtcgtaaatcctgtattggtgcccaagccgaacaagaaatggcgagtctgtattgatttcacagacctcccaaagactgttttccacttcc

SEQ ID NO: 103525 - DNA, 670 bp, Cannabis sativa
cctcgtgagttcaataaattggctcacaattgtgctagggcagggttaggattagatggtgagtattgttggaatggctgtttgccttcctggctttcctgaggactcttttgttgtttttcttttcccaggtttaaagcacccccttttcaaaaaaaaaaaaaaaaaaaaattgcatcatcatacgtattttctaaaatatttacgtgaatgtgctctaataatttaatcctatcaataccgaaagcctttttaataaaattggtatgcgtgtaccgagacagtcaatcaacctttacttttcataggcagctattactgacaagagttaagagccttgaaactctcttccatttttttttcgaactctctacattttttttcttctaatattaacctgacttcatttatttatttatttttattgctttttttgttaatgaaatggcatctaaatatctttctcattttatttatttatttatttttttaaaatgaaataattacatttagaaaatggtgtcaaattatctaaattctaatttttttctttcctttcattttacatttacacacttctttctctttttacttttatttctttcaaaagtttatctaaattttagtcagtgtttattttttttccctttcctttcattttacatttaca

SEQ ID NO: 103526 - DNA, 602 bp, Cannabis sativa
aaggagtcctcgccgaaaaggaaaggtggaccgcgctttgtgaactatactgaactcgcagtaccacgaggccgtatctacgccatcgaggagaagaatggggtcttcgagaagcaacccccgatcaggggaaatcgcgacaaaagagaccccaaaaaattctgtaagtaccataaagatattggtcaccccactttggagtgttgggttttacaggatgaagtcgaagagctgatccggaggggaaaattcaacaagtataaaaggaacgaggaaagtcatcgccgagcggatgacaaagaggaaaattaaaatgcgagtggttcgagaacgcctcgcaatatattgaccattgtaggcggtccccatatcgcaggtgactccagaaagtcgcaagagcgagatgcaatggaagccaaggagaagccactcaccaacgtgaacaatctcagtgagagaccagagaagttgctcaaaacagaatgcgacaacatcacgttcatggagagtgataagagatgggtccatcacccgcattctgatgcactggtcattgtcgccaatattggcggggacaatgtccaccgtatactcgtggacaa

SEQ ID NO: 103527 - DNA, 935 bp, Cannabis sativa
tagttgttccgctgttgtttttagttgttttgttttgtgttccactgttattttttaaaaatacagtatttttgaaaaataaatctacctcaccgtgaaaaaaagttagaaattttaatatatggtgtaaaaatccatatttttaaacatttgcatatattttacattatattatttgagaactcgctaatttacgtgagtatgtttatttttttgttgttgttcaaatgacctttgaatacttcataatttagtgttctgaattcattcgactttgttgtatgatattcttagctgatatttattttttatattgttatgtatactaggagtatataattctgttagcataatatatatatgtgtatattttaatataagtatatggcatgctacacattttaactgtaagtgcaacaaaatatttaaacattattctcataattaaaactactcgaaatttttaaaaaatttacaagtgatcttaaataactataatgtacacaatcatgaaaataataataaaaaaaaatatataataaaaaacttttctggatgtcgatacagatatgagatcaactaaaacatccttttcttaaagagtgatctgaatcacaaaaagacacacgtcgatgcagagggacttccaaccaacaagtcaattgtctagccaaaatgtatacaaagtcagaatataaattgctacaaaacaaagcgacttatatatgaccaagttactctgaaaattacttgagactatctcaaataaggcaactagtctaaatgaacaatttctgcaaacctacaaaataaatacataaaagtaaaatattgattagcacactaaaaaaataaatgtttagaaatttatataagacaagaacaaactatttttcttttttggcaaaattaaacttatcttttagaacttcttg

SEQ ID NO: 103528 - DNA, 544 bp, Cannabis sativa
tacacagtcgaaattataaaatttgtttcacactagtcaatatgattataattcagtcaatgtaaattttttggtagatgacaatccataagacttggtgaccataagaaatcgtaaggatctagcttactgggaaggtctccaagtctttatggcacttgcgcctaaacacatgggccgcagtcatctcagatgatgccgacacaacaatagcagcagacatctcaaataatgccgacactacatgggtagcagacatctcaaatgatgagaagtccgcaaatgccgccatactacccacagatgccggatgttcctcgagatgctagtgatgaggacaatgctactacaaactacttttagaatttttattttaatttaacgaactatcggtttaatatttattaatattttatgaacacttatttatatttaagtatgaagtattgtaatgtttatgactcactttttattgtaatattagtgactctagatatttacttttagttaaatgatttcatatcttaattaattaaataatttt

SEQ ID NO: 103529 - DNA, 561 bp, Cannabis sativa
gattctacacattacacaacaaatacagtcaagattttttccagaaattcagcattcaacccagacattctaatcatgctatataaacaaacaataaacgagcacaaagtatccagaaaacttacatgaagtttgagagctgggggttggtgctgatcatcggtacaacgaggactggcaacggcgaaggaagagtagcaagaaatctatggtgtctggaagtttttctttttgtaaaagctttgggaaaatttggcaaactggcgaaagtaaccaaatgaaatgagaaggctggctcttataggccagaacaggtgtgaagcagctgtgatcaggcatcatcgtacagtgagaatagcaatcgattcgcattttggagatctaacggcttggataagcgttcatcaaggcggttggaaatgcttgagtatttgactgacacccattaaatgcgccggatcattaatggatgggaaacgaatcgttgccggcaaaaagcaaaaactgtaatgatgattgtcataaatgcatcccacgcgcccaaagcacgtgccaggtagt

SEQ ID NO: 103530 - DNA, 577 bp, Cannabis sativa
  modified_base (90)..(92): a, c, t, g, unknown or other
tttttcagaaaccctagttagagtgcgagttctttctcaccgcccaaatagacatctcctggaaacagctagagctctcttatttcaaannnatgttcctaaaccattttgggccgatgccatttctattacatgatttttgattaatcgcatgccatcttctattcttcatggtgaaatcccttacaaaattctttttcccaataagccattagttcctattgagctaagaatttttggtagcacttgctttgttcgtgatgttcgtccacaggtgatacaattatatcacaagtcattaaagtgtgtatttcttggttattctcgtcttcagaaagggtataggtgttattgtcccgatcttaacaaatatcatgtttctatcgatgttacttatgtagaaaatacaccttatttttaatcttcacctgctcctacttgtcaggagaaggatgataatttgttggtatattctagcacatcctttgcgcctgatcaatgttttgacaagtctcttgttccttcacctgcctcagtcatagctcccacaatgcctacacctccaccacctctacca

SEQ ID NO: 103531 - DNA, 618 bp, Cannabis sativa
tacctcatgggattagcctatacattttagaagtaaaggatcttctctgaggaaggtacttccaacttatttatattctaaaagacataccacttaggtaggagtctatacgacaagagaattagctggaaaggagctatcccaattttggctgccagactcgcaaagtggatccttaagggaagatccgctccattagaaatgtgggaccagctccaagcactcaatgccttaatacttgtggacactgattctcttgtggacactgattctcttgtggcagatagtctgtgccacatcaaccttggaatgttgcgaagaccagtgccatcaacataggccatcagcatcccataaaagcgaaagcagttggctttctagtccatctcctagatggagtcattaaaagcctgtgcaactagaggcgtcttagtgatcctttttcctttgtccttcgtagagggtcctccctccacaataggttcatcctctgggacgatttccatagctgttgtttgttgggtgcttcaataagaaccatagcctggattccttctgtgagtgcttcctttacaagagcaacatgcgcactcccagtggttcccactcaattggaga

SEQ ID NO: 103532 - DNA, 525 bp, Cannabis sativa
  modified_base (49)..(52): a, c, t, g, unknown or other
atctaaaatcaatggtcaaaaaaagttaggtcctaccatagtcttgccnnnnatatatatatatatattttaagacaacttataaatttttcacatatgagaaacaacaggaagaagaaaagaaagtcaatacatttttggatttttagattacacttgatctttaattgttgaccaatattaattgatattaatattctatattttagccactctgtaagtacaataaggagaaatgaaatgaataagatacgtcaaaaaaatgaataagttacaataaatcttttcggtaattttctaaaacgaatcaaaatatagtatttttcagtagatccacttttttttttttttgacgtaaatcatacgtgattaataatgcaacaatccacaaacggtagtgacacctgttcaaaccaggatagctcatcgtctaactaaagggcatgctttgtcaaaccatgagctgcaaagatcttattgcgagccacataggacaaaactgctcccaaaaatttagacaataaa

SEQ ID NO: 103533 - DNA, 506 bp, Cannabis sativa
ttattaaaattgtttaaaaataaaataataatgatttattttgtttaatttattaaaaaactgtaatctgaatacgtagagttattttatacagacatatctgaaaacaaaaacaaaaacaaataaaatctatttcctttaaaaagtagaatagtattttttttcacttatttaattttaataaagtaagtatataaatataaagaaatgactacattattattgattttcattacttattagtaacatgctaatttaaaaattctaacttagaatggaaaccctttcataacttaacttagtgtgatgggatgaaaattctcaaataagggtgtttgctgtccaagtgatgcggtttttgacaattttttcaaactaacttgtacatgcagtttttagaatttttcaaaccgcacacgcaccgggaaactaaaaccataaaaaccgtaccgcaataaatggtgtggtacggtgcagttttttgcggtttctgcagtttggactat

SEQ ID NO: 103534 - DNA, 521 bp, Cannabis sativa
tagcctccatagtaaattataaatgtagagttcttataaatgcaattattttcttataaatcttttcccttaataattgttaaattactgtttttctatatgtttcttacggtaggttatgcgtctgtggtcgttaggaaactataaatgtttggaagaatattcaacaccagactcaacctctgtagttgacttcgattttgatgaatctaaggtaacttgaatacatcagcaaatcattgaataaaagtgttgattgaaacttgcttgcatttatagttcatgattttctttcctatgttagtgacattgtttgtgtttcgtagattgttggattacttggcagtcgtatatgtatatggaggcgagatggggcaagaagtgtatttcctcctcgtgagggtaccttttccaagggtttatgcatgcggtatggtgcttcatcctctcattttcacgtggtcatttgataaaaatgtagtaaaaaattatgaaatttttagttagaaagataattcatg

SEQ ID NO: 103535 - DNA, 606 bp, Cannabis sativa
cacaagtcaatcttattagatttttgatacagttctatgaccttttttcttatgaattgtctctccctttttcagtctgccttgcctctatttataattacatagttaggcaattaattacatagttgactgatatcttacaacaattattccctaaaatcgtggggtttgattacataccatgtaaagtaaacgtggttaatatttaaatatcacatagttgggattgatctgcttttactgggtccatgtaaacgtgtattaaatacattgcaactcgtatcgttctgggacgtctcgccgagaacatagcaacaataactctggcagcgagctagagcttttcccacttatttctgaggttgataatgtaaacctcgtcgtttctacgcttgaagacataacgctccatttgacgatcgtagtatttggcgacaagatgaccttcggcagtcaacatcatttgaatgccaacttctatctgagagagctgactcgacagaactgttaatctctttgaaagacgtctggagctgattagtgaaggtaccacgagcatgccttcctatggtgagatggatgcctcactattagttgtatgtgctt

SEQ ID NO: 103536 - DNA, 627 bp, Cannabis sativa
tttaaaaaatttaaaataatttactacataaaaaacagtttttaaaatgtttattttacatgcatataaaataaataattactatttgaactttgttaaatttttaacgtgtaaaattttataaaatatcttaaataactacagcatacattaacataaaaaaaaaattagagataatacaattctatagttatcatttttttttttaaaaattattactttataaatatatattaacatttaaagggaataataaaaaagaaacctatgaaatgtaaaaaatttaagtggaaaatttgaagagaaaattactaataattcttccaaaatatatattcatgttcaacttcacatttccggataacaatggcttcttcagtagtatcaagagctttcactcactcccatcgcaccctttcattcttcaccttcaaaaactcaccaccaccaccttccaccacctctctcctcttctccaacaccaccaccactacaaccctaaagctaaactacccaaaacgattcctcgcttccttcacctctacccaaaacgacgccgtcccatcatcaccccaatcccagtctagtcaacgccccaatgtggtcaacattctcgaagaacgtggc

SEQ ID NO: 103537 - DNA, 967 bp, Cannabis sativa
  modified_base (194)..(195): a, c, t, g, unknown or other
tgaatccaattacgtaaaaattttgtaatcatcaaataaacacatagatcaacctgaatcacatccaaatcaaacattcatcgttttaaatctatatttcttgaaagtaaattattaccatggctctaatgcccgttattgaaatatattttaccaggaactagatttacttacaagtatgttgattaacaccnnaaatatgaattctctaaaataatagaattaaatacatataatgtttaagaaaccttacattagtggtagaagaataatatgtctcctcccgctcagatctctaacccttgttccttaaggttgtagagtattattaagatctgagctcgattctccttcaagtgttggattcttcatagtcttacacaatatgattgagtacttgacttgctatgagtgggcatgtactctttcactataggctcgaaaaatatgaagagagagatagaaagaggatttcaaaattagtaaaggaattgaggcatctcaaaacttctagttatctgttacaatgtaaactaggttaaatgcactggataaaaaatgagagcatcctattcttttcatactatttaacttaggcttaagatttaaattatatggaataaaaaatgataaaataatagcaaaataaagcatatagtggctgaccattgagatgggccccactagttataattttgctatttttcaaccatttatcttttatttcactaatgacacattatctaatgttaattctataaatgccaaaactatttatttaataattagaattaattatcaaataaaattaccatttaatttatttattaattagactcaaataaaccatataacttcttttcttcacaattaagcaattacttagtgaaaatttataaataagacatagtttaatttagaattataattgattaattaaaactaattaactgagtctacaaacagt

SEQ ID NO: 103538 - DNA, 692 bp, Cannabis sativa
  modified_base (407)..(413): a, c, t, g, unknown or other
tgcaagctgttttaaaatacataattaaagtattaatgtttatttgtaataatttattaacatctatgttattttatttttcttctattgattttctaagatatcattcataattataatttatgttatttctttttgataaaacacataacattattattcaattactaaaaccttgtgaataaaagtttgatagctactaagtgtaatataaacactataaattacatttaaataatatttttcacttcatgaattaagtgtaagtgtaatttataggaatttttacaaaaatactagattttagacaaaagtttataattttattgccacatggaattttttataaaaaatatgtcatttttataaaacaaccgtaaataacaaaacagaacaattaaaacaannnnnnnacaactaaaaaacaaccgtagaactataataaaaacttaacgcagtacacaatacaaaaaatacgtagtatttttgaaaaaaaatttgctccacagtataaaagaaaaaaaattagaaattttaatagtagtgtaaaaatccctattgtcttaaacaatacttcttcaatttatgaatcgtgaatttaaaaagtgatcataaatacattctaatatggaaaaattttatggttgtctccctaagaaagatattagtcactacaaaaaattttattttta

SEQ ID NO: 103539 - DNA, 548 bp, Cannabis sativa
aaattaagattcactgttaaaaaaaccacgtcattaattggatgtaatattttactgtatatgtgctgatataagtttctgttaaatacattgatttttttgtagttatagaaattgaaaaatgagttttaaaagagtgttgttaatttttagaatttgatattataataaatataattatataatataccatgggtgaaatagatcatataccatataatgactcaaaatctcactacaacacaaaagaaatataaaccaaagttatttgcttgactctcacttttatttttcaaccaattagctttatttttaaaaaaaaaaaaaatggaagaagaaacagttttagagtgaattttttttaatctcacttaagggttaggggttgttaggtagtctcgtcatcacattaataatatgtgaaaagttaatattaatataaatatttgaatttgctaattgattattttgagataaaatattctataatatatattttagtggacatgatcatcaaaccctaatttcagaaccacattaattctcac

SEQ ID NO: 103540 - DNA, 812 bp, Cannabis sativa
ctaagaatttgacaactcggcctctaaaatcataatcaattatactggtgaaactaatcaactttatgagcatctttctttacttgggtcaagggtttgaatcccaccacagtctcttattgggcgggattatgtttggctatttgggaggctagcttgctgaggcggtgccatccttaatgggatgggaaccctcgaggtgtatactgatgacccaattaaggcaggatgaggtataaggcccctatagttagcacatggtccccgaaattgtcaaagctattgaaggggtggggaagggacttgcaccatgtgatcccttttattttcagcaaaaaaaaaaaactataccgatgagactaatattaaggtgtaacatcatttcaaaaagattcctatattttaaataattaaattttcataagagtaattatgatgcatttaccaacatgtctatttgacttagtggaacaaaagaaacagaagttgagggaacacattcatccataggataaaaacttttactttacatatatgaataaatggttttgtttaaactgtggtctatttgaacatgagctatgttcttacagatgaaaactcatggtggagaagtatatgctgtctttaataagaagtcctctacctttgctgtatacaatggaaatgacagtgaagggcttcttccttatcaaatttactcaataattatccagagagacgtagacaagaaactcgtaacacacctgagaaaatagtttattaatcttcggtttgatgaaggtagatcaattttgtggtacacaactata

SEQ ID NO: 103541 - DNA, 588 bp, Cannabis sativa
ttgattccattataattctgaatgattagttattgtaaataagagattgagagaagaaaaatattaatggctacaactgaaaaagattaaagaaaaaaagcagaatgagaagagacaaggaaattatttggggcttacctctgttagaatgaatctcaaattcttttgtctatggctaccaccacttgccaccattcttgaacaatgactgatctttttggtcttaccagcaagaagaagaaagaggaggagaagaagaagaatcgttcacttgcgaccattcatggtcttttatgaggttttaattgattttgtttaatattaaattaattttttaaatgaattaagcgccacatgtaaaaaaaaaaaaaagactattttgcaaagggaaatttcactttttatgattaataaaacacctcatatcaattttgactccccttattaatttgtaccaattaattcctttaattacacaaacgttccattttacccttttgtttttaatataattttcgctaaaatcgcgagatctcattttttggagtattctatgtgttcatatttttctcgacagtttctcgatac

SEQ ID NO: 103542 - DNA, 764 bp, Cannabis sativa
tagacaaactcgcgtagtttagctgctatgatggttgctagtgccttggcttcgacccattttgtaaaatagtcgaccgtgactacaatgttcttgactttgccttttccctttggtaattcacctatcaagtcgatgcccgagaccgcaaagggccaagggcttgtaatcgaatgtaagtgactcggaggttgatggacatacgtggctattcgctgacacttatctcatctttgcgaagttgaaagcgtcttgccgcagggtaggccagtaatacccttgccgcatgatttttaaggcaagagaattaccaccagcgtgattccggcagatacccccatgtatctcgcggagtacatagtcgcattcctctccgtcaatgcatttaagtagcggttgactgaagcttctgcgatatagtcttccatcatagatgtcataccgggcagcacgctgtcgcagttttctcgcttctatcttgccatcgggcaagatacctttttctaggtaagttattattagagtcatccaagtgacttctttggcagcgtctatttccatcacttcttctcgactcactgtcgggtgagccaatacgtcaacaggaattacatcgagtaattcagcttctctagttgaggccaagcgggccaatgtgtctgcatgtgagttgtgagcgcgcggtacttgggcaatgactactttcttgaatttctgcaacaactcgcatactatggcgaggtacttagccagacgcccgcctc

SEQ ID NO: 103543 - DNA, 1025 bp, Cannabis sativa
  modified_base (985)..(992): a, c, t, g, unknown or other
aaaaaaatacttgttggtaacctgctataggaagtcaacatattaccacatcattctttttttttaatacccattgatgggtattacccattaagaagtgttccatatatatatatatagtataaaggaactatagtacatggtccaaaaaatatggcatcgtgtatccaatctttatttaaaatttgaaatgaccttttacaccactgattacctaaattgtttcttggcacatacaactctactatattccccatattttttaatctccaatttacttctttatatctaattctttttttagaagcctatatgacataaatatcttcatgtacctatattaatttttttaagttcggcaaaccttattttatttaatttaatttttgtatgattaagcgtattatattaagaaaagaacaatagatgtccatacacatacaagcactagagagacccacggggtctttacatcaaataagcagctgtaattgagtttacctagatttatatatacgaggcaatggatttcttagatgctatttaggggtagctactttctacatacatttttttttttgaagggaaagaggcccagaacaacaaaaccaccaccttcacagaaaggaaggcaagacctgaatagctaaaggagtagccacactaggggcacccatgtccaacaagcatgaaaaactaagtttttgtaaatgttaataattattacagaaatatactaagtataaaactgtacacgtctacagcagcaaaatgtaattctgaaactgcagaaaccagttttgtagagacaaaccagaacagacagaatataaaaataattgcagtatattaaatcacttgacacaagagatttgtacgtggtatcagtattctttcgaacaatcctagtccacggtgctacgcccagagaataatatcaattaataaagtatcaaagtttacaaaagcaattgacttaaacaannnnnnnntccctctagtgatttgccgcaaccatttgtaat

SEQ ID NO: 103544 - DNA, 588 bp, Cannabis sativa
gcccggggaaccctgccaaaaccggctagccggtttttgaggctctgtaaactggctagccggtttgcaccagagttcctatagcctctcattccttgctcaattctccaccaaatgcaatgaaacctttcaaaggacctaataagggtatacacaatacattccagccagaaaatcacagaacaaaccattgaaactcaacttgccattaaagaccaaagctttgaactcaaagctcaaaattgcataaaatcaacaccacacactaaaaccagctgctaggactcttaaccaactcaaattaagtctagaattctaaccctaagcaaacctaagcctaacagccccttacaagcaaaatcatagcttgaaaccaaagaaaactcataaactcaagagataagggtttctagggtttaccttacttgcaaaaaccttgaatccttgctaaatcccagagaaaaggaagagaaaagttggtccttgcccttgctttgtctcagccgaaagaaagagagagaaattccaagagaaaactctattttctaattttcttcttttcttaagttttcctcaaatgaaaaagga

SEQ ID NO: 103545 - DNA, 732 bp, Cannabis sativa
gaaagcaccaaactgttaacacaggttttcgttaaccaaataaatagccttttttgcaataaatattctatagaattaaatgaaaataaaagacactagatactttacgcggttttgtagttgaaatctatatactccacaagtccttattattagggatattttctggatacaaaatacaatctcaatatttgaaataataagattttatctctcaaatttgtcgtctctttttccatgtatcctgcccctatttataggaatataggttgatagttattctttttgggattgaatcattgacaactattaatgaaacatgaacattccacacgtttcatttattcacacatgggataatatctaataaccactcaaccactctttattttcatcatttagatggttatactgactaagaaagttacatatcgtcaaacatgagttctccttcttatccatcttaataggaaaacacgcaagtgttggggaatatttcatctagctatatttcttcatttgtattattgatgcgagatgatcatcatgctatgagtaacacgaggcggttgagtgtcataagtttttctcttctcgggagagggttaatgattcaggaggttcttgaccgtctcgtcttatacattttattactttgtttgtctcgaggtaaacatgtgtctcgtcaatcccagtttaatagttattattcttgtctcgcataaaactaag

SEQ ID NO: 103546 - DNA, 659 bp, Cannabis sativa
ttgatggattgaaatttatttgaagcatgattcaaacattggttaaagcatgtgaagttcatattgtgcgaaaggcataggagatgagggaatgatttgcttggacaggaaagattggtttttagttgaaaaaaattgtattgaatttttttccccattttaaaaaatcataaaaaagatacatttacaatttgctttctgaatattgtttcactgagagataattgaatttatgcttgtgttacatgaaagagtctggcctaatcattgattcaaggataattgtttgaaagactatcaatacagtaggagtttcggtttcataatatctaatttcctcttgttgtgtattaagaaataacatgggttctgtccttgtgaacaaggactttttctctggcagctagcagatttgcaaaagaaggttcgtgctgaagtcagttcagagtattggctacgcacaaactgtgcacatcctgacaaacagctatttgactggggcatgatgcgtttgcgtcgcccattatatggtgttggagatgcgtttgccatggaggctgatgatcaattcagaaagaaacgggatgctgaggttagtacaatatatcatgtcaaacctaatgagaagaattttgttgtgaattggaggctgttttgct

SEQ ID NO: 103547 - DNA, 504 bp, Cannabis sativa
ctaatcaaaggatttagttaaaaacgtgattaacaaaattttttacaataaacataacttttactatatatacaaaatataaagtttacaaacttcgggatcccattctatttttcaaatacaaacaaaatataatgtatcaaaagtgtcgcccgatgattaataaaatcgagcacatgttgtcccgaagatttgaacactttaggtctaatcgtctagatatgtacaatcttcattgagctccagactcactgttattcagcttttaccatacttttacctacacatgaaacacaaatctgtgagtcgacaaactcagtaaaaacaagtataaaacataaaaatataacttgacttgtaatataagcccccatatacctattcacgaacctgacccatgtcaaacaagtatgagtcgtgaactttcttgactatgcataaccaagagtaagttgggcaatatttgcattgacttgtaatataagcccccatacacctattctg

SEQ ID NO: 103548 - DNA, 565 bp, Cannabis sativa
ttagattcaaacgattttttatttacaaactcatatttatgtattgcctactgaacttcttcacttaagtataaaaaaaataaagctgcaagtttctcatttaaatcaacaattaatatatttattgatcaaaatatactttggataagagtttttttttaaaaaaaaaaataaaatatataaaaaattatttaattattaatttattttttaagaaacatgctttagaagtagataatattcgagagaaaaaaatactaattaacaatgccgcatcaaattttagatgataaaaaagaatgatagttaacaataatattatatctactaaaatactaaatttttttaacatggtgtacattttaaatgatacatttttatagtgttgtaagttcaaaagataaaatactaattatttcttgaaatagctatacctaaataattttaagagtcactcacgtgcgaagctcgtgcttcctcactagttaatttatatatattacattccttatattcattaaaatattccttagcttatttgttctcttcctaaaattagtacttt

SEQ ID NO: 103549 - DNA, 540 bp, Cannabis sativa
taactcagccctatcaaagtcttgaactacagtgctggcttcgtcatccccaagaaagctgtctgaggagagaaaccaactggaggacaagcaggctgaatgatccaagggaattggtggaggaggtccagagcccatccgggatcggcctaagaaagggcccaagtgggaaaagtagaagtctttggcatgatccccccaccgagtgcaggacatcctaaacttaaaaaggcgctcatcaaatcctataggcctgcgtcgggtatactctcaaacagaggggacatgatgaattgttaaaggggacttaccagaaccggccgtactggcgtcaggggctcttgtgttggggaccagggccagaggtttaggcctagaaggcacccgacctggacccacctccagacaaagagtcctttcggcggcagccagggctttaatgtatgccagctcctgttccctcttgaagaggtacttctgataccggtcctctgccgaagtgattatgtccactccgagcgccctttccgcagcaggagt

SEQ ID NO: 103550 - DNA, 586 bp, Cannabis sativa
ataattattattattaataaaaatttcagccatgcaaaaaaaaaaaaaatagaagagaattatctgtcaaaaagttctaccatatataacaatcaaataatagtaataataatgattacaaatatatatttatgggcaaaattatttgataatgatcaagataacttaagacacttacaaaaatatgtaaattctattttttatcaagggtaaaatagtcaaagattatcacactaatatgatacttttatattagtaagatataatcaaaatgaagttattgtcacagaagaaaagtatttttttttttggctacaaactttatattatattattaagtaagcaaaacatgacatctcataccatatttttggtttttgagttgaaaaatagcgtggtctaaattatttaatgttatttttctatttcttttaccaagttatgtatcgcactttcaaatttttttaatattttgattggtttgtgatttaaaattgtgtttttttaaaaatgtgttttggaaacaaaaatttaaattttgtaagtgaaaatttgtttttaaatatgtgattggttgtagtgtgat

SEQ ID NO: 103551 - DNA, 675 bp, Cannabis sativa
taatttataatattattatatatttaaaaataaaaattttgtagatattaatataaaaaatatatattaaaccctatttcaaaaattttaaatatatttgatataaaaactttaatttttttttcaaattttttttttaaaaaaaatgcattatctaatcgaaaaaaaattaaaaataaatgtatttaatttaacatcacgaatttaattgaaaaagaaaattaattatacgtgcactgaacgtaacatcaacctatatatatatagaactacacctaatatcaacttaatatatatatatattaatatgtgttgatctttattttagttttcattattattattattattgatatttcagctcttaatattatatgttcaatattattaacactctttaggaatttctgaaagtaacttgctatgtatatgtcctatttatcaaaatgtaaataatgtgtgtatatgtcattacttttttctaaaatgggtgatgccctatgttttttttttaaatttttgtacaaaaaatagtattttgcaatttttgggatctttttatacgtgaaaatatgatattgttaagaatatgggcacaagcccagctcataaacgatcaactatttatttattattgtatgaacatttttctgaaggaattatttatcttattta

SEQ ID NO: 103552 - DNA, 535 bp, Cannabis sativa
cttgaaagcatacgacaatttccacgctttcgtgagaggaggccttaggttttttgtggaaaacacgattatatgataggtcccaaattgtccctttgtgacataaacctcataagggaaatcacagggcttcttgtggcgcaggaggctcttagtttcccgaagggaaagttgggcctgtatccccgtgtgggcaattcctttttacgctgaggtctaaagatcatgtaaagtcctttgatggccaatcttttggctttcactggaaaggctaaaggagcacaaagaattcagacattgaccttgcttgctgatgacgaagggcaaaatactattgggtgcgcgagagtcatgttgaatttttatgaagcaagcttcggcttctggaaaggaaggctgaagttgcataaaaattcaagtttagacttcgcttaataaaattaaatggaaagcatcacggggagtagaacagacatcaagcaatccttccattacgggaaggagggttgatgacgtatcgtacccccaatgatct

SEQ ID NO: 103553 - DNA, 513 bp, Cannabis sativa
cgaaccgaagcataagactcgttcaacccagttaagaactgcaagacttgactctgattataatggtcaagaaaaactttcatagcaccacatgtacatggtgtgtttggttgaaactcttttaactcatcccatagggatttgagtttggtgaagtaagaggtgacggattgatcaccttgatgcaagctagtgagctgtgtttgcaattgaaagattcgagggccattggcctcattgaatctttcagcaagatcttgcctcatttcagcagcattatcaaagtacattatactttgtgcaatatcaggggaaacggaattgacaagccaagacattaccatattgttgcagcggagccaagaattgagggaattaccagcaatcggacgaggaatagaaccgtcgatgaaggctgttttgttcttggcagcaagagccatggtgatgccacgcttccatgactggtagttagctcctgtgagaattgaagacaccaatacgagacctgga

SEQ ID NO: 103554 - DNA, 1187 bp, Cannabis sativa
ttcgtccagggcatggatactgtccccactcggttccagtaaattccctcgtattgttgccctcctttcacattaggactcagggaaagggcacaaaaaattcttcaatttccagaagctgttcggaacatcactttgctggccactgaggccaactatgttaagtacaaactcttcccaggggactttgtgtcgaggcccatgaaggagaagaagaaaaaggtaaagccaagccaggttggtggggtcgagcagaaaaatgagctcattcaactcaagcatgaagctaagttgaagggagacaactgagccaagcagtatgctcaagaatattcagagcaggagaggccgagcaagaagaagaagaaggctctttcaattgaccaagcaccagtagaacacgctatcaggattagggaacctaatatgtctgcttggccatctccccctggggagggaaaagggaaagtcgtcctggtgcagtaggaggaagactcttcagacgatgatattgtgtctatgcttgttcgggcaaatgctcctgccccgtgcagggtatttttaacttgcacttacttctttcatgatatgctttacatcctatttgcttctgaccgtgttatttttgttcgcgcagaaatgtcacagaaggtactcaaagccttgaagaagagagtgggggacacctcgggctagactcctcttcccaaaatatcaaaaggcaatgagactctatccaaagagaaggggtcggtcgaacaagtcgttgacctttctaaggaacggcctgctgtggaccctccaatccagaaggtctcgaagtcgaagagttccaaagggggaagctcgaacgagtctaattagactaggaccccttcaacgaccgtggcgctgagcatgaaagcaaagaggggcaaggacttgctccaatattatgtggatcgatcacttcccaaagtgagcgatcaatcgtccggggcaaacaatgagttgtctttggaactagtcttgggaggagtcctcaaggaagctacatgggtaaatatttccttctttgtttttattctcttttctatagttcaaattttaacattttcccgtgcaggtcaatctgaagatggcctacacctattctcgagccaagtccactgctgccaagaactttgccatcaccaacacattgcaga

SEQ ID NO: 103555 - DNA, 567 bp, Cannabis sativa
  modified_base (274)..(277): a, c, t, g, unknown or other
cactagaggtttgcgtagaactgttggtgcttgcatgcgcctctagcaagtcgtgggactgcagagcgccctgagactgcctattaccgacttaccctatttgggcttgccggacagcttcctccagctctatcaaggaactccttcatattgttagttgagatcctctagatctttttctagaagtcacttaatggaaggatgccccgtatatcgaccttcttttgttaggcctttgaccttggtggtcttggccatgaacctctggatgtannnntttaaaggttctccttgtcattgtttgacctcgacaaggtcttccaattacgatggtatcagtcttaaggatgagaactatgtgtaaaattcttgagaaaacatattacaagaattaaatcttcctacagccagcttaaagtaccattattgagttgtttctagtagagttgtcgagaatatctgacatcgcacatcactagtaattttttggagatcaagctacatctcaaaatacttgatgtgtgttagtgggtcttctctcctggtatacatcttccataccaacat

SEQ ID NO: 103556 - DNA, 521 bp, Cannabis sativa
aatacttattttgttttattttttttctaaatcatgtatatatatatttttattttttctaaaaaatttcatataattttttgttgaggcttttagttttttattataatatttcaaatataatttatttttatttgatagatatatttcttaagaatataatttagaagaaaaaaatttaaaaaatttagtataattaaaaatataaattttatattaaataaagttattaaaataaagtatttttaaaaaattttagagtgtaaataaaatttttcaacatctttatacaaagtgactaaatcaagctttactattgaggactatataatttgcttaagagggggttaaggtctacctttcttaattttcaaaacagattcttattaagatattaatataattacatgcataattttaaaaaaaataataaattaaaacttaaaaaacctccctagccaacatgtggctccgtgggtggagacacatccatttacaatgaatgaaattgatcaagcaac

SEQ ID NO: 103557 - DNA, 538 bp, Cannabis sativa
gcagaatcaggagactcatgagcatttgtttttcaggtgcatatacaataagcagtgtctatcacaaattctttatagaattggcatttgcaccaaccaatatagatttctgggtctcttgaattggatatgtatattatataaaatttaattatatattaagttatatgagacttgatacttaattgtactaataaagttataacatgttagaatgtgttaaacacaggcccaaccctaagtataagcaggctagacctgtgcctagaactcacctagctcaagggcccgaaaaaaaatttcctttaaaaaatatacaattttatcttactaatttttgaaaatacaacttttttttttaaataaggacctaaaattattttttttccgacccactaaatttcatattggtccttgttaaacatcatcattacattttcacatttctctatttttaagtatccaattcaagtttactttttttagggtaaaaattacccaaaatcaattagttgcaataccaaaagtatttgctatt

SEQ ID NO: 103558 - DNA, 500 bp, Cannabis sativa
taatttcatcagtatgaatttcgttagtgtttaaatttataatcacacttaaagattgtttagctgtatttttagttttcaatttttaaaattgtattttcaaaagtaacaataaaaaacaactttttatcattttaaaaatttaaaggtatttggtacaaattttttaaaattattttttagattttttcttattaagaaatttaatattctacatcattccatgacatgaacccatcctacccaagacccgaccccgacttgaacccagacccagcccggacccggacattggacaccgaacctgaactcggacaccggacccggacaccgaacaccgaattcggactcaaacctggactcagacccgaacattagaccctggacccataccctgaccttaaatcccagaccctaactccagacccgaacccgaacctaaacccagggctaggtttgaggtccttggcgggctccgagtttgaggtccaagttctctg

SEQ ID NO: 103559 - DNA, 1001 bp, Cannabis sativa
agagttaattattgagcgtttcgccttgattacatgtaataggaagatttgaataattgactgcttcagctttatctgcgggattaatagtttgactgaaaattgaaattatattcattaataggaattaagaatgatttttgagggtgacaaataacttttaactagtttctcatattgtagtctcacttttaatttgtttctatttttatttatactattttcttctaagcataaaaactccattttttaacttttgtcactaatttttgagtaattaaataaatatagtcctcgtgggaccgacccttacttacaattatactaaaataattagaggtattagaaataaatattagtaaatttgttgtgtcaaactctatgccttcacaagtggagagtaacccaacagagaatgtcaatggcatcactatccaaagtggcacacaacttgaattaccaccacaccaagaagtgcataagctaattccaactaaagcagtcaacaattcatcccttgaagaatcatctccaccaaaggttgaatctcctactttagttggtccaccatcactgaaaaagccatacaaactaattgtaccaacttatgtcactcctccaccttttcaaagtagattaagaaaatctaagaaagaggagcccatcaaggaaattcctgaagctcttcccaaaatcgaggtaaaaattccatgtcttgaggaaatcaaagaagagcctcattgtactaacattcttaaggagttgtgtccaaatgtgataaagttgaatggaggtgagaaaataagtgtgggggagaattctttcgttgttctccaaagaatgttgttacctaagacaagtacaattcaatgcaaatcaggtttgattattgcatgataaatttaggagcaattattaataatatgtcttattccaattttgcttctttaaatcttagctcgttaagaaaactcgaattttgattcaattgactaatcaga

SEQ ID NO: 103560 - DNA, 585 bp, Cannabis sativa
cttttttttttatcttgatatggcattttaatagatttcacattatttttattatactcattttaatttattggcaaaaaaatattctctttttcttattttgtgaaaaaataccattaaatttaaatttaaatttgaatatgtttaggtgtttattttgaataattatttaattaaattaaaaatatctttttaaaaaacttataatatatcttaataataaaaaatatcaatatataaataaagtgatggcaaaatacttgaataattgttcaaatgtatccatcaatcaaaatcgtatcttaatttatttttcaaacatataataataactaatttatttttcatataataacaattaattaattacttaaaacaaaacaaaaaaaaaaagagactattatataaaaccctaaaacattactaatcatatatatactattaattataactatttttttgtttgatgaaaatgtgtatcattaaaatttaaaaaggataaaaaatctgcaccaaaaacaacagcaaaaaaaagcagatatatacatgatatgtttttagttctttttctttattttttttttt

SEQ ID NO: 103561 - DNA, 594 bp, Cannabis sativa
ataccaaaccgtccctaatagtctgcaagatcgtacggatacaatattgttgtatagaaaattcttcatacacaatgaaaaaagtctgattatttgtctcattaaaaagtttaatttttgaacatttattgagtggtttgtcagacattataaatattaaagaattttttaatgttatagaaaaattatatgatactgttgaaaacacttaagctgtacatcttatggatgtaatgacaactattcaatatgataaatcaaagaatgcgagattttattttaaaaattatgaatgttcactccaagttgaaaaatcataatatttctcttcttcactcttactttatttatcgtgctcttcatgcacatcctgccttttttagctttatcaagataatctataacatttataataaagcatgaagcgttaatgacctaatttcttagtctatagttaaggaaagtaagttgtaaaagaagaataaatccttactatgtttctcaacttaagcccgataaataataaattataaaaagaagcaagcacaaccaggggctaaaggatctgaagaagtcaagtgagagggagtcaaa

SEQ ID NO: 103562 - DNA, 559 bp, Cannabis sativa
agattaattaagccatacacacctctggcaaatgcctactttgctacattatgaacagcaaaattacaagttctcaaaacaaaagaaaaattacaacttatcaaaaggttagagagtattttacattgatgcacatagttatcaataccccaagtagagcaggctccctttagcgtcttgataaccgttttcgaattgctctctattactacaaaatggtgcttcaacgaaatagctgttttcaaagcttagacttgccacaacttctctaattaggggatcaacgaatttgagcatgtttgacgccacccacaaaaccgtcccaaagtgatcccgagctaaggccatcgcacacattgaaccttcaccaactttaacatcacagttgactttgatctaatcttccggtggtggagaccaattgggggacacaacaaccttcgtcgaggtaaccaaacaagatccataacctgcgtaacaagtagaaataaaatcaatataatgcgtaatgttactctgagaattattgtgtactttgtcattacgggctcgccagatc

SEQ ID NO: 103563 - DNA, 885 bp, Cannabis sativa
  modified_base (26)..(39): a, c, t, g, unknown or other
  modified_base (426)..(427): a, c, t, g, unknown or other
ttaaatataaataaaaagtcacccannnnnnnnnnnnnnaccaagaattcagttatatagccacactttatatagaatatatatatctctcttggttctatctctctttctatgacagatcgctgatgatggagcctagacgatgaaggctaccgctcgcaccattggctcagatggaccccacctactcaccccatcacagtaatgttcttttttggggatttagttgtcaaaatattttttaattaatatggatttttattgagcatttaaattgtttttattacattgattttgtgcattttattgctcttttctatcttaagaaataatcatttttcaactggacttttctttgcttggaaacttcttgtaaaaagaaattctcttatagaaagttctctaattttgagaaacttgactttnnctttttctaattgatgatttcaattttttctttattagaacaaatcaaattatctttatttggcaagtttgaagtccaaatttgttatcttggttcaatttagaaagtttctttttttttttgctactgagaaacccgattctaatgctgcaaatcaagaatttttttaagaaagttttgtacagttggaaaatcgtttttgtggctgtctctagggctgctatgttatataaataggatctagagagcaacaaaatatttttatctcttcaagtctcatattttcatatctttctttgtgagaatagtgtttcatttgtaaaaacctagagtgttcaactagatttttgttttcttactatgatctcatactattcttagaataggttgaagagaagctttgaacaagcgtgggtcttcgggagaagacttttccaagtctcatttcgggaggaagt

SEQ ID NO: 103564 - DNA, 744 bp, Cannabis sativa
ttattatcaaaataataatttaaatactttttttttgaatggaaattcatcttttagtatagtagtaaaatatgttattgtttggtatgttaaattagactgaatattaattagaattaaattggattgaattatattagtactatattatgtttggtgtaggacaggactaaataaattataatttttttaataaatcatttatttttcaatttttttcataattaaagaataatgctaaataaatatttaataaaattaaaactttaaaagtaaataaaatataataactctaaaagttaaataatattttacaaaattataatatataatttaatattttaaaatttaaaattcatattataaaaaaaataacaaataaaaaattatttcaataaattttttaaattaatataatttattatttttaaaattttaattattaaaaagatttgacattgttatgatttgatcacttaacaaaaatattgttatgatttgatctttagaaaacttttatttaagtctacttaagatttttacaccctaaactttaacatgtatcaaatcatgacttctgaacttctctggccgttaaaaattttccttaaactattgagattgtgagtttaaagaattttatctaatttcattcaattttactatatcagtgattatttatgtactaaatcatgcttcacagactttgatatctaccaaatcatgtccttcaaactttgacat

SEQ ID NO: 103565 - DNA, 508 bp, Cannabis sativa
tgggtctcggtctaggttcgggtttggtaactagtcgcatttcaggtttggatctcggtctaagattttatttgggtttgggtttgggttcggatctgggtcctggtcgtggtccttgtcctagtcctagtccggttccggttccagttccagttgcgattccaagttaaaatttgggttcgagttcgagtctgcgtccaggtctaggtttgggtctgattcttggtctgggtctgagttggggtcatgggttcgggtccgattttaggttcggctccgggatcgggtttggtcctggtatgggttcgtgtctaggttcttgccgccatccaagtctgattcctaggtcctggtctgggtcaaggttcgggttcgggtcccgagtcttggttttagtctaggtcccggtctgggtcaggtttcctgtccaggtctcggtcccagtcttggtctgggttcaggtttgggtccttgttagggtttcgatcctggtatgggtcgtgggtct

SEQ ID NO: 103566 - DNA, 506 bp, Cannabis sativa
agttatttcaggcccaaaaatgggtccaatcagaataatggattaggtccattagcaagaacttattttcaaatggaagatagaaggcttgtctaggcgagatactcttccagcatagcatatattcggtagacatcaaacaaaacatttggagaagtaaacaacgagcatccagatgtctagctcagaagcattctcattaattacaagatcccaagatattacgaattaacttccacggatctcgtccgaagataatatcttcttaaatatggaaagatagtacttggaaaccaagcatttaatgtgtctttattctccacaaagatatgacacgtttttggcaattgtcaacatgatgtggcatgggcgggacttcaccaaataagcacatgttaatatgttacttgtaatcaccatatcaataggcaacaactaataagtaagaactttaaaactataaatatacgaaaaacccttcgtgcaaaggggttagaaactcattc

SEQ ID NO: 103567 - DNA, 514 bp, Cannabis sativa
caatcagctatgtttttgcaaaaattttgcccgaaaattgctgcagtaggcgagttagaggcttttcttttgtaaaaccaacttaaaaagaaaaaaaaaccaattttagagcctaatttaatattaccccacctaaaaagaaaagaaaaaaaatccttaatttctagcaaagcccaaccttatattcttctatctcccttcttcttccttctcaaaccaagccacaatgacagccactagagcccaaatttgaccaaagctccaccctctttgcctccatactcaccacaacctcgtccgtctgagaccccactactcattatccccgtcaataacccattcaaaaacctcccatacctatttcattctgcccaaagctccactgcgtccttttctccattcttcccagaactcgaccaccacccaccgttccccaactcacctgaaccttagaaatcacacacccctctccaatattcgacccaagcccaaaaccccaccattaccctccagt

SEQ ID NO: 103568 - DNA, 1024 bp, Cannabis sativa
ctgaaaggattgttgaaaccacgtacaaaaaccttgtgtgttttacttttctgcactgtttgtttttttggtttcttctagagttacaaaattatcttctgtagctacagaaaaactgtttcaatactagttttattattctgcatttaattaaataaaaaaattgagaatattaaaatatgaaatttcataaagtaactaatccaaaataaccgattcaatccgcacatttgcggattagattaaattgaatttgagcgttattgtgaggattggattagattcaaaatatgaaatctgcacttcgtgcgaatcggatatactatgagcaaaataatacgaattagattggttgaatacccttaactatttatattcaaataagacagtttttttttttaaaaaaaaaaatataaactctaaaaatatttacaacaaattcacttttatatcctactctatagatattatattgattaataacattgatagttaaaaaaattatagtttttcttttgatataaaactaatttaaaaacatcataatcacttatttataaacccccaacaactattcttttagactgtaaatcgaaataatgcaatatttggacttctttatgctgtatataaacacttttgactttcttcaaccaaatgaccccttattttactaattttaatttattttattcaaacagtgtacaaaaaaaatacttaaaagctatccggttgccagttttaatttactatttacccttagtttacaaatgagttcattcaaaccgtcggataccaaaaatataatttttctgtcaatccatttacttgaggttttcaatccctcaaaattaaatgagcgattacataattaagccttaataatattggggtaaattactattaacgaacgactggcttcactgcctcagccctagccttctatctccatactctctctttctcctcaatcgatcaaatcaaggactgcaatttttctttcttcttcacatactccatggga

SEQ ID NO: 103569 - DNA, 629 bp, Cannabis sativa
tttttctttaattttcaatcgtatcactttcaaataatatagaaaaaacctagcataaaatttagtatacgtgcctcgcacgtaattttttgctagtatatttatatatggatgaagtttcaatggttagatcaaatatgtaaccatgatggttacatttatttttagccatttgatcattattgaatgatcctgactaatttataaattaaataaaaaataacttgtaacttggtagtaacctaatattttatttccttataaagatttaattaagattaattttattttgaaattaaattaattatacttattttttttatttatttattttttttttttgcaatttgttagtaaacaaggtttttttagcaattaatttttttgcactaacattatttcaatatttgtagcaaaattatttataatttaaaattataacacataatcttataatttgatataatttcacaaagaaccttataatttaaaattattacacctaaaattaggggtgggcaacattcaatccaatctaattgaaccgaaccaatctattacaatccaattacaaaaaattggattggactgaatgctaaaagttaaattctaattggattagattaatt

SEQ ID NO: 103570 - DNA, 1471 bp, Cannabis sativa
aaattaccattcatttcaaacaataattttgcaaaagcaatctttgatctaattcaccttgatatttggggaccttaccccttaccttccattgaaggacaaatattttttgaccatcgttaatgatcattctagatatacatggacatacctcttacgagcgaaatcggatgccccacttatcattcaaaatttcttcacatatgtcaaagttcattacaaaacggatataaaatctgttagaactgacaatgcaaaggaactcacacttacacaattttatgcaagcaaagagatacttaatcatcactcttgtgttggtcgtccccaacaaaatgctgttgtagaacgcaaacatcaccacattttgtcagttgctcgagccttagcatttcaatcacacttacctcttctctattggagttacatgattaaaacagcttcctatctcatcaatcgaacaccttctgttttcttaaatgataaaacatccttcgagcttctccaacacaaagctccaacttctaatcgtttaagaaattttggctgtctagcttatgcttctcatgttaaccaccccaccaaattctctccaagagctcgagcatgtatttttataggataccccgacaacatgaaggcttgtacacttcttgatcttcaaactaattacattttccattccagggatgtaattttttatgagtcattttatcccttactcaatacatccaacaaaaacactactcaaatggacacttttttctcaacctcaaatcagcatcaccaatctgatgcctctcataacactgcagcttcatctgctccatttcagtcaattgccaaagaacagcttcctagtgttccaaacattactgaagcaacaactctatctgaacctattgcaacaacctctgagtcagctgcaacatccaacaaccaacctataacaactaccaaatccggtagaatactcaagaaacctggtttttttgcaagattacatatgccaaattcaacaacaaacaaccagcacataataccctattgcaaattatatctcctaccatagactctctccaacttttcgagcagccatccatgttgctcacttaattgaacctcgttcttatgcacaagcttgcaaagacaaggtctggaacaaagccatggacactgaaatagatgcccttgaagccaataacacttggatcgttgtcccacttcctccagggcaacatgttataagcaacaaatgggtgtacaaaatcaactacaacccagatggctctgttgaacgttgcaaagcaagattggtagccaaaggctacactcaacaacaaggggttggatattttgaaacatatgccctggtggccaaattcaatactcttaaacttctatttgcacttgctgctattaacaattggcatctccaccacatggacatcaacaacgcctttctccatgg

SEQ ID NO: 103571 - DNA, 555 bp, Cannabis sativa
  modified_base (27)..(32): a, c, t, g, unknown or other
ataacagaataataaattatttaaatnnnnnnaaataatttcataattaatcaagattaactgctaatttccaaattaaactaagcggtctttacaggcagccccctcttttcccttccaaacaccattttcaccatcccaaaatcccattttcactacgaaatcattgtttctatctttttcttctttttttttttttcatttttttccaaaaaaacatttgtaccgggactccaacgaggacgtgccgccgcacctctggcaactgctgcccgagccgccacccaccacccatcacacctccgctccagtagcctatattttctctattttagttttattgaatttattttttatttgtgtatatataataattttagtttatttgtgtataaaattgtgtttagttttttaagtttttatatatatgtgtaaatttttatagttttatgtgtatttttataaatttgtgtgtatatgtgtctataaatgtatataatagtttatatatgtgtatttgtatatatatgtaaatgtatatatatatgtgtatat

SEQ ID NO: 103572 - DNA, 539 bp, Cannabis sativa
gctacgaaaaatattgcaaacataataattttaatttttattttatgattcttatttctttattttttatttatattattattgtaatataaaatagtaaaattcaaataataattcatatatgataaactagcttatatacataatatatttgccaacagttataataatcattaaaaatgaatttctctaacaattgttaaccataatttaaaataacttttcctaatagttgtaaaccatgtcttttaaagtttcacatttttataacacccacatagccaaaagttttgaaaacagatgagaaatagtaaaagaaaattataaactgatggataaaactaattttgtagtagtggattaaaataagaatttttatttaaatgtttacaaaatattcaaaaaatttatattaatgaataaaaaattaatttatgtttattattatatctctgaaactgaagttgtcactgttacatcacaccattcttaggataagcctaaagaatagcttaaaccatcatatatatggtcgacca

SEQ ID NO: 103573 - DNA, 655 bp, Cannabis sativa
tttggaaatgtgtaaccgaacccggttttcgggtgctcgggtacatcgggtatcgggtcaggtgtagtcgggttcgggtcttattgggctgagcctgaatatttaatttatgggctgaaataaaattttatttttaaaaatgtctttttttttttatttttaacattgtttgggccttttagataatattattataatatgatattatgattattttaataaaaattatataataataatttattatacaaaatttaataaaatgatttatatataaaacaaaagttataaaatcatataattgtatcctatcagataatcaatgatatgttcatattacataaaaaaaaaaaataaacagcccagtaacaactaacaagtgcccagcccaatcaatctattaagtcacggtggtcaccaatgttacgagttacaacccgatcaaaaaatacaatatttcccatacccgaacccgaaacccgtgtggggtatttttgggttgaacccgaccaaaccacacgggtttttaggtttttggtttttttttggcggcgggtcggggcgggtggtcgggttttcgggtttgcgagtcttaatgttcagcccaaactggtgttatagccaatagtaaagaccctcgaagccacaagagaag

SEQ ID NO: 103574 - DNA, 529 bp, Cannabis sativa
  modified_base (27)..(31): a, c, t, g, unknown or other
agaggtatgtttcaaataaatataaannnnnaggtaaatttgattaattgatgaataaaagaggcatttttcaacttacccccattatttatgtaattgagatggtaaatagcccaataataagggtgagtaatggttgcttgctagggtttgaagtagtgcaggcccatgtacaaaagcccatcattatataatacatcttgaagtagcatcttcgcagactctcatcaagcaattaaaaggaaaccgcttctgctcacagcctccattgtgattctcagtttcaaccatggcgaccggaaactccactgccccgccgcgtcaactttctcagaaagaagctgacattcaaatgatgttggcggccgaagttcacctgggcaccaagaactgtgattttcagatggagcgttatgttttcaagcggagaaacgacggtagattcatcttgattgttttattttctgttaattttgtttcgttactaagatgaatattcccctctaaaaaaagtgtaaaaattagtcct

SEQ ID NO: 103575 - DNA, 769 bp, Cannabis sativa
cacacgtaatattcacttaattaaatattgggtcaattcagatcagattattattattacttgctataaattaatattattttcagctgcttattatctatttaatatttattagtttatttatctatataacaaaggatatattctactttatagtttataattttaacaataatattttaaaaaatatattaaaaagcttttggcactcttcttcttctattatcatccacaaattattttgcttttactaattttgttttttgttggttaatttgagaattagcaacaaattaatgaagttactttgtttttactaaatattaacaaaatataaactcttaagaatagacaatagaaatttatgtttgccaatacaaataatatatatttatcacccactaaataaaatttgttagtcgtgactatctataattaatgaatacatatatatatatatagctaggtctaagcttgtgggaatgatattctttctttttatatctatatacataaaataataagcttatataatttcctttttataaagctatatatataggtatgagattatgtatatttggataaattaatgtataattttgtaatcaattctaaatgtgtgaaggttttaatgggttgtgttgagttctccattaatacaaaaatggtaattaattaattaatggtgataataaaaacaaaggaattgatggcgtcaaatataagaatgaacacatttttgaataaatattaattaattaatcat

SEQ ID NO: 103576 - DNA, 813 bp, Cannabis sativa
tgcataagcaatcactttccttgactgcataagaacacaacctaacccctgtttggatgcatcacagtatatcacaaacttttcatcacttactggtaaggttaatacaggagtggtaatcaatctttgtttcagttcgtggaaactactttcacacttatcagtccaaacaaagttgcagttctttctggtcaattctgttaagggcatagaaatcttggcaaagccctcaacaaacctcctacaattccctaccaaacccaagaaacttctgacttcagttgccaatttaggtcgaggccagtcttgtaccacttcaatctttaccggatctactagaataccatctttacttaccacatgccccaagaaactcacttgaggcaaccaaatttcacatttcttgaacttggcataaaatttatgctccctgagatgttgtagcaccatccaaagatgtctttcgtgagtctcttctgagtctgaatagattagaatatcatcaataaagacaataacaaaatcatccaggaagtctttgaacactcggttcatcaagtccataaatgctgccggggcgtttcttaattcgaaggacattaccagaaattcatagtgtccataccgggttcggaaagctgtcttgggaatatccacttcttaaatcctcaactggttataaccaaatcaaagttcaatcttggagaagacagtatttccctgaagctgatcaaataagtcatctatccttggcaaatgatacttgttcttcactgtcaacttgtttaactcctggtaatcaatgcacattcg

SEQ ID NO: 103577 - DNA, 672 bp, Cannabis sativa
atccatggagattggagtgggcatcaagatttgatggggtactattctgtgcatcaacgaagaacaatcccttgcagccatggagtttgtacaaatggagatgttgctactcattgtagtagtcatcacagtcatgcacttttggaagattataataaaagcacttctgcatttgaagggggaaaagataattattggatttggtttttaggttgtgtagttatagttgtactctatataatgctgttctgaaatgaagaaggttaagaattgtactattaagatttaatgtatgaatgaatgactcttttttgtagtgatattgcatgaattgtgtggactttaatttataattagtataatacaaaggtaaatagtcatagttttgaacattaccattaattcataccatacacttaattaaaagatacaacccttaaccatacaataaatcaaaagatacaacccttaagtttgcatcatcagatacaaagttcttcaaaagacataatttgtaccctatggaataaagacattgaaatccttatccaaatacataaagtttcaaaaagacctaataattgtgctttttaaacaaaatacataacatagtttaatggcatcaaaagggtggacacaaaatgacatcaagtccaccaaattgccacacat

SEQ ID NO: 103578 - DNA, 573 bp, Cannabis sativa
atagtacaacaattaagaccatatcccagtcttattgtgtacttatcactttgaaaagaataatacacataaaaaatgactgcatgttattgtgcatgcatggattaatctctttaggtgttttccactttaaagctttctaaagcataaaagctttcaaactttgatgagtcaaaactttgagagactatatttaagacattcctatgagaaagatcttaacaaaagagtaacgaatactcgatatctctcaaaattttatacatggtaccgtagatcatgaaaatcttgtggacaaataacttatatgatctgcatgtgttttatctttagataagacaagactttaattcgtctattctctccatttgttgttcaaagttgatactaagccatccacgttactacgtggaaaatatatttagaattcaatcaatccaaaattgtcatctaattataccttagccatcttcaaattttggtagcaacaataatgtgatatagagtacacacgtattaacatgattatcacatcaaaaaggacaattataatcatgcatctattgtaatatt

SEQ ID NO: 103579 - DNA, 792 bp, Cannabis sativa
gattctattgatgatcgagctacagctatctattttcgagaactccaattgatcaagttacctccaagaaagatgtagaagccacttgttgattttctatcatcaaggcttaaggcccaatctacatcagagtatctttcaaggttgagaagagtggatggtctgaagtgaacacccgagatgaggagtccctttgatgtatttgagtattctttttacatacattccaatgatttacagtaggagacttgagatattgacttaatttgttgactgattaagcaatatcaggtcttatcaatgtgagatattgtaaggctcctatattgtttttatagatttctggtttgtcaaggctgggactgttatcttgggagagtttattggccaagatcattggtgtgttgcattctttggcaacttcaaagtttgttttgttgagaagatctgcagcatacttggattgagtgagataaatccctgaagcatttctgtaagcttcaaacccgaggaagtaactgacagatccaagggatttcagagaaaacttgttgtgcagatctatgatcaacttggagatggtatttgaattagcacatgtgattaagagatcatcaacatatacaagtacaaggaacaatgaaccctgctaattttcgtaaaataaggaagaatctgatacagatattttaaatcctcaggttattaaagtgtcttatagggtgtcaaaccaagcccttggtgcttgtttgagaccatagagggatattgttaattgacatacaaaatcag

SEQ ID NO: 103580 - DNA, 586 bp, Cannabis sativa
taatttttatatatatttatagtttttaggcataacaatataaaatttaaatattcatacaaattaaattaaaatacattggatgttagatgtgttgaatttttagatactctatctatctgatctaatccaattggatgtttaaaaatagagtaatgctaattacaacctcttaatcaatttttacgtccgaaatcacatgtcgaaatattttttttatagcgatattcgttatagttatagtatcattcctgtaaatttaaaaaattccaaagagtttacaataccgaaaacagagttcctgatattccagtttaccacatgtgttcaaaaaactttaaacgtattttcagtactgtaaactaaaattaaaaaaaaatatttcaacatatgttttcgggcgtgaaggttgattaagaggttgtaacaggaagttgatggtagcgctcctcttaaaaataacatctaatccaatccgatcacaatttaatatctaatatttgacgatcaattataattaaattagtcccttattagaattaatttatgcatactcctattttttaagtataaataagtttgattg

SEQ ID NO: 103581 - DNA, 600 bp, Cannabis sativa
  modified_base (32)..(55): a, c, t, g, unknown or other
atcgttctagaaagttcatatttaggatgttnnnnnnnnnnnnnnnnnnnnnnnntaagatcctagtaaaataaattccaacattaggcaaccacgttacaaaatccattgtaatttcctcccacttccactcaggaaggaccaaaggttgcaataaccctgccggcttttgatgttcagcctggatttgctgccaggttcagcatttggacacgcagtccaccacatctcttttcatcgtataccaccagaagtagggcttcaaatcctgatagattttggtggttcccggatgtagtgaatagggtgtggtgtgagcttcatcaattatctccttcttaagctcattaacaacaggaacacaacctcgatctttatataacaacattccactgttcgagactgaaaagtctctaggccgaccagccatactctcatctcgaactttaagtagctcaggatcctcaagttgagctcttctgaccctctctaatagatcagattaaagtgtcaaattgtgcaactttcaaactacaaactcaatccctacactaaccatttcagaggctagctgaggggctatcagaaccgtagtacaaa

SEQ ID NO: 103582 - DNA, 544 bp, Cannabis sativa
ttttttattttatatgcatataaaataaattgtttaaaaactattttttttttgtatattgtgacttattataaatctttcaaaattttaacgtcttaaataactataatatacataattatatgtataaaaaaaattggattaaagtttttcctaaataacgaaacagataaaaggtgtatcagtagatcatttttaaaagatgtattaaataatagagaattgttaaaaagtattattgatgtctagtactcttgtcggtattatatcgctggtgtagttaagtattggttttaaaaataatttttaagaaatattactaactaatagctaatcgtagaacgtcgtctatagaaagtactacatactagtatccaataacaatacttgttaaaacttaaaagatattaatgaatttcatataatctaatttaataatttttaaaaaatatgattcctaaaatgacactcatataaataatgtaaaagcttactagtaataacaacaatattccaaaattatatatataaatggtatttagtt

SEQ ID NO: 103583 - DNA, 636 bp, Cannabis sativa
actattttataaaatacagggtccattttgtcatttaataaaatataaggtccaattgataacttttgtaaaacagagggtctaaaatggtatttacccattcttttatatttatgtttatgtcatttttaatatcttattattaaatttagttattgcttaaaatttcaaatcttatacatttttttttattactttatataataaaataaataataaaattatttttttatgcttttaataaaaacattaatttaacattaaattttacatcaagttttataattgtgcattgagcacaatactagaaattaatgtaaatatatcacacaatcacttaattttgtatcaaatatagcataagttttacatcttccggagataatcttatataggcaatcaatcatatgatattttttttttctttccataatattttacaaaatcacatttgacaaaatatatgtaagtgtagggtgtttataaagtagatgatccaatctattccgcacaatttaatccaatctaatctaatctgcaaagtgtggatatctccgcacttgtgcggattagattggattgaaaaattcaaaattagatgttgattgacatgtaaaagtaaccgattcaatccaa

SEQ ID NO: 103584 - DNA, 681 bp, Cannabis sativa
gtatatcttaaaaaatataaaaaataaagataaaaattaaaacatgcaaaacaaaataagtatgcaatgtaattttctcgtgaataacacgagaatcattcgtgatctatatagtaagttattgttacgtgcctctcgaaagccaactgtgccactttgatcaaatcagttggtctcactctctctgtatatgcaatgcaaacgataaaatttttgaaaaaaatggcgtccaagattgatgaaatgatcagggactttttgtggggaggtgataaaggtaataggagcttatatctgaaggcttgggacaaattgtgccttcccaaatctagaggggggctaggacttcaaaaagtggtggagatgaataaaacttttatggctaagtgggattggctgctgatcaatgaaaatcaatcgctttgttgcagggttcttagagccaaatatatgaaagatacactttttgaattgctccaataagaattcagattcctggttttggaatataatgttgtcaaagctcaagatgtcttaaagaaaagtgcatgcaagcttattaacgatgggaaagatacaaatatttgggaagacccgtgggtatcccatgaaaaagagttcattccaagaccagctaccaatcatcctaatgatgtacgaaatgtttctgatatgttgtta

SEQ ID NO: 103585 - DNA, 624 bp, Cannabis sativa
cttcagcttctccttatttcaagacccaactactaactcactcaaccagtagacaaaaaacagttgcagtaattgtagtcttgtagagcaatagaagagtagcaaaacactagaaaattgtttgactactcaatttattgcatattgcatacccctttaattttccttaatatatccaatatatatttaacttattacctctcaaacactcatcttaatataatgacctaatataaatcttattaactgtctcacattgattgtttgcggattccattatcaaaaaaggtattcacagctttatattgtttgttcatcctttaaaactctcttttaattttataataattttaaaattatttaaacttgttacaaaccataagaatttctaaatgggataatttaaaaaaaaatacataaataataaaataaaaaaaaaattacaaaattacgttgtacaaaattttaaatctttttatgattttatttacaaaaaatacaatattctaatacatttttaagttgtactcttattaattttctgttatttgtaagttattttttgtcgttgtttgaatgttatatttctattactttatataatttttttattattttcgtatt

SEQ ID NO: 103586 - DNA, 880 bp, Cannabis sativa
tggctacaagcctagctttaaaaggtctctaccttcccttcaacattttttttcttcttaaaaatccacttacacccaatgggtgtaatatcctcatgtggaattacatagaccttgttggtgcgcatggagtccatctctgaattcatggcattgttccacttgtctgagtcaaggtcatccattgtttctttgtaagtcaatggatcatccttgtctgtgtcagagacaagaacatgtgcttcatgtttgtagcagacaaggtgtttcacaatcctcccactacgatgatgtactgtggtttcctttttaataactgtggtaacccaacttttaaaaaaaatgttttgattacaaaaatataataaatttatttgtactaaaactatatttacttatttattatatattagaaaaataaaaaaatatataaaataaattgattgtaataaaataaacaataattaaatctcttatttttttaaaaaatattttatattttactttaatattaagaaactatatcaacttagaatttttcttatatacttgagtttctgattttttttatttacattttaaattatttttttatcaaatacatataaatttaaacttaaaaaaaaagaattaaaaatatataaaaaatataaatattatataaaaaagtttttatatatttgtgattataataaactagattataacattatcattatcattataatagatgttaacaactcattgaattcacagtactttgaaatttataatttaccaaacactcaattcagtttttttcttcacaatttttctaaagctaatttttctcacagtatagctgaactgaccctaaatgcttgagagtctactcacccat

SEQ ID NO: 103587 - DNA, 552 bp, Cannabis sativa
cgcccacgactgaaccaaacctacatacaatacaattattaattactaaactaattttaattagaaaaattaggatttttacttctgaaatttgagatgtgaatttttaaggttgttaaaaatgcttcttgaactattgagattgttgtatttaaggacttttgtctaattttagttgaaaaaatctaacatggatgaaaattcaggggagattatctagtatatgtcaaggttcaagtgacatgatttggtagatattaaagtctggggagaatgatttagtacataaacaattactaaattagtaaaattgaatgatattaaacaaaaattcttaaatctaacaatcttaatagttcaaggaaaatttttaatggccaaaaaaatttaagggacatgatttagtatacgttaaaatttaggagtaaaaatcttaattagccttttatttattactattatttttactaaatattattttcatctgaaattaagtccacaataaacataaaaataatctcaaatttgttgttaatactctatagtaaacta

SEQ ID NO: 103588 - DNA, 616 bp, Cannabis sativa
accatcatcatcatcattatcataaatggatggccctgattttgcttagatttttcaactttgaatatggttaaggccaacaagtccttaataggttaggtcattgatgggaggcttacttagtcttctcaattctttgtagcttttatatgtctttgtaattctcttcacacttaaaatgctaaatctctagtcccttgacaaagtttcatatgggattatacaaaaaagacttctttcttgctttgttaactatctcaattgacagaaataaacaagtcattaattaccttttaatcaatgcatatttctttttgacaattgtcttaatagacttatgtatatagcattatgttctttgcaaatatttttaaagttactttgcaaagaaaattaagtaacctaacctaattccaactagggaatagagatggaaacgaggcggagaattggctgggagtgcaagcttgtatcggtctttgttaacctaatctaatctaatttaaaaaagttgggtccttatagttgtttcttttttttacttttgcttctatggtagccagtgacgaagccagaaatttggctgagtgatgacttgaataaatattaagtcaaa

SEQ ID NO: 103589 - DNA, 513 bp, Cannabis sativa
tttaatattgctagcaaactttaaccctacgatcataatcaataacataacttttggtacgtattattatttatctaatttaatattggatactatattttaatttaaaataaaatatgttagaacaatgctgagatatataagttgagaatgttcattgtaagttttagtttgtataagaatgtggattaggaaaatcaagtctgaaatatttaatttaatatattcataaaatatttttgtatggtatttattgttaaaattaaatacatgctatattgtgttcaatcaaactaattttacataaaaatttaacggaagaatatttaaatgttaaggagtaccttaaggtactaagtactaagtaccttaagagatgtcatactgttattgatgcaatttaatattggatctcacatatttatttaataaataataagaggaattgataacaacttatcacatcgatatagtgttggataccttaattacctaatagcaatgttttaattt

SEQ ID NO: 103590 - DNA, 613 bp, Cannabis sativa
tgacttgtattaattgattgtgtaaagttataatatatttttaatacacttgatcccaacaccaactatggtctgggtccaggtcacgggtccgggtcccgggtcggggttcgggtccaggtccggatctcgggtcccgggtcccgagtcctgggttcgggtcctggtccgggtccgagtctgggtcccgggtccgagtccaggtcggagatttgtgttgaccccaaatcctttgtaaatattataatacaaactaatacggactatttattatgtattaaataatacaacatacattgtattaaaaaatttggtcgtaatatacgttatttattatttaatacaatacgacccttatacgacgtaccaaacgagtccttaatataaaaataagagatttttctaattaaatacaaaaattaaacataaaacttaaattttcttaatattattcattaaaaattcatccgtgtatatttaagtgctaaagaaagaaatataggacagagaaaatcagcacaagaggttccgattctatgcaaatggctatatagctgttaaaacgtacgaaagcaaaacaacatgtacatacatacagttgaatcaagaaaag

SEQ ID NO: 103591 - DNA, 520 bp, Cannabis sativa
ttttaacattttgattaacaagagcaagattaatagaagttacccttggattatcatcatttgggagccatggatctaacaagacattaatccgagaaccatcaccaactctacaccttgccccttttcgaacaatcccttgagtttcataaatactacgccagacaaaacttggaatgctacctaactccgcatttaaaaatgtattattgcggtagtatcgagctttaaaaatcttactgacgagagagtccggatgactaaaaagtctccattgttgtttacaaagcaaactcaagttaaagtctctcagatttcgaaatcccataccatctttagacttatgtaccgtcaatctatcccactttttccaatggatgcctttgttatttttagacgatcgccacaaaaatttacacatcaattgctccatctcattacaagtttccacagggagcaagaaaacattcattgcataactaggaagagattgggcaacagtttttatgagcaattcctt

SEQ ID NO: 103592 - DNA, 538 bp, Cannabis sativa
tgaaaagtaattaatagggtgatatatcattaaggcaactatatatgtgcatatattgtagtattcacaatgatataaaatatcagaaaattccctgcttttgactgttaccgtatatttataactaaactcatgacagtaagtaacaattctttcaaaagaaaaaaaaaagtaactagtggacaacttgtccagctcactccttacacttctaactaattgacacactaaaacacttatacttgatagaagctcacgaccaagtcctatttgatatttccaagaaagaaaaaaagagagatgctattgtgtaattaaagtttaatagctattacggaaaaacaaattatcccatatattatttttcaacttttttttttatttatttttacagtttgagttgtttcggtagttgctattttgtaaatttaaattacgatttaaattattttattaattgctacgtgagttgctagcgttttcgtaaaaatatagaaaaaaatatataaattaataaagcatgatgatcctagttaat

SEQ ID NO: 103593 - DNA, 525 bp, Cannabis sativa
tattctagaattgatttgttactaatgtgactaatgtgtttgtgatattgtaatctaagactattttttttttttttgtgagtggcaaaaatgggattttgtcaaataccatcattaacaaaattaaatattaataaagtaccacaagcaactgctgactccatagcttataggcaagccaaaattgtggtactttataagatttaattaatggcaattttacacatctcacatgccttagaaagatgaaaacaaatataataataataataaaagcaatcttataggatgtcaatagcttatttgaataaaaatatagggttagtattctcataacaataatccaaaataaaattaaggaaaatatatgcacttaaaattggattttttccttttacatttttatatttttaaaagtttttcagaaaaaaacaatcctttcaccttggtttttcatagctgcaaagtaaaaacaacgaaacacaacattctgcatttttctaaaaagaaaaacttaaaatccat

SEQ ID NO: 103594 - DNA, 536 bp, Cannabis sativa
  modified_base (64)..(66): a, c, t, g, unknown or other
tacatataaaaagaggtatatttcaattaaatataaaaataaaggtaaatttgattaattgatnnntaaaagtggtatttttcaacttagtaacccgaactttaaattaggttaaaaaatatataagataaactgctcaaaccgaccgatgtacaactctagatttcagagcataatgttattactgttctaatagtatgtattataacttaaaagatagtaaactaagatactaaactgtactcgcaatcattgaataataacttgaaaaaaaaaaaactaaaatgcagaaaatgtgacaaaatatactaaagaaaaacacccaaacttacccacatggaaattttgcaccatgtgtgaaggattagtcttagaccaaggagagaattctagggaagtgttagcgagtcaacttggtattgtcacttggccacacaaactattcttacctactttaataatgtgatcttctacacatactagtcttacctactttaacaatgtgatccgttataatagaaacttatatatattgt

SEQ ID NO: 103595 - DNA, 549 bp, Cannabis sativa
ccttcagtcgctcgagttattgggaagattgaactgatcataggcatcttcttgcccctttatatatcgatgaaggtgtccttgcgatatgagactttctatctcatctttcaaccgacgacactcttttgtggtatgcccaatatcaccatggtattcacaccgcttacttggatccctcttgtgcctcacatgtttcataggtattggctcgccaaaaatagcttcttgtacgtatgcaaggtagatcttcttccgagtttcattgagctcggtgtattcggtataaagagggataaacttgttgggtttcctgtcattatacagccttttggaatcatcttttttcattgatcccgaggcttccgaattaagttctccaacagtatcgtgccccagttgtctcctgtgtttcgtgattcgatgtgctctggacttattctccaacccgttcatttgtaaatggaatgaatccttttgtcttgaatcgagtcgttgacggaggtcaggctttttcaagttcaaatgctctcgtagatcactctcgtc

SEQ ID NO: 103596 - DNA, 523 bp, Cannabis sativa
aaaaaataaaaatatattatttatctttcaagctaaaaaataatatagtttaaattaattttaagaactttaatataagataaatataattgagtaaacatgaaataattgaacaaaataataaaaaaagtactaataatgtacagattataaacttcaacttcaatatccaaataaaataaaaattattaattataaagtctagattttatgttacacactgtccaaactttaaatacaaaataatttgacttataaatgtaatttatgtaatatattatatacaattttattaaaaaaatatataaatcggtttaattcagtttattcgggttaattgagcggtttaaaatattttataaaccacccaatatattcattgggcagtttgaattttcattgtactatttcgagttgtattttttgtcggtttattcaggttgggcggtttgtaaattttgttgaaacccctagtttgcccctctataaaccttgttatttttcgtaaaatcattagttcacc

SEQ ID NO: 103597 - DNA, 902 bp, Cannabis sativa
tcagatctcactgtcatcttgtgagtgtggtatggccttaagtatggaaaacatgaacacccaaaagttttcaagaaatcatagtcaggaggcttatgaaataaggtctgatatggagaaatctgatctaacacaggtgtaggtaatcgattgattacaaaggtggcatgttgaaaagcataccaccagtaagagagatcaagacccgactgtgctagaagggtcatgcctatatcatttatatgcctgtgttttcgttcagctcgtccattttgctgatggtcatgagggcaagaatgttgaaattgaatgcaattatgagccaaaaatgcagcaagagatctatactctcctccccaatcagattggacagatttgatggggaggttaaattgtttttcaaccaatttcttgaactgtcggaatgtaggatatgcttgggattttaaagtgagagggaatatccatgtatacctactgaaatcgtctagaaaatgaatgtaatatcggaaaccttctttggagggaatgtgagaaggtccccatacatcagtatgtatgagttcaagaggaatagaggccctactgttggacaagggatatggtaatttgtgactcttgccaattttacatgcatcacagaattttaaagtttttaaagtgcctgtatggttgatgttggacagaacttttgagagagttgcagggcctgggtggcctaatttggcatgccaaatattgatatcctgtgcaacatttatatgaaaaatctcatgagcagattgtatggaagaaccggaaataggattttcattaatatggggttgagtacaatgagtaggggctgttgagacagccgctttattacatgggacaagggctgagatgctttagtggcaaga

SEQ ID NO: 103598 - DNA, 670 bp, Cannabis sativa
cccttttaactaacatacagaattgttaagtatggctactatctaatatgcttcttggtgttatattattatttgtacaattaaatagtaagtcttataaaatttaagtaaataatttttcaaaaatatcactaatcaatcataaaatatatcacttatagaaagtattaggcaccactatagtgtctaataataatactcaactaacatgtatcaaatacaaatatttttgttgtaaaaaaaaaattacaatgtaccctctactaaaagaggtatatgctgatgcatttttatctgcatcaatatttgtgaaaaaaattaagtttaatttttttatggtcgtctacgttataattattatcctgcaaaattttaagaaactcaaaaaaaaaaaaaattaacaagctgaaaataaggttcaaacaatctatttcggatgtgtataatataaaagagtctcgcgtgcaataagttatttgaacactgctttcgccgtattaaatttttcctaatctctcaaaatttaaaaacatcttaaataattacgactaaatttcttttttctaaaatagtaaaatagatagaaagtgcttcaatagatccttttaggtggtgtgtagctatcatttctctttattgatatcatatcaccatgttcccatgcatttat

SEQ ID NO: 103599 - DNA, 550 bp, Cannabis sativa
gagagagagagagagaaatttagagagagatagaaaagggaaggtggtggtggtgcggatggtggtggagatggagaagacagaggaagaagaagtagaacaaaatggcaaaatggaaagggcttcagccttgatataaaaagacttttatcgtcacatttcattgcaccggtaaaagtctttattgcgctgataaaaatttaataatttatcctaaattaaaacacattgttttaaaatacctttttcgacacacatttatgccagcaaaagtctccccacctgccacatttctatgcaagaatttttctactttttttagaacttttgccagctcatatctgcaccaaaaaaagtctaatttccttgttaaaaagttaattttttttcctgatatccttttgttggcgtaaatatgcgccagtaaaagttttcccccaacccattttttacatggcaaaattgtcgccaaattgttttagaccttttgccggcgcataattacatcggaaaaaggtttacgaacattggaaatggctcgcaccataag

SEQ ID NO: 103600 - DNA, 504 bp, Cannabis sativa
tactatgtgcctggtttgtgaaactgagtttgaaactcattaccatatctttttcagttgtattttttctaagcaggtctgtgaggaggtgaactcttggctaggagtttatcattggcctagtttgattgctgatctaaatagcaggagcataatcaaggtgaaggacctccgaaatcaggttcttaacatggtgacagcaaccactttataccagctgtagaaaaataggaaccgatgtatctttgagttgacttgtgcttatcctagaagtcttagtttggaagtgaggaatgttgttcaacttagaatcatgagtaaaggtccttttaaatttttccaaagaaacttgtatttactcaatgtaattaagaattcgtagtgtgtttgtgtggtggtttctggttgttttggcagctgtcgtgctgtttgtttcgacttttgccttatttggttgtagtttgcttatttaacaaaaaaaaaaaaaaattaaaccttaaaaaa

SEQ ID NO: 103601 - DNA, 508 bp, Cannabis sativa
ctttcttttgacctgttaaatttctagaccgaacctacttagtaattattattaattcaacaagaaaaaaaatgttatttgttgtattatgcaaaaaccacattggatgtaaatgggtgagtagttgctaaaagggtattattattaggccttattattactttgtgtaaggtctcaacattggacagtttctttaagactaggtttttttttttttttgaaaattacataaaatatgagatttgataaaaaaaaattacaaaaatatcaaatatggctcttataagtttgccactttcctagagtatctttttacatttaaggtttttatggtatttaatagggaagtttacacatttatactagtaagagtaaataattttaaatttgttggagaaaaaataatgggattattttacaaatacacaaaaacaacaaaaaaaattacaaaaatacgatttcacggaattttgaacatttttacgatttttttttaattttatttaca

SEQ ID NO: 103602 - DNA, 636 bp, Cannabis sativa
tgaagcagtgaagaattggcctagaccaaaaacagtcactgaagttcgaagctttcttggtttagcgggatactatcggcgttttgtggaaggtttttccaagattgcaatgatgttatctgacttaactagaaagaaccagcggtttatatggtcagataagtgtgagaaaagctttcaagagttgaaacaacggttgatcacaactcctgttttagccttgccatctgatcaagagaagtttgtggtgtattgtgatgcgtcaaggcagggcttgggctgtgtgctaatgcagacagataaagtcatagcttatgcttcacgacaattgaaagattatgagcagcgctatctaactcatgatctggagcttgctgcagtggtgtttgccttgaaaattttgcgacaccacttatacggtgagcggtgtgagatctatactgaccacaaaagtcttaaatactttttcactcagaaggatctgaacatgaggcaaagaaggtggttagaactagtgatggactatgactgtgaaatcctgtatcatcctggaaaggcaaatgttgtggcagatgccttgagctggaaaggacctgattagattttcaatacagtaatgatttctcctcagttagc

SEQ ID NO: 103603 - DNA, 548 bp, Cannabis sativa
aaatgcataagggtgttaatgctacgaatattgtgctaatccataaagtccaaaatcccaaaagaaccaaccaatttagacccatatccttatgcaatgtgacgtacaaggtcatttcaaagaatattgcaaaaagaattaagcttatcttaccttctctcatttttcctactcaagccgcctttgttccgggaaggaacattcaagataacaatgtgattgtgcaagagatcatccactcgttcaataggaaaaaaggcaaggaaggtttctttgctattaaaattgaccttatgaaagcctatgacaggctgagttggagatttatagaccatatgctttcttgttatggaattcttttgaaattccgcaattgggtctctcaatgaatcattaccacatccctcaacatctgtctcaatggagggcaagttggcacgattttgccctcctgtggactgggacaaggtgactcgctgtctccttacctatttatttgggcgggtgaagttttatcgagactattagaggatgccctgaataagggc

SEQ ID NO: 103604 - DNA, 756 bp, Cannabis sativa
gtttgtctaaaagtgataattaaaggtaccattggttagatactttaataagtgtggtacgagagaaatattagaaacctgttcactggagtaacacatgtgagaaaagaatacgatggaccaaaaatatccaaggaacttataaaaccataaagtgaattcgagttgtatgctcgcttcattaagtacacaaaaaagctacactgatttaaagcataggaatatcgagttccaaatgggagattttgtttttctctgagtattgcctataaaatagatatgtagagagggaagttaaaccctatattcattagaccttttgataccagagtaagtaggctacgtaaccaatcagctatccttgtctcctgcattgttcggagtgtataatgtgtttcatatagccatgctaagagatatgtatcagactcgacccatattttgagatgtgacgattttaggccttagacaaatttattatatgggaaaaatatcttgttcaggttttgaattggaaaaagaaagtaatatggaacgaggtaattctactagttaagaaagtgttgtagagcaacaacaaggtggaagaagcaacttgacagttagaatcgtgaatacaggagtaatatcaggaattgttcatgtaaattttgaggagaaaatttctataaggaggggatggttgtaatatcccagaaacctaattatgaataattaggatttattatatagtatgggttaattaggtagtaatga

SEQ ID NO: 103605 - DNA, 675 bp, Cannabis sativa
agagagttgagttacatacccttttatacagcaagagaattacaaagacaaaagtattaactaactataaccgtgactaacctattagaacatgacacctacgttaactaactataaccgtgactaacctattagaacatgacacctacgttaactaactacctatagtaactgtcaggacattagttagacaaaccagaaaataacaatatacatcttaattaattactacaaaaactttttcagtcacaacaaaaatataaaaaatttgtgattaattataaatcattatttttatgttttgattaaaaagtttgtggttaaaagtattagtcacaaaaattataatttattgtgactaaatgtgtttttagtcacaattcacaatagtatttgctgtgactaaaattaaattgacgacaatttgtatctaaaaactatattttaatcacaaataattttttttttgtattttttgttgtgactaaaaggtaatattgagttaaaaaaaattatattatcactaaaaaataagttttttctaatgaattattggatgagaaagtacgtacaaaattccatgggaatttatattaattatcaaatttaattcaaattagccaggacaaaatttgtttcttattaggatcgagcaatctcaaccggcttagatag

SEQ ID NO: 103606 - DNA, 618 bp, Cannabis sativa
tggacaatacttcaggttcattttttcatgttgttcaaatattaatatatttaattatttatttacatatatttgataatttataataatatataacttttatataggaacggggttcgtatcaaaaaaaggctatggttcagggtattttgagatgaggattaagacaccacaaagtcaatctccatcaattgtcactacattttatgtaagtattttctttcattttttttctcaattgattaccatgtataatattaattagtgttagtttcaataattgattactattttttcttattcttattgttataattattattattattttgggaaatgctaaccggtgactagctagctcttttatgaaatactgtattgtaactcatgtaaaagaaatgttaaaatgtatgagtagtgtttagtaacacataatttaatttaataattattataaaatatcattaactgtttacaagatactattttttattgatgtcttatattatagcaatgctcttgatgtaatcaacatcaagtctttattttgctttaattaataacgattataaaaaattgttaactatttataagattcactccatatatgtactagac

SEQ ID NO: 103607 - DNA, 644 bp, Cannabis sativa
ggttgatcctttggcgtatgatttgaaattggagatttgttccttgtacatgaagggacaaatggttccgccagagcttattaagaaggaacgccaactaagaacgtccttagagatgaggacaataatgtcaaacacaaattttatgccatcatttgtgactaaggtgagaaaagtttggaattctgagcctaccccgcctactaatcctctccctcggagtgtagtaggatcttttgttgccgaaacagatgttgggattggtgtgaatgaggaggttcctaccaatgtagatcaactgcaagaagcgacaggatttgatcagtttgagaagatcgatactcccttctacaataacgatcatattgtagatttgaatatgaatgatgaacatgatttggtagtcaatgaagccgtaaaggtacctttcttgaggttagagtgtgcaccgagaaagacaacgagaataacaatcccgtaatgaaaatcacaatacacctggaactagcagtagtcgacaaggtagatccgtagaacatgctcctcctcgtcatgcaaccttctcaacgttcttgtcatttgaagtttgtaccaagttcaaagctcctatgtggacaaaggaagatataatggaaaatcatgag

SEQ ID NO: 103608 - DNA, 501 bp, Cannabis sativa
ttttatcccggtttttagttaaaaggtctccctaaaaaccttaattctcgtttggctaacccataaaaatcgaatcttgaacttattttttacctttgatatttttcttaacgttctactaaacctggccattgtccaaaaaaaattttgctgtatatttgagacgctaaatttaaacgtgggataaaaagtctcaatatatcttttatcctatttttttatttttattaacggaaaaagtgaaataaaaattctctattcttgtagtgtctattgaaatcggttgagagagtaagtggcagttggttgagatcaagctgaggtggcattagatgagtgtgggcttagtcttgagtgatcaagtgtggagagatttattgtaaattgtcaattcaacaaattgaatgccatattctaattctaattaataacaaattcatataaatgatgaataatcagtatatcaattctcatgtgccaatcgacccaaaagactattaa

SEQ ID NO: 103609 - DNA, 519 bp, Cannabis sativa
tgggaaacaaatggagtcatatggtgatcaaaactgggacccaacacccaagttgacatattgttaacctaggccatttccaaacatttttcccaagaactcttccaggaatattcaccgttttcatcacaaattaagacacacgtatttttgagaataaaacagaagcatctggtggtcaaaactgggacatagagcctaggttgccttggtgcctagtcccaacgcccaagtttacgttttatcaaccaaggccagttccaagtattttttatgaaaagtgttcaagaaactttttttgttttcaaaaacaacaaagatacacgagttctcgggaagcaaacaagaacatatgagggctaaaacagggccccaacgcctaggttgacatggttgatgggccttgtgcgcaggttgacatacaacctaattcgcatatttttgctcttcaaacacaaattctactatggacattcttcttattttggttaaaagtggggtaggagacctcgttcgcaa

SEQ ID NO: 103610 - DNA, 533 bp, Cannabis sativa
tattttggtgctttcattaatagcaaagaagcacgagtctttgttttaagtcttttcaggacagatcaactactgatccaatggctatatatcctaacgtgcatacacttgcgaatcctagagatccattcaggacagatcctgacctaactaatcctcaccaataggcccagaaacagtagggcaaggagtgaccaccccctctggctgggttaactcaaggcgtccaagaaactgaaaccactaatacttggattgagcaaactggccatagtactggaattccatctactaaaaattctcaaaggtcgatcggtgatgacactgaaatacaaaatttacgagttactctagggaaaatacaagagcataacaacaatcttcattacaatcagcaagatacccaagtagtcgtaaattttcctttgtagaacaaaggtgcccattccaaaaatggataaatgaacaaatggaaatcataagtgctcaacaagaaataactgacaattgttctaggtaggctaccgagctga

SEQ ID NO: 103611 - DNA, 696 bp, Cannabis sativa
tgcccaagtagggttgttctgttatagttattttccatcttcttgtcgcctactttgtcttttccatcatcttgatttgactcgtgatcttacataaccgtcgaccttcatctctgtgcctccatgatctccaccttcgcatgccacaccaaaccttattcctagctatttgtattcaggaacagagtatttttactctattcttgcatttcctttactcactcacaaaaattctcttttttatggaatcattaacaaaacacatgaactccaatttagtcttatctgagaaggaaagggtggtccgcacccttattgaatctgatcttagtgatacaagctacaaaccaaatttttttcttgtaatctgatcttagtgatacaaaccaaagatttaaccaaaaatctttcattaagaagatgggagattttttgtcaaacaaatgtcgatttgcagttattgtatctgaaatgcactttgatcttttcttgttaactattgcttgtgcagggaacaagcatagaattatgtgagaggaaaacttgtgaatgttcctaagattcctgatgaacactggcttgaattctgctacgaaaatctccccattttttactttaaatgtggtctgttgggacatcctttagagagttgtgctttgttccttgagcaggttgacaatggcattgatcctgaac

SEQ ID NO: 103612 - DNA, 531 bp, Cannabis sativa
tgcaaagtgtggtcctcctgatatgaccaacacgtcctctccttccatatgtggaggaatgtctgggttatgtcccagctgtcccccttgtggttgtgccagcgggttaggagcattgtttctgggtgccccctgtcattgcacattgacacatggggctacaagtttttgtgtattttctccttgttggttgtattgcctattccttacatagtgagcaagaggcccattacgtataagagtctctatctcatccttcaagtttcgacactcattggtggtatggccaatgtctttatggtattggcaatacttggatgtgtccctcttcgcatgacttcctttgaaaggttcaggtatccgaaaggccacctgatgtttgtttgccacatatatggtttcttgtgtctccacaagtttgaagtatattgtgaacatggactggtaacctttgctctttttggtattgttctgatctcctccattgtcgccctttctcttattattgtgcctagagttattggtggctgg

SEQ ID NO: 103613 - DNA, 668 bp, Cannabis sativa
  modified_base (27)..(35): a, c, t, g, unknown or other
  modified_base (108)..(113): a, c, t, g, unknown or other
  modified_base (448)..(450): a, c, t, g, unknown or other
tattaatattatttattttagattaannnnnnnnnatatataaatattaatattatttggttttaagatagttcaatttatactaattttagattaatttaaatatannnnnntattaatatattatttataatattattatttttatttcttattttattatatagataaatataaatattatttattaagataattaaatttatattaatttaaatatataaatattaatatattatttataatattattattttaatattaaaaataagttcaatatataatattaataaatattttttaatatataatattaatatatttattttaataaattaataagtaatttccttattaatttataaattttgaaaggtatttttacacaaaatgactattttgaccaatttttaacatttttaatttttaaaattttctttaatacttnnntaaagttttataattacatatttaccttttgttctccttcctcatatctagccccactcagatttggattcaacatgcaatcgctcactctctcatcaagcttatcgaattttcacactcgtcttcacacaatcaccatatgattatgtagccactcgtcatcacgcaaagcctattctcaagccaccattatcgtttaattgatgtttgtaagatct

SEQ ID NO: 103614 - DNA, 617 bp, Cannabis sativa
cgtaatccgtaaaaaaaaaattaaataagttgttgaatctcacaattctgagactatatagatatgagactacacagttaaagatgactttaatagattgattcatattaccaatatcaacaaagtgtatcttgttttttagtagttcatcacgaaaaaattctacagttaagtgtacttgacctgaggtaattctaagattggtgacctcctcaaaagtttacctataaagtggacagagtgacgtactcatgtataagagtcataaatctcttgggtaaagcccaataaagacttgaaatgggaacgttaaaaaatatactagactataatttcttctgatatcgaaatataaaaattaccttgaaaaatttacatgatagaccacaaaaatacatcaatacgaatttttttttttattttttttacgatttgaacttttttatttataaaaatatctctatagtaataataataaaccgctttttagttgtttttatagtttatttataattgtcctcatgttttttttttattattttttgttgttttataatttatttataattatcgtgagattaatttttttcttatttttattactttcttattttttg

SEQ ID NO: 103615 - DNA, 781 bp, Cannabis sativa
aaaaaaaaaggttaaaaaaacaatatatagaagtaattccccttaatttttttaactcaaaaaatatatattatatatatatgttgtgtaattgatttctacttaatattttttttttaatatttaggtaatgcatgtgtatattttcttatagtgtatatgttgattgtgatgagggttatgtgtactatattttaatatttaggtctgttattaagaaaaagttgtgattttaatttaatgagtgattaatttgttgggtttattaattggtttggactaattgggatcgagatattgtcgcaggagcaactatttttgtctacttgatcctccaacaaactcaacttggggacctctataggcttggtagatcattatccattacaaaattatacaaataaggagaatttcttgcttgatcttggtaacgaaacgattaggacattccctcttttaaattcttttccttatagtgattttatgttgtaattagtttaagacacttataaagataatgaatgttgtattattttttaattatatatttaattgataatattagttaattttgattaattaattactaaattataatttattattttaaaaatattttgaaataatttttactttttaaaatttgtaactattagcagcgtgtattataacagtggaccatgccactaatgatgtttgtatttcgagactaacataaacattagcggcgggatctcgcctactatttattattagcagcagatgattagtccgtcgctaa

SEQ ID NO: 103616 - DNA, 614 bp, Cannabis sativa
ttttaacaaaaaaacaaagaaaaaaaaaacaaacaatagtttaaataaaaaaaacaagtttaatttctgttaaaaaaacaacatctatagttaagatcattttttatttattttagtgttttattttttaaaaaaaattaaaaagaaacacaaatttaaaattttttatggtattcctcgtgacttttttccatatttgtaagttttttattttaaattatcatatttaaggtaattaagttttatgtcatatatatcaaaatatatctttatttttccatattcttgtaaatagctcatatttttacccacatctagagtcacaaaatgcagaacttatagaataaggaaagggaatcttacaaaaatacatatttttctttgtcaattttatatttctactcatattattttttatatatatatttttactgtacttagttttcaaaaatactgtgttaatatttcaaaattccaaaaatactctgtttcagtaaaattaaaaatacaactaaaaaaaaaacttaacaaataacataaaaataactattaaacaacaaaaagataacttgaaaataacaaaaaataacaaaacaaagacacaatttcaatat

SEQ ID NO: 103617 - DNA, 842 bp, Cannabis sativa
aatatatttttggaactctgtagatacctcactgttaaattttaaatcattatgcatgtgtcattttttttttttggtatatttgaattattatttaaaaaaaaaatatttaatgacttggaccaattagaaattgacacgtggtaatttacttaacacttaacaacaccagatatttttacgtggttttatagttaaatctgcacactccacgagtctttcttatttaagatatttctgagtacaatatacaattgatagtatttttcgtatttctctccaaaattttccctccatttttttgttagatctgtccctgtttgtaggaatataagttgcagttatttacattttaaattcaaattataaccgcttcatgaaacgtgagaattgatcgcgtttcatttaaacaacgtgtagataacaattggtaaccacataactgcttattattcttatcttcaaagatggtagatgctgatctggacaatagctcatcgcttaactcatagatgatcaatgctgatttggacaattatatgccttccaacaatggcatgagcaccagtatgctctttgaccataaggacaatcgtgtcttgtatatttccaagttttacacttagttattgtaatgtggaaaatacgctaagtgtttaacaaatgattcacctcgtcaatatttcttatgaatagtgaggtgaatacctcgctatatgtagtccgaagttgctttgagttatttcatttatcccattaaaataaacaaatattctctttggatctgtgtactccgaggtagggtggtgtcttgtcaatactggtattaatagttttgtatt

SEQ ID NO: 103618 - DNA, 586 bp, Cannabis sativa
ttgctgcagcaaaacgcacagtttttgctaaacatagggggattcaatagttcaaacctttcacatttcaaaagcttacaactcatttttatgttcatctttgcatccacttttgagttaatttacttattttcttgttcatttagtttattcatgaatcatttcattttggttcttaggcattttgcttggtaattaacttttgcaatagaaattttatttttatagtccttgtggagatgatactcgttacttatcattatattacttgtttgtgactacgtgcacttgcgtatatccaattttagttcaacaatgacatgcttgcacaattcaagagctatgtcctcaagaaaattctaagagaagaaatcaagacacatgctcttgggttcaacaaggtaatcaaaatttccttcaagattagccttccagaaatcatagaaaacctcaagagcaactgcctccagggtctccacctccttctcgagctcctcctccctagtctgcttgttcctgacctccttctcgagttcctcctccctggtctatttattcttgacatcctcctccagtttggaaagaa

SEQ ID NO: 103619 - DNA, 890 bp, Cannabis sativa
ctttctcccccaacactactcaagcagcaaaaaatttattccatcaaattcttggaatgccaataagtgaatgtcatgaacgttaccttggtctccctgctttctcgaagcgagacaaaaaggaaatgtttagtgatatcaaggaacgcatatggcaaagattacatgcatggaatgaaaaactattttcagtaggtggaaaggaggtgcttttgaaagctgtggttcagtccattcccaacacatatgcaatgagttgttttttcgtttaccagctactttttgcaatcaattggaatccatgatggctaacttttggtggggctccaataaagatggttcaaaaatccattggagaagttggaaattgctttgtaagtcgaaatttgaagggggggtgggtttccgatcttttgtacacttcaatcaagcactactagccaaataggcttggagaatttttcaaatgcctaattctttgctcagccgactcttaaagcatcgatacttctccaacaacaccttcttggaagctcgtcttggccactctccttcacttacttggcaaggtatccattggggccgccaattattataagaaagattgcgttttaagattggtaatggacacaatgtgttggctggtgtggataaatggattccaaggcattttaattttaaaccagtcagttatataggtccaaacaatgtcccagtctcatcattcattacagaccaccgtgaatggaatctccctctgcttaatcaatatttttaaccaattgatgtggataaaattgttgcaattccactaagctttttccctagtcatgatcggtatatttggcatcataccacaactggactatatactgtaaattctggtttcc

SEQ ID NO: 103620 - DNA, 658 bp, Cannabis sativa
ccataccgtaaaaaactttgataaaaagtacgtagactcaattacagaacaaaacaaaacaatacttttcaaaacccaaccatgtcaatagacaagacttacttattttatgatggccaccttaaattgactctaaaaataaaatttgtcattgaattttcttttaggaaattagaacaagtgctatggttttgcaccatcttttgcttttcttctttgtagttttgacattgtaaattatttaaaaatttactaatatgattttgtaagcataacaaatacaccatgacaaaaaaatttgaaagaaaaattctaatatgtattttcggatataaaaattaactaaaaaattataataagagaatgaaagtattatctctttttttttttatcaagaagaataaagcttcattaatcacaccaacaaccaacaatacaccttttccaaaaggagaccacaccctcacttagttacaatcaacctctttagtaatattatttttatttattattatttttaaagtggggccacctaattattagaggtaataaaaatataataataataaatttgtagtaggaatacacatggcagtttaagaagggaggaaaaaccaacagtgtcagtctggcgtttgaaacaccaaactctctcacg

SEQ ID NO: 103621 - DNA, 504 bp, Cannabis sativa
agttaaaaaaagaagtttgtacatttttttattaaaaaaaaaagagaaacctaatatataatagctctctctctccatcatccataaaacaaaaaaccctagccgcctacccctttgttctctcttgaaaaattctgaaggaaacaaaaccttactttggcgatcacaaccccatgacctcatgtaccgacctaactccggtgatccccgaccccgaaactcctagcatcgagccactctctccctatttcttctcatgcaacactgccatttcttctccaggttcgacgagcagcggcaagctttattctccaggtgttgccatcgtttaccccaggcgacacccactaggtccttgccgtccttgatcatcgatttattcagtcgaaactagaaggtcacggcaagtaagctttccattgtttcttgatgttttttctttttttctcactaattctctttctcaaatccatgaaatctttcattaatcatcaccactaaatc

SEQ ID NO: 103622 - DNA, 503 bp, Cannabis sativa
tcatcaaacattggcctttcaggtgatgatcaggccttcagcagtttgaaaatgattttggagacacattcttagattgggaccaaactaaatataggatccacactgaagccccaatgaagccccaatgggaagtagttagtcgtcatttggaggatcatatgtaatcaacccattaggggaagctgccaaagtgtccaaagtcacctgtgaacctgaacctctgtctccaaacaagctacctccaaacggttctcaaggaatccatctcagctcgaaccttcttaaggtcggtcagcaagagcagttttcaatcggtcagcatcaacatcacgggaagctagttgttccttcaattcaccgacaattctagtaagctcattggacacgttcaactgtttgacatcagaatgaagtgaatatcagtcaccctccttcgtttcaacgcatgtcgtgcatttttatccaaattgaatcttgcgaagcctacaaaacataaaggc

SEQ ID NO: 103623 - DNA, 543 bp, Cannabis sativa
tatgcctatatttatttgtaaatgaccgcgaggtctaacagtttctatcctaatataagtacgcttttcttaaaaaaaaaaaaatagaaataaaatcaaagatttgttggtccctagagattatttatatttttagttgtataattgatttttattaatgttatttaataaataatattattattttttcaaaaaaaaatgtataatttaagtgatatatgtataaaaaaaatataataatattcaattttttttgtttattataatttaagtttaaccataatattcttcattttttaaaaaaaatatattatacacttttctttattttaacataatgatagaaagatattttttcggatatgtggattgattaaaaaaataattatataaatagattttttttttagatttttgtagtgggtttaaatttgaattataatgttttaaaacagaatattttatgttatataatcacatttaatataacataggtatcattttcaataaaaaaaaaatataatataacataggtataccata

SEQ ID NO: 103624 - DNA, 511 bp, Cannabis sativa
ttttaatttatgaaatcacgatgataatttttagaattgtttagcattggagatgaccttagagtacatgaaactccgagtccaaccaatatttctttaagaagaaaaggtgaggtgatgaagaggtggcgatttaggtcacgacacgcgagtttgacgcgaagacgagttgagatttacgggtactacacgatatgaaaattatatgggtcgtgttcatgtttgtgttttatcagtctttcgtgttgcaagttatattcgtgtcagtcatttaaaataaacttaagaacacacgacatgatgacactaaaaataacaatttagcttacaatccaccaacacgatatgagattttgtgggttcgacatgacacaaaatttattcaagtcatgaaggtccaataaattgaaatgtcggattgtaaatatttaattgtgatccatccaattaaaaaaaaattaaaaattaacccaccaattatgattttattggtttggtcgagttaactcgt

SEQ ID NO: 103625 - DNA, 923 bp, Cannabis sativa
attaaattatattttatacccattaaatgatgtctccgttagatcttttaaattatgtaaattatatgataaacttaagtagagaataaaactatagtagataatttactaaaaaaaatagatatattttaataaaaaaattatacgaagaaatttttaattaattaataaaaaaaatatatttttcaacttatttcatattatactgatgtgatgtagtgagttgtgagcctatattatttaattaattaaacgtgtgatatttaatattaaattacattaatattagcctcaacttttatgatgttttgaagagaaaataagcactattataaggcactagtgttatttagtaccacattaaagtaacatgttgtgatagattggcaatattgtaaactaaaaaactttgacatgacatgtgtccctatttccacaacataataaaatttcttctgcaatcaaaaatgtagaacaaaaagaggagggtcccaaattgtacgattaatttgactatacatatgtgaattgtcttgtaatttattattattattatatttttaattttcaaacttaaccaattatataagtaaagaagtatagttaatctcttaatcaatttttcgtatttgagaatagtatcggaatatttttttaaatttattttatggccgtgctcgttataattacaatattattctgtaaatttttaaaaaaattcaaataatttcaatgctaaaaataaaattgaaattttttgaatacgtattagactcgaatatcactatgaaaaaaattcaaaaaaaaaaaatattttgctatataatttcaaacataaaaattaactaagagattataattagtattattcatacatttattcacacattcaattgcattaacatattttctttacagattct

SEQ ID NO: 103626 - DNA, 697 bp, Cannabis sativa
ccatattttttcgtgtcgtgccgtactcgtgtcactcgtgtactagtttcgtgttgtgctaaaaaattcaactcaaatgtacaactttacttatacttacacaatctcaaaaatcatcacactaaatatttttcaaatgatatggaattgtagaactcttaaatctttccacttgcattgcagattaggagactctaactctcacacttatagtatcaactatcaaacaatatattagttgaacttacatattttatctttaagttaaaagaatattgcaatgtccaacaccactacaaaatagctccttgcacttaattgtgaacccaaaattaataacaatactaaaaatggcgccttgcacttaatatcaacactaaatattactattaaataccaatagtatccaacactaccattaaattaaaatatataaaatctaacacatttactaataatagtatgacatttcatagtaatatttgacactaatagtatctttttagttaaagactttacactcaattcttttgttttatagaagcatctttaaattacatagctagaattcaatatgataacctccaatatacacacccccaatatcctttataagtttatattatgtgaaaactaatattatgtttataattattacttttacttataaatatatttataaatatacgttgtaact

SEQ ID NO: 103627 - DNA, 518 bp, Cannabis sativa
ctttaaattcccatacaaaatattaaaattttcttcttatttttttttaaaaaataaaacaaataaaaccacagtgatcgtcggagttattactggtgccggaaaactcgccacagtttgttacgtacggccgaaaagtcgtcggagtagttgttggagccagaaaagtcgccagagttgctgacattgttgaaaaagtcatcagaattggcattgtcaccagaaaaatcactgaaaaaataccaagaatctggtttcttggtgatttttttcgataccggcagctactccggcgactattccggcactgacaacaaacttcggaaaattcatcagaattgacattatcgccagaaaaatcaccggaaaaatcaccaagaaactggtttctgatttttccagcgtcaatgtcaatttcaacgaattttccggtgtcagcaggaactccatagactttttcgatgaatttcgatgacaatgccaattccgatgaattttttgaagtttgctgtcggtgt

SEQ ID NO: 103628 - DNA, 607 bp, Cannabis sativa
ataaagacagaaattttttcccctacataataaccaacctatcgacttagataacttcgtcctaaataataaaagaaatattcagcccattgtagttccaaccaataagctagttacaaaggccggaaaataggtagcataggttgacgagggggtgtaagcccaactggatatgcttaaaagcttgatacataccttgaccagtccaaaacttactgaattagaactcgacggaacttgaggttcgccattttcagaacgggtcaatgccctagaccttgtacctaagttgaaaatgccaacttggaagctgtacactaggaaggatgatctgttatctcatatcaaatattttaagatatagacggacatgtatggagtaaaaggggaggtcaggtgtagaattttctcagcaatgttagtagaagtcacgcaaaagttgtacttcaagctaactcctagaaagtttgactcctggaatatctttgcctcaaaactctaaattccattttcctcctcttagtttaggtgaacaggtgtcgggtgagctgttgaaggattatatcaatcaattcgtgataggggcaactaaagttaaggtattaac

SEQ ID NO: 103629 - DNA, 782 bp, Cannabis sativa
tttcaaacatcaaacaaaaaatttgtaattgtaatcgtaatctttatctttaaactttaaaaattaaaaataaaatacattcaaaatcttaaaaagaccaaaatcttaaatgaaactagcagtacgtggctcggcacgtacattcacctagttatatcttgtgcatctacttgtgtacatctttatatattaggtttataatataagttatatttttagtttttattttaattatgtatattttaattgtataattaatttttttttatattatttttttattaaaaaatatttaatttaagtgatatttgtgaaaaatataataatatttaaaatttattattaattattgcccaaatccaaacatcgtttgctttgcacaacttcattcttcgtttcaatggtttttcgatatcaatcgtagcacgaacataaagatagtctcaccaaatactattgaaattttttgcatcagacttgatgaatgaaccaacataattactcgcgttctgcacaaccctgtccaacatgaatcccacttttagatcatatatctgaatccacgtatccaacttgtgtaaatgaatcaatttaggatcttcaccactctttagatatggaaaatcatctgaatcctattgaacgtccatgggctaccaatgataatttgaatatcaatctcatagtaaaattggaatagataatgattagtatgttagcccaagatatgtttccaagaggggggtgaattggaaatttaagctaattttagaaatttaaaa

SEQ ID NO: 103630 - DNA, 549 bp, Cannabis sativa
ctttccaattttcttaatctttttcttcaaattgttttaattgtaacttatgtactcttattaatatttcagttcactttatacaatcaatgaataaaaactgtgtaacctacatcaatatcaaaaaaatatacgttattttacattatgtctgattgtgtggcatttctacaaaaaaaaaaaaaagaaaaaaaggttagcatgaaaaaagacattacttcattagtagcatgaaaggtctatatatgtattttggctttctatattcatattattgattatcaacagaatatattagtaataaatctgaacaaacctcttaagattctaatttttttggtttcttatttatacatgattattagggaggatatttctctgagaaataaaggtgttctaccaaaatcagattaatggatatgagttctttattatggaacaagagaactcaaaatgtattatttttgttcttcatttttactctatattttttttacattgaataatgcactttatatacatatactgatgtgaatgcaatgttttttt

SEQ ID NO: 103631 - DNA, 544 bp, Cannabis sativa
aagattacaactctttgcaataatgatacatatgaatataaacaagaggaaaagatctctcaaaagcttaaataaggttaatggtctttatcataaaagttattttctccctcacataaacatttagaaaaattctaaaaatacttttaaagatttattaagccttatgtgctcattgtagagtctaagaatgatcatatcttcacaagtatctaactacaacaaaagtgatatcaatcaagagtatcacaaataaacaatatgatttctatttatagagttttcactctcatataaacatgaatgaccactataaaattttttatattaccaattataaattaagcatttatggtattaatagagtattttggaggagtttttagctattagaaaaactcacacacattcaaaaacgcatgcaattgtatgctgaaaaacgcatactagttatatttttttagttttggtcaattattcttcaaagtgtttcaaaccaatctcacttgattttgaactatttttaaatatatttataatttta

SEQ ID NO: 103632 - DNA, 583 bp, Cannabis sativa
taaatttcaaaacgattacacttcttcactaatttgcttataaatagcgcaaaaagtcctaataaaccatttttagcatttctttctcgacgatttcagagcaaaaaatcttttccttaaattcttcgaagaattttcagaaagtgtcaatcagcatcatccaagcaatcccaaagcttcgaactgtgagtaagttcttcatctttttattctttaatatttgaatctatgattttctggatttcctttgtagaaaattcaatagtcttgaacttgtttaaggaaaatcggagagaatctaggttttggaatatgaaattttgattgtaatggcattctgactttaatttcacgataatccgtttcacttgcccatttggggtttagtgaagattaacccttaatctgaagtcttgaaattctgggttataaacctaaatcatgcaaaatttccccttttaattctttggtcggacctagtctgtatactttatttatttttgttcgatatcccagccaaatactcatcttgtgtcctaccttttgtagatgaaccctggtgagttttgggaaggagaacatc

SEQ ID NO: 103633 - DNA, 649 bp, Cannabis sativa
gatcccagattatgtaaagtatttccatattcaattttaaagtttaattaagaaaattttaattatttacgttaatctataaaccttttgattagcaaaagagcgcgcggtattaagaaatcacgataacatgcctaagctagtagggtgttacaatttggtattagagctataaggttgtcttctaaagatcgtcacgatatgatacaatcatcatcagagataagcttaactcacgattcagcaagctttttatgctttagtagtttgttttattagtatgtgataagaagcatgttagtaacttgatagctagataggcgcatgtgtttattttctcaagtgagcaataattagaatttaatcttgagcatgatctgcaaggctagctcactgtttcacaggctattctaatagaatgggcgctaggcaaagcacgagaagctaagctaattcgattggatccagtgacggtcaaggagtttagtttcctcctaatatttatggtcgaggcagaggccaaaaaggtagggcatgcggttggagtgatattaacccatcgtaggctcgcgatgtgcagatggctccttctcatgtaatgcaagtggggcaagttatcctatttccgaggtgcaaatggctccttccc

SEQ ID NO: 103634 - DNA, 592 bp, Cannabis sativa
attatttctaattagtttttaaaaaaattatgttatcttttttgacaaaaaaagattattatttttgaactaattaaatgtaaataaataaaaatgggatttaatttttatttaaatagatagagatttaaattcgttaagtttgactgttaattgggtttgccactatatatgcacatatgtacacgtatcatattttgattggtccaaataattttaataatttaaatattacaaaaattgttttaaaattagaaataactaaaaaaaataagctctttctcttcttcttggatctctggttcatccaccattactatccatgatcgaccagcagccacaatctattcctttaatccaaatcaacacaaaaaaaaaaaaaatagaaaacaattccatttttatatctaacctaaaaaatccaaatcaaataaataaaacttgaatccctcatctaccattctgtagcaccggcaaagcccccaccttgcgattagatctcttcctcgacgattgcagatggtaggggacgattagtattgtagtgtggtgctttggtttatcgcacagagaaagagtgaaatcagattgg

SEQ ID NO: 103635 - DNA, 537 bp, Cannabis sativa
tagcagtcccaaaggggcgactggccagccagcgttgtgaatttttttagtaccaactttatcattatgcttttaattaattattgaattaaataataagttggtaatcataaaataaaaaatttcaattggtatcagagcaagctactaaactcttagtgagatcttgagattatttctttttaatttatttttgtgtgagatgtctttctttgcagaaggaagttccatatcatgacctctactattgaatattttgaattattcatactagaaggttaggatgagggcattcattaagtcacaagatgaacagacttggagggctatactttcgagttggtcttcaccctggaaaaggattgacgaaggtcatttaaggtaaagccacaacttaattggtctactgaagatgaaaaattatcaggatctaataatagggatttacatgaaatttttattggtattggtgatagctttataaaatttatatcatcttgcgaatttacaaatgtggcatgaaaaattcttcaaact

SEQ ID NO: 103636 - DNA, 624 bp, Cannabis sativa
ggggtgttcataaaatacccgatccaacccaatccgcacgatccaatccaatccaatccgcaaaatgccactactacaaaatttagtatttacgtcggtcaacgcgactgttcattgcattgaccgacgtgaatagtagcatattcaatttattcgtcatttctaaaatgacacaaataatagatgatttgcgtcagttctatgtccatcactaattataaaaccgacggtaaaaagaaaattttttaagaaaaagtatacacaattttagcgtcgttttaaaagcctcgtttttctgattttcaaaccagcagtaaacatgtagcgagtgtgaccaaccgacacaaatccttttattgttcacttacccaaaatttgttagactcagcaaatcattcttgaaccctagtgaaccattcgaagacctctggcgatttgtcaaaacctttgaatacctttgcctccaccatcccactcaatcttagtcggtccatctctcctccgccttctctatctctcgccaggcccgtctctcctctgtcctttctttctctctaggccagtctttgagtcgttcttctccaacggcggcgcgggtccttcattcttcctcatcgtcttctc

SEQ ID NO: 103637 - DNA, 881 bp, Cannabis sativa
tattaattgtacattcctattatatataggaaaatttctttatatactatttttttttattttttttttcaatttctttatatactattttctatgtgtgttgctatataatttttggttgcaatttaggttgctcagctaattgtaataggaatttctatataaaattccgtaaaaatgcaaaaaaacaaaaaaaattaaagtataaaaataaaaagtccctattatatatattaaaaatctagaaatcaattattattctcaacaatggtaaaccgaaataacataaatcaagataaattgttaatgtacaaataaaaatggttcatttatttacatattacaaaaagaatagatgaaatttgttttttttttaaaaaaaaaaataaaaataaaaatcccttaacaataggtctatttttgatatgaggaaaataaaattttctcatatatcttaaaatagtttctaacagctaaatagtttgggaaataatttcataaatttacatgaatagaagttaaattaacaactctttcctcctttccagcgataatattaatgaacaaagaccctttcattaacattttgtcagtgattaaagagcctttattttgtggatcttcaaacatttctagtccataattgaatatattatcctgtttagttaataaaagcatttttcttttccctgcataaaaaataaaataagaaataattattatatttataaaaaaaatgatatgaatgtaacaatttttaaaaaagaaaaaaattaccccaatggtgattgaagaaattctctgtgccatgcacaatgacatgaccatcattgtaaatattccagtgattaacctttactctattgattataacagttcca

SEQ ID NO: 103638 - DNA, 593 bp, Cannabis sativa
ccatggctcgatactctgcttcagcagaagatcgagaaatggtttgttgctttttggatttccatgagatgagagattggccaaggaatatacaatagcctgttatcgaacgtctggtgtcaaggcaggctctccaatcagcatcggcaaaagcttgtaatttgagagatgatggtggggaagcataaaaaaaagagaccctgtcctggtgagtttttgagatattggagaattctggttgcagcgtgcatgtggggaagtcttggggattggaggtattgactaagtttattaacggcaaaactgatgtctggtcgtgtaatggtcaagtaaaggagcttcccaatgaggcttctatgttgtgttggattaggaagcaggtccccgatgtcattgctgagcttgttatttggttccattggggttgatgcaggcttggaaccaaggcaaccggattcttttaatagttgtatggtgaagggccgctgtgatactgatataccttggggacaacgggctatctcgaggccaagaaagaagcgcagagaaccaaggtctttcaatttgaaccttgtgtcgagagttgtgatgaa

SEQ ID NO: 103639 - DNA, 514 bp, Cannabis sativa
acatattacaaatattgattccgattatttttcatttattccgttacatttctccattaatttattccgattctgattactgtatagtaaacgcgccataatgtattatcttgtggtttgtctataaatttagaatagatatttgggctttactactttctgtatgagctttcaaccactagtaaatatatatatactaggagacgttaccgcgctttgcgcggtttttataacatttaaaaattgtaatttggataatttttatatttttatagtaaaatttatgtactttttaagatatttctcaattctttataggaattcacaaaaatataagaaaaaaaaattaatttatttttttatgtatataaaacttataccacaaagtatagtaactttataaaaaaaaaaaaaatagaaaacccaacaaaataccataataatttaacaaaatttctaagaacaaattttgccaaaaaaatcatcagagcagccattgccacttaagaagtca

SEQ ID NO: 103640 - DNA, 629 bp, Cannabis sativa
tttgaatatttatctatcaaacctttatgtagtaataacgagttatttaatatgcaattactgatatgatattagtatacccttagagtagattcatattccttctgttggaaacaaaacagcttctggagcatagtcgaatttcaggtatcaaactatgtatataaaagagttcaacaacttaaccctcccaagtgtagttttacttgtatttaaccctcgaatctcaaattttagcaataaaaccctccaaactcttgaagtatagacaatttaagatgtcattcggttaactatctttgtaaactacttatgtgtacactcttttacacatagcactattatattgcacctaatatttttatttaaaaattactttcaaaattcattttaaaattcaataaaattataaaaaaataaaaaataaaatatttaaaaaaatatattataaattttgaaataatttttatgtttttaaaatattttaaatatgtacaaaagtgtacacataagtagtctatattggtcgttaagtgtaaaaaatagatgacacctcaaatttgcatgcagttcagtagtttggagggtttgaccgtcaaaatttaaacttagtaggtaaagtgcaagta

SEQ ID NO: 103641 - DNA, 580 bp, Cannabis sativa
gtgtaactctatgtacacttcaccgataccctgatatgttattctgacgacaactaacatgtacgctaaacatgtataaacatatgcatgacatactactaatcttacctcagctccgaattttaggtgtgtcggtcaacctgagtggaacaactgctcggcaactaatagaattctaaatcacatcgataacaacacgaataagtgactcactaaatcacaactgggacttaggttttaaaccaaaaccttatctattgcaacttaatatggcaatgccctaaactattagggaattaaccaaccagcaacctaaaactaacacaaatcgcaaagttgaaatttttgagagccctactgcagagaccggttacccggttttccaggtacctgtaaagccagttacccggttttctgcagaaaacccaaaaaaattcaaagcttcaccaaaacgattccaaactcaaccaaaccttccatgcctacatattataccccaataaactatttccaagcaataaaacaacaatcaaggctcaaaatcgaaaatcaccatcaaagagccaagcttgagttctaa

SEQ ID NO: 103642 - DNA, 618 bp, Cannabis sativa
tgaaaggtggcagttgagatacaggcaaagaccagtttgatgaaccggtgagggaattagaatttacggagaatggctaaaataaaggcccactccactctgtcaaaggctttggccatatcaagcttgactgccatccagcccgatttccctctagatttaagcttgatagagtgcgcaacttcctgggcaatgataatattatccgagataagtctacccgagaggaaagcactctggttgggtgagatcaagttattcaggacgagtttaagcctattagcaatagctttcgaaatgattttgtaaattatgttgcaaagactaataggccgaaagtcagcaatggaaatgggttgtttaactttggggatgagcgtgatgagagtggtgttcagaggagcgatatccccattgccattgaggaagctaagagctgcgctgagaacatcattccttacagatggccagtttgctttataaaaattggagttaaagccatcaagcccaggagctttgtccgaaggcagttggaaaaaagtcttctcaacttcttctatggaaaactcttcgtctagaagagatctatccatatcagatagagtgcacctaatgcct

SEQ ID NO: 103643 - DNA, 591 bp, Cannabis sativa
gcatcaaagcaccagtacctatcacaactgccccaactaaacacacaacttctcctactgaagccattcccaaacatccctcacaaactgatagcactccagcttccacatccgaaactagaaatactggttctcacacacaaactgccatcacagcagctccaacacctccaaaaactaccaaaactggcagaattttgcataaacctacacatctcaatgactatgtttgtcatgcttcatctacatcacatccaattgagcctttcctatcatatatcaaattacatcctcaattctgagcagctgtacttgcagcttactctgaaattgaacctaaaagctatgctgaagcagctctatttagccattggcttcttgccatagataaagaaacaactgcccttgaaaaaaaataaaacatgggtcattaccaagctaccacccggccataaagtcgttggttgcaaatgggtatataaagttaaatgtaacgaaagtggggctgttgaaagatttaaagcttgtctagtggccaaaggctccactcaaagacatggaattgactattcccaaacctatgctcccgta

SEQ ID NO: 103644 - DNA, 676 bp, Cannabis sativa
taagcatcaacaaagtattatttaattgatccaaactcatacatgaatgaaagaattgtatgactgcttacgaaatttcatgtccaatgtccttccaaagctttttaaagaagcgagacccaaacccatctggcttcaacctcttcattattggaatagagaacatatcttctttaatatctttctcaatgaaagatttgattcaaagaagttgtttctctaaagaaaattttgcaccctccttcatacaatggccctatagtattgagttagtcattctctttttatccatgaaacttctcaaatgagacataaaatgttccacaactattgaatagtcatcaatattcatcaccatcaatgaataatgctatcctatttgtcctccttcttttcttcaaacaagcataaaaatatgctaaatttttgtctccaaacttctaccatgttaccttagattttcgctacaaataacttccatacattttagattggcttataaaatcttccctcacttgtttctcttgttgtagcaacaatctagaggtcgggtctctttgcaaattctcatgattctcatcaattttagctcttagtaactcatattattgaaccacatcaccaacttggctcttgttgaacttcatttttggaatagattccaacactctctcct

SEQ ID NO: 103645 - DNA, 624 bp, Cannabis sativa
ccgttaaaatcaacatcaaaacattcaaaaaaaaaaaaaagaataaacaacaacaagagaatatatatatataataaaaataataatacacctgaatacttgaaaatagacaagagaagacagtcgagtagaagggctccctaacgatagaggtaagagaattaccaggagcccccagctccggttaataaacagggtggtagggtcgtcagaaacaaatttgatggggcctctggcgaaaaagaacttttccttccaccctttatgagaggtctctaaatcagtgatgagggcccgattcttcctggggtgaagatgataaaaccatggctctttctccatcaaataataaaaatggatgacctcggatacctcccactgaacgcccgccttatcctctaaaacaatcagacctaaaaggatagcccacacgttaagaagtaactgggcaggagcaatcgaataatgtagaaggaattccttgattaatttagggatgggtaacctcagtttgattttcgattccaaccaataagaatgtagacacacccactcatcctgagaggaatctgccctctcatgcggtttgggaagtctaatttcgacccccgacggaaaaccgca

SEQ ID NO: 103646 - DNA, 504 bp, Cannabis sativa
tgcaaaacaagaaaagcctacctagttttgctacagcccgttccaaactcgccttggaagagaccaccattttagagcgagcaaaacaagaatctgctcttgtagcccattcccaaacgtcagatgatgatatgaatcaccaacatccttctcaaggtaattctaatcataataatcgtcataatcgtcataataataattctcgtgacaaaaatggtacaaacagaaaaaacaataagaattctggcggtcgaaacgccggcaagggtggtcgaaactctgccagtggttcagctggtgggttcggtagtggtggcggacgtggaagacacccacaacaatggcagcctgggtcttggatgcaatgggctccatggacttgccctccttctccatatccttcctacaacaattgggccaggcccactttcactcctccaccaccacagcatggtcttcttagaccaaaacctcaacatgcagcttataatgccaatgcaccca

SEQ ID NO: 103647 - DNA, 720 bp, Cannabis sativa
acgaatttcacttatccacctcagaaacttcggtccagtcactcaaattgcaccagccagctgacgtggaagaaaggaaatgaccaaatagagttaggattcactaggaaatgacaacattagatctttagcttttggtccgtctcagaatcccatacacatttctaaaaatttcaagttagtgacagttgagtcatttgatattggagaagaagaagaaaaatacttcacaatcaaaatatactcttcaagcacaaaagaatggtataaatcaagagaaatttgtcaatgcaacaacaacatacttttgttcttttgatttcaaatctttattgatttcaaccattcttttgttcttgaagagtatatttcgaatgtgaagcacttttcttcttcttctccaatctcaaatccctcaattgtcactaaattgaattctgtagaaatgtgtatgagattctgagatggatcagaagctaaagatataatgctgtcatttcaaagtgaatcccaactcagtttggtcatttccttgtttaatggattgcaaatgtagattgttaggtcttgagtagggaagcaactcttgcaacaaatgagaacctgacaccatgaaaataccacaacatccttagggagaaaatcaaagattgtctgtttgaattgaaagccttcttcataaacaaaaatatatgtcacagttttgatatctttgttgag

SEQ ID NO: 103648 - DNA, 511 bp, Cannabis sativa
tacccctctcataactcaaccccaactctctctcttcctctatctctctcggttctctctcaatcgaaccactcatgaaatcaaaacccccctcaccaccgcctacaacgccggccccctcccaaatcaaaaccgagcacttcttaccgcctacggcttacatcgtcggtcccatcaaaactgagatgtccaaggtaagcttcggcccctttttttttgtcattgtttttttttttggggtgatgtatgatttggggtattgataggtgttgattttagggttataatatatattgtatgtgtatatatgtgcaccgtgagttttgttagatttagggttcgatttaggttcagatcttcgaattggggaaatcacgatttggggaagacgatggcccgatggagaccctgattgggtccgatgcatgtgcgaaaaatcatttcttgttgggtccgactagtcccatgtgtaacccgatgggatccaatgcatgcttaaaaatcaattttt

SEQ ID NO: 103649 - DNA, 581 bp, Cannabis sativa
ggcacagcccctgttttgaccgccagatgaatacccattcggacagccaaagtttcagctgcttcaactgagaaatcgccaatctgatgatgaatttctgctgcaataacagccccttcaaagttccttatcaaagcacctaacccgattctcagctccgaatgctgaagacttgcatcactattgatacaatagtagtccttaggaggcgcttcccagccgagaggagaagaatgactggctgtattggtggtgtccgttgtgtgattgttagacagcatgaaattggcttccaattgggcccatccgatccacttctcagttgtggggagatgtaaattgagccttttcttattccttctattccaaataagccaagacataatgaggaaaaaaagaaagtcatccttagatacctgttgctgaatgtgaattagcatgtctaaagctttgtttcggctgtgttttatgattggccacatcgtgaaattccgccaaatgtgtttagcagaggtgcaataccaaagactgtgctctatggtctcttcttccttgttacaccagcagcagaggggattaac

SEQ ID NO: 103650 - DNA, 526 bp, Cannabis sativa
tacatattcattaatgaaacagaaacggtgaaaggtgtgtttcatatttttaaagcccttttttttattcatattattattagtataattaaataatttaatgataaagaatcacttatattctttataaaatatgtataactaaaacaaatgactataacaatttattttttagcattgctacttctctttatgtttagatttcccatatgtgaattttgtgttaaattttattaaaaaaaataaatgttatatttagtataaattttataattatagtttaatgcataaaaaataaaataaaatttattttaataaagtaaaaaaaaactaacaaaaacattaattttttattaaaaatatatataaattaaatatataaataaaaatataaaaaaaattattaattacataaatagatagcaaaaataaaataaataaaaacctgatatttattgtgatgtaaaatttatattaaatttagtacaatttttatcatgtttcaaatttaaattacatcacaaat

SEQ ID NO: 103651 - DNA, 505 bp, Cannabis sativa
tatataggtgtcaacttataattaaccgacacaaaaaaatcttttgtagtagagtgatcaaaataatatgttcatactatggctagtcattttttatccaatctatcatttaataaaattgagatttaaaactagtgttacatgcatatcattgtgtgtcatattttatttttatgtaaatattaaaaactaagctatatattgatgtagacataattgagtcaatataataggctgcaaatactgtttggattgtttcaaaaaaaaaaaaaatactgtttggatgatttgttattaatcatgggataattagtaggatgatgacatttctttatgctattaattaattaaacgacatacatacaattctgtattaatcattaattagtaatgactatgcatgcatgcatgggattaattagctataataattaatatatatgaattattattatatgtaatatatataatctaacctggttttataatgattgtacttcatgct

SEQ ID NO: 103652 - DNA, 582 bp, Cannabis sativa
ttgtactactgtttataaaatcatttcgaaaatcttggctaataggcttaaggttattctcagccctttgatttccccaaatcaaagtgccttcctcaaaggccatctcatctctgacaacattcttatggctcaggaaatcctgcactccattaacaataaaaagcaaggaagagaaagttggatggcggtcaagctagacatggccaaggcatttgatcgagtggaatggaaatttctccataaaatgatggaaaaatttcagtttcctagcaggttcataaagctggtcatggcgtgcattaccacaaccactttcaaattcaacatcaatggccaagctcaagggcttgtcaccccatctcgaggaatcaggcaaggggatcctctctccccatatctctttctcatatgtgctgagggtctctcatctattcttagacgtgcggaaagacatgatgaagcttttggtataaagataactcgctcagcccctaagatttcccatctcctttttgcggatgatagcattctattttgtaggtcaaacatccaagcttgtaatgctataaaagaagccct

SEQ ID NO: 103653 - DNA, 620 bp, Cannabis sativa
cttctttaccttctcactctatttaactctttaaaactctataagatagaacgaacaagaaagtagcaggtatttttgagacttttctgttttaaatttttcttgttttcctatattgttatttgaattcttcttatttttatttatttaagatttttactaatatgaactttgttatctaagtttacatgtaatttagagtagcttattgtttgtgataaatctcttcataattaattttaaatctgccatgaaaattcatgaataaaataaatcaccatttattttttcttagtgaagtctctttcatgaaaattgtgtttacctattacacaaagctaaatgattattttttggaatcagattttttattatcacagtaattattaaagttattgtttttgcttgtaaaggtcaatatgataatggataaaatttgtagattaatgtttctctatttgctatcctaaaatctcatgtgatgcatttaattatagttataaatttgattttaatgttgaatttctgtctacccaatgtggagatgaacatgatttatgctttgtttgctttattttctataacattcccaaaaactcattagaaacaacatgtgaagt

SEQ ID NO: 103654 - DNA, 575 bp, Cannabis sativa
  modified_base (57)..(72): a, c, t, g, unknown or other
gtgtaatttgaacccctcaattacttctaatgacacagttacagtgtaattacatgnnnnnnnnnnnnnnnnaaactgtgtaattacctctaattagacacaaatccaattacactgtgactttctaaacgcaccctaataatttaaaattattacacccataaccttaataataaaaaataataagaatgatctctaattaaatgtaattatatactcaatcttgttatcaatactttaagagacaaataagtgtgtcagtcaaggattagttcaagtgatttagtttttttttttttttcaaaaaataaaataaaatcttataacaattataaaattaaagataatcttttttgccacactcgacacatctacacttcatttcaccctctgtcatttaagtctattttctcaaagagacgaagtcactttatttttctttttttttttttgcagttctagttgattttagagctgtaacttccattcgacatctatgcataaaattctcaagtgataatggaagtatcaaagttgtaaagggcgatcgaaaaagtgcaagaaagtgttatagt

SEQ ID NO: 103655 - DNA, 512 bp, Cannabis sativa
attaaaaatttatattaaataaaagtatgctattataaaaaaaaatatattattgcgggaacaaatttttatttttaaaaatagtctaaaagtaataattttgatgattaaatgagatgacacatgctattaatatcactatttatattatttattgtttgatgaaattgttacttcatatttattaaaaaaaaaaaaaaaaggaaaagaagaacaaaggggatataaaaaattgttgtcaaccctaaaaaaatagtataatttttaagaaaaacaaaagaaacaaaggaattattatacctagaagaaaagtatgacaaaaattaggctaggaaaagtgtaaagaccgcttatgataaataccttaggttattaaataattagggtttatgcttgagatttaattaatatttataaaatgcatatggtgaaatttatttaagttcatgtatgtttattatgctatctaagtaaatttattaatattcgtgattgtgctcggaagctgtgga

SEQ ID NO: 103656 - DNA, 598 bp, Cannabis sativa
tttttttttttttttgtatgtatatattcctcttgttgatttacttaacacaattttttttttctctgctgttatgtttgtcttttttatataattgtttttgcttgctttgattttactttaggttttgtatatcaatctttgttttactaagttttggggagtctttcattattagacttctccttccaattaaaaaaaatcaacaaaatttgattaatagttctattaatctatttttatatttctattcaacacgagtcacaattgctatatataaaaaatatatatttaattaaattaaataagccatataaatatatataataattaaaaaattattaaataattgattttcatataaagaaaattaaattaaatttattttttaattaaaattaaataataaattatagaaataaattttagtggccttttaggaaaatgtcactagtataagttttggcatttttaaagtttcactaaattatttttttaaacattaaacaaatatatagtaaatattatagtgacattttaaattgccacaatttatatttaggtgacattttaagatgccactaaaaaattaattagt

SEQ ID NO: 103657 - DNA, 578 bp, Cannabis sativa
cagactaattatgcaatgcatcactacggtcagcttccaagtcttgattaatggaggccttaccaaatctttctcaccaaacaggggattacgacaaggagacccgcttttgccctatttgtttattctctgctctgaggtgctttctagattggttctagccaaagaagagatggggttgattagaggataccaattatcgagaaacagccccccggtatcccaccttatgtatgccgatgacaccattttctttatagaagctgatcctcatggcatatctcatctgcaggaagccattcaactctactgctcttggtcagggcaatgcatcaatagtaacaaatcgaaaatccttctctctaggaattgcaactctgctctgggaatgctcatctccgaaagccttggatttgatataatgaatggtgatgaattcttcttgggaaatcctctttttatcaaaggtaacaggtccaaggattttgattttattcttgataatgtaagaagcaaaatggaaggttggagagcaagattactatctcaggcagctagaactgtgcttatcaaaaatg

SEQ ID NO: 103658 - DNA, 526 bp, Cannabis sativa
cagaaaggttatggtgacccaaagcacagagatattatatttcaagcaggggagcatgttttcctgcaggtttcaccaatgaagggtattagacgctttggaaagaggggcaagttaaaccctaggttcattgggccattttagatactcgagaaggtcgggcaggtagtgtatcggctagccttacctccaacattatcggttgtcataatggatttcatattttaatgttgaggaatatgtttcagacctgactcatgtcttgagttataaagcccttgaactacaatcagaattgtcttatgagaaacagccagttcaggtcctcgataggaaagaaaaagttttttttctcttttttttggaagcaagaccatagccttggtcaagatgctctggaagaacaacagggtggaggaagccacctgataattagagtctaaaatgagaactcgatatgcaaagctatttagattagatttcggggatgaaatccttttagcgaggggataattgtaatgaccgc

SEQ ID NO: 103659 - DNA, 586 bp, Cannabis sativa
gtataatataccactcattcagtactaatattttgtaatcacaataataataaaaataaaaaatttataagaccgcgcgaagcgcggcttagttgcccagtaattaaataaaattaatgaacaacattaaacaaggaaaaaagaaagaaaaaacaatactgaccaacataggtagtccgagttacaattcgaagaaacttggttggcctaaattttatctttagaaccaagaatgactacaacatgtcaaacacagacacagtataaatctaaagaggaagttatatatatatatatatatatatagtagtaattaagtaaagactaattaagattattgtcttctgaactttgacatgtactaaatcatgcccttgaacttttaatgtcgttaaaagtactccttgaattattgagaatttgagattgttagatttaagaacttttgtccaattttagtaaaaaaaaaaaacctaacatagatgaaagtttaggagcatgatttagtacatgtcaatgtttgagggacatgatttggtaaatatcaaagtttggggaacaaatcactgaaatagtaaaattgaat

SEQ ID NO: 103660 - DNA, 544 bp, Cannabis sativa
tgatggtgaatgggtcggctgggacgacggtctccctaccgtgattgtgaattatttccagcatctatttatgcgttcagatggtgattactcttcgattgtcaactgtgtttcccaatcggttactgcagcccaaaataattcgttactcgaggaagtaactcgtgaggaaattaaaaaggcgttgttccaaatgcatcctgataaggctcccggacctgatggtatgactcctggattttatcaaaaattttggagtttagttggtgatgatgtggtgcggttggttcagagtttctttgctactggtgagtttccatctgtcttgaatgaaactaatattgttcttgttcctaagaagaagaatcctgaacaaatgggtgatcttcggcctatatcgctctgtaatgttctttacaaaattgtctctaaggtgatcgcaaatagactcaaagttgttttgccgaatgtcatatcttccaatcaaagtgcattcttgccaggacggttaatttctgacaatattatggtttcttatgaggtt

SEQ ID NO: 103661 - DNA, 655 bp, Cannabis sativa
  modified_base (461)..(472): a, c, t, g, unknown or other
tgttagttaatttaagttaaatctatcatcactcgagagaggttaatagattacattaggattcttgaaactacaaattataggataaattgtgatcatcggtatattgagattcatagtttgatatagggaaatcaatgctctaggtttttactttttgattaaaaattattatttgtctgtttatttttccatttattctattatttggttcttaattataatttactttgtgttatcgaattaaagtataaaattaaaaagtataataattagtaaaatttaataatcaatgcctgtgggttagtattaaaactttgtgttgaccttgaaaattaatcaaccgacaacggggtcatgcagatctaatgctttccatgtgtttgcacaaataagagtaaaaagtaatagacaatgagatttgttatagagattcggcccccttgtgatagcgggtaatnnnnnnnnnnnnttttagttgtattgataccgagggaatcactatctagatcgctataggtaggatctgctatagtgcccttgggattacaatgtatgaatcgatatttggtagaactcaagtgttggacagcctagagtgttgtgcaacataggcttaggcatgtgagagaatgaaggagagagagagagagag

SEQ ID NO: 103662 - DNA, 515 bp, Cannabis sativa
ccattgaagcaaacaattttaaaatcaagccagtcatactttagatggttcaatccatagtctagtttgcgggactaccttcagaaggccctaacatgcatttagaaaacttcatgcagctttgtcaaatattttagatgaatggagctagtgtcgatgctattcgcttgaggttcttcacattctcactgagcgaacgaggaaagagttggttagtgtctttgccacctaactcaatcaaaacttaggatgaactagcactgaagcttctctcaaaattctttcctccaacaaaatctgccatgctgagaggcgagatcaacaatttctaccagcttgacaatgagtctctctatgatgcttgggagagatttaatgacttgattagaaagtgtccaggccatggaattgaaaagtgattgttggtcaataatttttacaatgggttgtgtggtactactgacactctcatttatgttgcaactggtggagaattcatgagaaagagtgctaat

SEQ ID NO: 103663 - DNA, 599 bp, Cannabis sativa
taattactcatacattatataatcagtaagtagtttaataatcaaatttttaattttgtagtatttctttatattgtaggtcgtgaggttaatttctgagaatctgacttatttagtgttaatcaatttctagctagctagaggtgtacattcattaactaattatgaatgcttagaagagtttaaatatcttaaatattaatccgtaataaagtaggttatgcgatatatattgcactgcggtcagataagtagaataatttgcatgttagatgagtttgaatatcttaatagtcatccgtagtaaaatatattctgagaatacatgtactgcgattggataagtagcatatttttgtattgctacatgttgttatgattgtttaatcttgtttttggattattttttgttgttactagtagctttagattttttgagaacattaaattgtagccgttatgctgtcgaaatttctgtataattaggataacaattaaattagtactaactagttactagttagtaatttagtataataagttaggaggcgtttggttaggaggaatgaaaatatgggaataggaatgggaataggaat

SEQ ID NO: 103664 - DNA, 950 bp, Cannabis sativa
tctgatgctcagcatgctattcctcaattcattacccttgttcaaaatcagtttggtaagaccattaagggtatgaggtctgataatgccaaagaattacaattcacagacttgttcaataaacttggaattttgcattatcattcttgtgtgcaaagacctcaacaaaactctgttgttgagagaaagcaccagcatttactcaatgttgctagagctttactttttcaatcatatattcctttggtgtattggggagaatgtgtggctactgcagcctatttgatcaataggacacctacaccaaatctcaaaaataagaccccatttgctattcttcattctaaggaaccatcttatgaccatttgaaagcttttgggtgtctagcttatgcttccactttgagtcaatctaggtcaaaattctcacctagatcagccccttgtatttttttaggatatcctccaggtgtcaaaggttacaagttgcttgatttgaataaaaatctcattttcatttctcgagatgtttatttttatgagagcatttttccatttgtttccactggaggtatcccccctgcctatgagacatttttcactcactctccacacaatgcaccaaatatggcagattattcatctgttgttgcaccagattgtacacctgctgctgcagaacagatgaattctcctgcaccaggtattgtttcaggtgacatctcttctctcaactcatctactcatttttctgatccatatttgcatccatctgctactgtttctccatctgatgagttgtctcaacctgaaattgttgagccctctgctactgctcccactgatctgcctggtacacccgatttggtacctaacaatttttctcataccagatcaggaagagtagttcataagccctcttacttgaatgaatatcattgttatcttgc

SEQ ID NO: 103665 - DNA, 526 bp, Cannabis sativa
tttcaaaatgtcatagaatttttttctcttgttcaagttttgtagtattttccaaggattaatgttgttagggattgggctatagaattttttaaatgagggctaaggagaatttttattttgggattatttcagatttacccaaaaaaaaaatatatgtttttatggaattttgaatttttatttatatttttacaaactttttttcttacaaatcattattgacaagttgttctaagaaaatcattgtttacacattatttttacattgtctaaatataatattgtgacaatttaaaaacaacattgaaacaatacaaaatcgtaaaaatataaataaaaaaaatcataaaaatatatataaaaaaaattgtttttaggtgtatttttaaatttcccttatacaaaagggtcaaggtgcaaaatggccctaattctaacaattaagttaataaatgtccatttttatcaaaaattaacaaaatgtccattctattaaaagtttgatgatgaaattacaattata

SEQ ID NO: 103666 - DNA, 550 bp, Cannabis sativa
atcgtctttttatttgaagttgaaaaacttataaacatactttattctaataatttttattatatataaagtattctttaacttatgctatttttttctttcttcttatattaattaaaatgtatttattaaataaaaaaaatatacttttaatatatgacaaagaaattatatgaattatatagaaaaaaatatataaaaaaattatacatgatttaaaataagtataagagaaattatattaattatagaaattaatataaaaaatgtgaaaaataaaattttataaaaaatattaagagtaattttttaaaattaatttaaatttattttttaaaatattaagatgtgctcataatttagtttggtagggtgcaaatgagacactaattgtaaatagtcaattttacttattattactgttaagtttacttattgaaaacttttatgtacaataacgatttgaatcaaataaaatttgtgattaaaattaaaaataattaaaaaaaactaaaataaagtattgctaacaaaaatattattaagttta

SEQ ID NO: 103667 - DNA, 715 bp, Cannabis sativa
  modified_base (358)..(359): a, c, t, g, unknown or other
tcgtgttattggtgatggtacaagtactaaaattctgggtgctccttggctaccatcaaatagtaacagatatgtatcttctactcatcctaggcttagcacacatactgttagttctctttttgccacaaatatgttatgttgggatgctgaagtagtctgtgacctgttttctccccaagaagctgagataattctcaacattcctctaagctctactgctagacctgactgctggtcttggacagcagaacataatggaaattttactgtgaaaagtgcatataaccttctgcagaaccaaaaaccagtcgatccaaggccaaataattctggtttttggcgtaaattctggcanntgaagatacctcccaaagttctgaattttttgtggcgagctatagcaggttctcccaacttgtgtgaaccttgtcactaaacatgtcccaatttcttcaagctgccccgtatgtcaaactacagcagaaacaacatcccattcactgctatcttgcgattttgctgctgcctgctggtagggctgaacatttagacccgcaaactcgaaaatccggcaacccgccccaacccgctgccgaaaaaaaccgaaaaattgaaaacccgtgtggtcgggtcgggtccaactcgaaaatactccacacgggtattgggttcggattttaaaataagtcaaatattttttcgggtggtaatc

SEQ ID NO: 103668 - DNA, 623 bp, Cannabis sativa
tgtacacattgttcatgtagacaatacaatgtgtacatctggatagtacaacatgacacttaacacctaaaaatggatgaaaagtgcaaagtgctaacataatattaatttagggggttttaccatcaaaattttaaaattaagagttagttgcaataaactaaacacttataagggttatgccgcatattactctttttttatatagcggtgtacggtcaaaaacttaatttaaataatttgccgtatacacgcccttttacaccatcactatgcatgtcttactgacaatagagttcttgagtttaccactcgagttcaagaaacattaattatatttttaatattgtaaattatttataaactttttaaaaatttacaaaaaaataatattgtatagtaaacattgactcaaaataaaaaagtaatgctttcaaaaaaaaaaaataaaaaagtaatgaagttaaaataaaatattataattagcttaagaaaaaaaactctaattagtaaaagcaataaattttattttgatcaaatacaagtccaaaaaaattgctatttgttataaaataatataaagtagatgagaggaaagaagaagaagatgaagagagaaagag

SEQ ID NO: 103669 - DNA, 562 bp, Cannabis sativa
  modified_base (361)..(364): a, c, t, g, unknown or other
ataatattttcctatcaatccacaaagtgactcaaatcactaggttgtactatctacttccataacctaaaatggagtcacgttattttcaaatattcagttaatagtatacttatgatgtgacgtactctgtagaactattaatgtacgttattttcaaatattcatttaatactgtatttagaaattgattctttcattaataatctacatgtaggagattaaacattgaaagttgtattccaaataaaatttaagtttatagttagaaagacatacccaatagaacacaatttatacataacctttagtcaatttttgctatgtatagccttagaaatgaaaaacacctcaaaatacnnnntgtttccaataaactttttaaacaatgtagctgatagtgtttgtggtttttaaagaaaaccctaaagaacgattttaaataaatgactaggaccttttttgttttttataaaaataaatattttattaatattttcccatcaatccatatacggtcaaatcagtaggttgtactatctacttgcataacctaaaaaaa

SEQ ID NO: 103670 - DNA, 598 bp, Cannabis sativa
  modified_base (465)..(465): a, c, t, g, unknown or other
aaccctcctccacattcctagtcctcttaggtgccatttttctttttttttcgatttttttttctgatactttttcttttcttttcctttttttctaaaaacaattgggcagcacctccccttaattttctatatcccaaaaattcaaaatcactcaaacaatattctcaattactcaacaccacaatacaatgatcacaaccccaatatcaacaatattcttgcacaagacacaattataccacccaaatctaaaaaaaataaccaaattccttaaagattaaaggaagtgatacttacaaacccgaagaagctttattccacctccattgttgaatgttcttgaaagcttgaggttgaagatgaagacaatgaggattttcggatttggggtgctatgggtgatttttggtatgggttttgatggtatgtgtagattgatgagtgaaattgggtttttgaatngattgggtttaagaaatttaagaaaagatgaaaagaattaagattggtgatgaaaattgaatttttgagaggaaaagggtagggttcggctgagaggatttgaaaatttgaaatttttggtgtagggttgaat

SEQ ID NO: 103671 - DNA, 639 bp, Cannabis sativa
ataacattaatgataattgggtttttgctacctttgtggaggttttggttcaaggtggggttgtcgaacatcacccactggtttcatgaaaggggttgcttgcaattataagaactctaattcgaggttctaaaagaatgtggttaaggctaaggatgttctaaagaagggtgcttgctatgtgatagctgatggggaatatatcaacatttgggaggatctgtgggtggcccatggtatcgatttatgccccattgcaaatggggtttcagcccccagctttatgactgtggcaaatttattactagaaaatggggagtaggatctttgtaaactaaataggttgtatgatcatgacacaatgagtgccactttggtaagggaaaggccactaggacatgggagggatcgctggatttgaattaaagaattgaatagaaaattctccaccaaatctgcttaccttttgcaggctcttgagagagaccaacattgtcaggtcgctccttctctgtggaataaattttggagcaacaaaacacttgaacgacataaagtgctttggtggagcattctatccaatgcacttccaattcgatcccttcttatagatccaatgaacattaaagactcctcttg

SEQ ID NO: 103672 - DNA, 1048 bp, Cannabis sativa
gggtaatattaatatcaccagaaggctttaagtttcactgtgctatgagattccaatttgatgcatctaataacgaggctgaatatgaggccttgattgtcggattaaagacaacagaggcattgaaagtcaaaaatctcatttgtcatagtgattcacaactgatcgtgaaccaggtcctcgggaaataccaggccaaaggcttaaaaatggcgaggtatttagagaaagttcagaagaacttggaaagattcggttactttaaaatcaaacaaattccgagagaacaaaagtccaacgttgatgccttagctaaactagcctcgcagaatgacctggatgaactgaatctagtcccgatagagatgctacgcgagctaaatatatgtggaactgaagatgtcaagatgatagatagctctccaacatggatgacacctattatcaattatttactcgacggacaacttccatatgacaaaaacgaggtgcaaaaactattgtatttagtggctcgctacacaatgatcgaaggaaaactatatagaagagggtattcaatgcccctacttcggtgtgttctccccacagaagcaaatgaaatcattagagaaatttatgtaggctcttgtggggatcatgcgggttggcaaagtctgtctaaaaggatcattagacaaggatattactggccaacgatcaataaggacacacacgagtttgtcaagaaatgtgataagtgtcaaaggttttcacatataccttgtgtaccaccaacagaacatagaatgatgaccttgccttacccattcactatatgggggattgatctaactggggcattacccactgggcgaggaggagtaagtatgcgatagtagcagtcgacttcttcactaaatggacggaggccgagccccgtgttccataacatgcaagaaagtccttgattttgttgttaagaacattatctgcaggttcggaatccccatgaagatagtatccaataatggaacctaattttatggcgacttgttcactgaattct

SEQ ID NO: 103673 - DNA, 622 bp, Cannabis sativa
acaaaaatcttatttttaaatttaatatatactatatcatctcttttgaatttttatagtcattaaaaatttcttctgaactattcagattgttagatttaagaatttttgtctaatttcattcaattttactaatttggtaattgtccatgtactaaatcatatttcctaaatagggtaattaggatttttatttctcgaactttgacatatatcaaattatactgttgaactttcatccatgttaaatttttttactaaaattagacaaaagttcttaaatccaaccatctcaataattcaaaaaaaaaaaaatcaacaaattcaaaaaatatgatttaatatatatcaaaattcggaagaaaaaaattccaaattaatcttattattatagaagctacctttattattatttaactcaaaaataagttactttttattttattatttttattagaacataagaaagcttgactttcggcaaataattcatgttaactattcaacaaaatacaaagtggttacctacgtactaactatattttattttttaaggaaaaaaatatataaaaataaaaaattcaagtcaatttgtttaaaagttcattattatgcaacatat

SEQ ID NO: 103674 - DNA, 773 bp, Cannabis sativa
attcagtcgacaatacaaacttaaaatcaatatggtaatataatcgacaacatatcgacaacctgtcgatattctgtcgataatttcaatcagacaggaatttcacaacatgtcaacaaaatatcgacatcctatcgatattcagtcgacaatacaaacttaaaatcaacatgttaatatagatgataacatatcgacatactgtcgacaagttgtcgacaatttagggcagaaaataaactaaaccaccaatcgacgtcctatcgacatacaaacgatatcctatcgacatgcaataacagcaatacaattcaaatagacaccaaatctttcgacatcctatcgatatgtcatcgataaccctgtaataaacatagataccattgaaacaccaacatctacaacctaaagagcacaaaatctacaaaaattccactaatctcaacaacatgcaataattggcatccaaatctatgaaaaatatattttttctcataaaaaaccttacctttgaatgaaattggtggtggtggcgacgacagttcttccttcagtttcggtcgacgtttcgtcgtgggtttgggtgaaattagagagagacacacctcggtttgggtttggatttgcctcgttcgtgggtttggttcgctggttgctgggtttgtcgggtttgtggtggagatgggtcgacggagatgggtttggggtttggggtttactggtttgggggtttgaggtttaatggttcctggttcgtggtggagatgggtcga

SEQ ID NO: 103675 - DNA, 526 bp, Cannabis sativa
aaataattttcttaaaggtaattttataaataaaatcaattttaggtataatattgaaaagaccccctttttttatcttaattggcctatttttgggaagtatcaggatttattcttgtttccttttcttttttttaaaaaaaacatataaaattttttggaaaaagagtggggcagtttttcttcttgttcgtgggctagcagttttttcttttaagttggtttcctttttgctcctctttcacatctttatttaaacaaatttatttgtcatttaatctcaccatcttctcttctaaccgattacccttcttgttggtagtttgtcactttgcttttgaatttcttttttagaatttcatggctaagacaaagaacttaggacatccaagcaagatggtggaaaccaaaactgccccctcaaatacttcacctgtgcctccaaaattgcctcctgctgctgcaactgcttcaattccaggagattcattacttcctcagcgtgaatcaaagaatgtggttgtca

SEQ ID NO: 103676 - DNA, 756 bp, Cannabis sativa
accgttgggtttgtctaattaatttgaaatttttacaattttttaccaattatttaaataatagtttaaaaaatttctagtaactttcacaagcttttatcaccatgttttcaaaaagaaccctacgttttcaattcaaattcacattcaaatgtaagttcatcaaaactctttatttgtcaattcaattgttaattattttatttttaagaaaactatgttaattattatgtttaataatcaaatgttcaattgattatttgtaatgagttaggttttttattagatgattttactagtttattttctaatttttttgagacattcttagttcatatacttcgccgtatagccttaaggttgcttataaattaacagtgcatgcacttagggcggatggtaaattagcttggattgaggatttttcttctttttattgatgtattaaactttgattgttgttgataagagtttaatttcaaaaaaaaaatgacaaaggagagtcgtctcaaatagttgaatagattagtacaacatttgaaatcaacaacattttttgaaataaaaaataataatcaaatttcgatacaacaagaatgatttgaactcttttataagtatcactgttaactcagtccacttagtagagcgattttttttattaataaaaaggttatatgtgtcactaaatgttacttttaatgtgttggcaaaagttggtattgcgctggtaaaatagaatttacttgtgatgtg

SEQ ID NO: 103677 - DNA, 561 bp, Cannabis sativa
  modified_base (314)..(324): a, c, t, g, unknown or other
cccggattttgggttctccttgaacatgtggtccgtgtacttgggccaccctcaggttgggtcctcctggaatgagtggtccgcgtgcttgcgccaacgtcaggttgagttctcctggaacaagtggtccgtttagatcgtgaattgggaggcctctgaaagcccattggctcttttccaagatggtgagtggtttcttcatgaggagtatcgacgctttttcaattgccagtcatggagaaagttgttttttttacgtattttaagagggttttttctgagctttttccacgaaggctctcaatgaaagcacnnnnnnnnnnncgcaaattttcgttaactatatttaagccttaaccgtgatggatttgcacagaaaatagaagcagtaaagaaaaaaggaagtaagaacacagaggttttttacgtggttttgcagttaaaactctacatagtccacgaatcaaccttcttggatttctgatacaattcaagggccttttctctaatgaatttttcgtccccttttcagtatagcctgctcctatttataattacata

SEQ ID NO: 103678 - DNA, 599 bp, Cannabis sativa
ctcacgaaatcaaataactaaaaccaaatttcctagttaaattcactttgaaacattgaaaaaaagcatatatttaaaataaatgacaaaattagtattttgtattttgaaacactaacgcaaagtttgtattatttgattacaaaaacctattaatttacatacatttatgaaacagttagagtttgttgattagttattgacgtgtcaaatttgacgaatattaacaagtagaagttgatagagtttgttagcctgttttttcttagttggaattagtttaattaaactaattatatttatattataagccctccttgttttcattatttttcataaaattttcagtttcagtttcacctatatatatataaattataataaacatgccttaaaatttattaaatataaaacaagttaagccatgccctgctaattttttgtttctttaaaccaaattttatacctttcaaaagaaaaaaaaaaattataacaagatcagttgcatggaagagcaaaaatgttgctttatcaattttataattctgtgtgtttgaatatgccaatgatataaaaaaaaaataataagagttaaattg

SEQ ID NO: 103679 - DNA, 661 bp, Cannabis sativa
ccatcgccgcggccataaagtctgtaatagagacactatttttcacacttatctcgccgcggcgagaccacttgtggccgcggcgagatgcccctaacgtacataaaaaggggaaaagatttttttttcaaaattaaaacctctctttcaaccctaaaaccaccacctccgaaaactcctccccataaccaaatttcttcatctcatctcatcccaacccttttcttccaatcttttcataatctttgatccccaatcaatctaaaacacttttcctctcatcaaacactctttccctctcaaaaaccatattcaaatccctaaacttcacccaaattcaaaatttcactattcatcatcatctacctcaagaacttcaaagttttcttcagtggaggtagagtgaaggagattttcattgaggtaacaatttgttaaggttatctatgcaattattaatagataattttttatttttggaaaatcttgtgaatttagtgtgatttttggaatattgttcattgcatcattgtggagagttgtttgtgaattaaaattgtgatatttgtgattgggttttcacccaaaaaatggaattttaaggggaggtgctgtcgaaattttcttgaaattcttaagtgttaaaaatttggagcaacaa

SEQ ID NO: 103680 - DNA, 586 bp, Cannabis sativa
aatacttaattcacctcaacaaattcaactcatctctatctttttctcttttgatttttctttagtacataatatatgagacatgtttcatactattgtcatttattactttcatggttttaagattgtccatgtgaaactttttatatagtctgcaaaaatctcaaagtaaaatactatattttatgtatatatattaattatactctgattttgtttttgactgattgatattgaaagatatataaatcccatattctggaatctttttttttctttgtaaaaagtaaataagtcttttgatgaagaatccttgtctaaactgcaacatttttttaggctaagaaataatatataatatatattattataggtgttaatgtaagtctgtaactccatcactttgtgtctgctcctaactttaaagtgagaattagtaaatgatttatttatttatttatcttctgattttttctatatttttaagaaccatttttgcattaaaattacaattaaaaagtaccatattttttgcttatatatatcttgagtttatgatcatgatgaagtctctagcttcttatat

SEQ ID NO: 103681 - DNA, 590 bp, Cannabis sativa
agatctgaaaatgatgactctatcgagtggcaggatccatttgttgagcaggaactgctcttaaggcctcgagaagagcgttcctagggaattcagcttgtagaggttagacattagctggaagggcatcttctccaaccgttctccttgtcttccttcctttgggaggcattttcttaggtttgagaaccaaaggctaatcagttagtaaggattagatgctaataatataatatgtcttatacatatatatcaagatacttattactatcatcatttaaaataaatctaaactatttggtgacacactccgaggtaattaaacccggtgctctgatactatatttctgtcacgacccgagccctaggccgtagcagatatgtaatatccataacttgggcggtcaaaagtcacactttgacccttgtaggaagatgacgcttataaatgatcttttaatttatatcacaaaatagttatttaaaaataataaatttatctcctatatcgataagaaaatattagtaataaaatcaggaccactcattaatataaaagaacaataatatccccacagttatgtagtcac

SEQ ID NO: 103682 - DNA, 553 bp, Cannabis sativa
gggaatgcctagtaattccgtctgtgaatcttcgaacgaagcaaggatcactttgagaggatgaagtcagatgaaactcgcaaaaaaaggtcaaggataaggatggcatgcaagtcttcggacgaatttaatggtgatccttgacgaagaagtttaagggtttttctcaaactttttgtaatggaaaaaatggtgcaaaggtggttcctttttccttagtttatatctctgatagtggctttgttagatcagagcaaaattttatcctatggacttgatttaaagcagaagtgaaaaagatggtcatttaattctgatgtacctcgaaatcgcacaaccaccaaaatcaaaggatatgtgtcttttcacaaaagaggaacatgacagaaataccctatgtaatcattaaaaagaattttgtaaggggcaattgttatacctgaaagtcagtaagcacattaaaggaagacacatgtcgagctggaaagaacgaagaactcaaacacgcaaacgaaagtacacttagcaaggaacaactcgttggaaacataat

SEQ ID NO: 103683 - DNA, 575 bp, Cannabis sativa
cttttgtagccatggaacaacatgaaggaaaacctattataccaacccttgtccttgacctcttccacttcaacatcggtgtttgaaagaatgtcctctacgctgatcctaaaagaagtttacttagtccgagccatgtttcttgagctaggcaaatgtttggacaaaggatgatcaacaactataactactattgttgctttgactataggtctcctagaaggctctaggtcagcctctggaagagtgttcaaaacatttgtacagactacgtacatccatttaaaaggcaggtactgccttaaccctttgtcttattcccaaatgaattgactgtacaggctccctccgatgtgatccagatagtaatggttttgcacagatggtacggaaggtttagcttcgctgattaaaacctcccaatcgtcaaaactagaagtagttcttatactggatgaaaaagactctacatggagtttaggctgatctttaaagagaagttgtagtcaatctttgtctatgcggttcttaccttcccagaatctgcacgaattcatctacaaaagaaggaaggg

SEQ ID NO: 103684 - DNA, 500 bp, Cannabis sativa
ttttcaacgagtttccatgggcagactcaggctttttttatggaggttattggaatcaaagaggccttaggttagatcaaaaggaaaatgtaactttatgttcaacttgagacatatttcttagttgatgttcaaaacgtgcatagtgccattcacatgccatctttgtttagtgaggtagttcaggagtataagggtttgttagtgccattcacatgccatctttgtttagtcaggtagttcaggagtataagggtttgttagattatttgaagtctgttcattgaatttttgttaaacgttcggtaaataaagtggctcactatattgctagcgactcttatttctattcaaattgcatgttccgtgagagctctgctcctactgttgttttatctattgttatagttgaagctaattaattaatagagttgttattcttttttttttaaaaaaaaaaatactgctatttacaaaattaaatatattaattaaaatta

SEQ ID NO: 103685 - DNA, 546 bp, Cannabis sativa
cttatatggctaagcatgaattagttgtgcatgcactcaaggtggatggtgagctagtttggatggacgattttccatcttttcttttggatgtactcaacactgatattttttaataaaagtttgttcattgtataacaaaaaaatactagtgagcacatttggttagaaggaaagaaaacaaaaaaaaaataaggaaaatagaataaaattaaaatgcattaaaaaattaataaaaataaaattaataattttttttttcatcttgcattgaaatggtatttcattctatttcgaaataaaatagttatcctaccaaaatagtagaaaagtattttaaagtattagaatttcatttcatcgtaatttttatttgagtattggaatttcacattccaaaaaaataattttttttattatttcggtggaatgactattccattttaaaatggaaagaaataccatacccatgcaagataagaaaaactaaatactttgatttcattcttattactattcttgttctcatttatattcctttgtttt

SEQ ID NO: 103686 - DNA, 1034 bp, Cannabis sativa
tgttcttcttgtctatatgttgatgatgacatgatcattattgccagcaacaatgccacggcaatctctaacttcaaacacaaccttgacatacaattcaagttaaaagatcttggaaaacttcgttttttccttggtcttgaagttggtcgcaccaaagagggaatctttgtttctcaaagacatttcaccttgcaattattacaagacacagggtacactggcaccaaacccgcctctacccccatggaggtcaatttaaaacttagcaaagacaaagggactcccttacccgatcccactgtctaccgtagtctaattggcaagctaatttaccttaccattactcgacccgacatttcttatgccgtaaatcacctcagccaatttttggcttgtcctcggctttctcatttacatgccactaatcgcatcttgcaatatctcaaaaagacccctgggcagggcttatttttcccttctaatgcagctccccaactcactgcttatgctgaaacaagcttgtccccatcaaatgttcaagtttctttctttgctgatgccgactggggcagctgccaagatacccgacgatccatctccggatactgtattttccttggcaattctcttgtttcatggaaatcaaaaaaacaacaggtagtctctcgctcctccgctgaagccgaatatcgcgctatggcaaatgcaacctccgaactcacatggctccttgctttactcaaagaatttggtgtctcccacaccacaccagccaacatgtactgcgacaacaccgctgcaatccacattagtgaaaatccggtctaccatgaacggacgaaacatgtggaaatagattgtcacttcattagagaaaaggttcagcaaggttctctcaagcttctccatgttccttctcaacagaatctagccgacattctcaccaaacctctactcccaaatcagttttctacattggtatccaagatgggtgtacttaacatttacactccatcttgaggggggctatt

SEQ ID NO: 103687 - DNA, 722 bp, Cannabis sativa
  modified_base (190)..(207): a, c, t, g, unknown or other
taaaataatttccaacagatcgtagatgtactaatcgtatttttttttttggatttaatgagatttattttatttattttgttatatataaataaaaagtgacccataaatttctcataagccattatatttttattaataaaccattttatttttaatataaacaaaaagtcacccatgaatttctcannnnnnnnnnnnnnnnnnatataggcacactttatatagatagatatagtccggcattaccagcaatcccaaaaataaattgcggcagcagcaaaattcaaaaaaaaaatatcaaaactctaatttttaaaatccccaaatttcataaataaaatcatcagatcttcaattaattcaacaaaggtgactctgatgccacttgttaagatttataaaacactcaagaaatataaatatcatggatctaaatatattcctaaaagtgctttaatatagaaaaccctaaatcataaatctatatagcctttgctaaattaaagaagaagataataaaagatgagcggaagcactaacctgaagccattgttggagattgaagagaaggttttgatcttccaagaatacactattttcttaggtattttctctgataaagaaggagagaatatagaaaccctagtgtttcttgggtaccactacctatttatagactcatcttagaatgagttttgggtatttataatttggcccct

SEQ ID NO: 103688 - DNA, 585 bp, Cannabis sativa
ttataaatgtttaattgatgttatttagttcttatattatttataactggttttttctttaagaaatgtgtttttaaatgtttatattctgtaattgagtttttatacccttttttaaccggtttcttttgtttgttttttaacatattttgtgtttcatttgttgttttattattataaccggtttttaaatttctttatgagttttttaaaaatgttatatttgtatgtttttttaaccggtttctgttttgtgtttcaaggttaatgttgatccttctgatgacgattttgttcaaaatgttgaatctggaactagttctaaagttccagttgaacaagaggctcagccctctgtcagggaaacacgtggccgggaaaagaaggtgtttatatgtttataattttgttctttgttactgtttgtgaatgttgtttttctgatgtatatttatcttttttgttttctgttttttttaggccgcagttgctgattctaatcttcccaatccgctggttcgtcgtacaacacgttctggcgttaaatctgttgcgtcgaagggccctagtccttcgatagctgaa

SEQ ID NO: 103689 - DNA, 600 bp, Cannabis sativa
aaaagccaaggacaatcactcaaagatgtcggattgtatcttcctaagcaagtattcactcatggccaattatatgtcgcggtatctcgagtcactacaagagaaggattgattataataaatgttgataatgagatggaagacccaacattcatcaagaatatcgtgtacaaagaagtatttcaaaatactctgtcatcatcccgcaaaagaaaggtatcacattttcacacttttattttcattgcaaaggcaaactcgacttcatactctacttatcattttaattatctatttgcttaatcaacaggaaaagcagtaacacaaaaaaaaaaaaaaaatccatcttcaaaaaaagtagtttcatgaatcatgacccccctttcaaattacaacttaaggtacacaattcctatcaccataatttgttcgacataatctttttatgtacatatttatattaaaataaaattcaaacactaacatttttatataattcttattttcagttttcaaaagcagaaatgttgtgtggtcccttttatagctcttatcctatatttacgtttgtaggaaggcattcaacttttgtttacacgc

SEQ ID NO: 103690 - DNA, 671 bp, Cannabis sativa
  modified_base (261)..(264): a, c, t, g, unknown or other
actcttccaaaaccaagaatccgaacttttataccaggtgagaaaatctttgcccctgaggtactttgcaaccagaactttacaacataaagattggctcccattaagaatattctacccccatttagctaagaaggcctggttcatttctttggtttttcggaatcccagaccacctagagatttagggaggcagagcttgtcccaggactttagatgaagaccatgattacctttctcgaaaccccaccagaagtcacnnnncaacccatcgatccggttaaccatgcgagtagagagctttgtggtttgcatggcatacataggcaaagacagtcccacagattttataagagtagctcgccctgccttcgacaaagttttcgccttccagccctgaagctttgccgtaaggttgtcaagaataaaattgaaatcagcatccttttgcctagacctgaataggggcagacccaaatattttatgcacccttctggataatcaattcccaatgcttgctttatatcatgacgcgagtccatcggagtgttattgctgaagaaaatggttgtcttgagcttattaacctgttggcctgaccagttacaaaatttctcaatacagctccaaatacctttggcttcagcaatcgtcgctctacccacaagaa

SEQ ID NO: 103691 - DNA, 633 bp, Cannabis sativa
ttaattagttattttttataattatttgtcaaaactactcatattcacaaaaaaaaaaaaaaattattttaggtggatatataatttgagaggagaattatattgtacaaattttttttgcattgttctttgacttcgccattagaaaatttttgagttccaatctctattttttctttttaaaaaaatatcaaagttcttagttttagttatagtttaggttttttgattgaagaacttttagagaaaaagatgaaggagaaggagaagaagagagaagtgaataatagtttttttttttttttttttaagaaaatgatatatagtattttaacaaataattatatatgtaaaatattaaataaggaaataatatttaataaaataaaataaaataataatacatattaaaaaaaaataactttaatacctctacacaagcattatcttataatataatatacaatttcaatatttaacatggaatatagtctttattttctttgcgatttacgcgtaagaagctgcttgattaattttgtatttatattatgaatattgatattattctcttgtcttctgctatatagactatccctattaatttgatgaatttattaattagtttggtga

SEQ ID NO: 103692 - DNA, 644 bp, Cannabis sativa
aagaaaaaatattattagttatgatatgccaatcgttttgcttaaaagtctggtaagcattgtatcaagaaaagactcgccagactggtggatgtaaaagtgttctaaaagagtaactgcattcatatatactgacaatctaacaaatcatatatatatattgctggacaaatctttttgctgcatcaaaactataatcatcttttttcattcaatggatacattactttctcaatgttcgacaattaaacattgaaaatttcaagtatctttacaactaccccttcatcatgattgacagtgctcccaacaatatcgagaaataattgggctgctagcatttttacttctgccaagtcctcaaatgtagttgcttctttcaaatgtagctgcatttttatattcaaggcatatacctcaaaatttctagcaagggaagccataagctttgcactaaagtggataccaactaagcaagccatgcctgcaacaaattcagcatacattcacaagaaacatacaaaataagttaataagacaaataaaactaagatgatatagatatggttagatacatttttcttacacctcaaagtacaatgagaataaaaaaggcacgtgatactcaaatatattactaccat

SEQ ID NO: 103693 - DNA, 644 bp, Cannabis sativa
atgatggtatggaagtttgggtaggatgaaggtagtcattaagcgttctttgttgtgcttcattattattattcatggcgaaaggattactgattattgtgtgatcgggagaaggagtagtggatggattggaaaaattttcactagaagtggtttcgtcagaagaagagttactcatccactctagttcgaaatttttaaatatttttttattgaattttttttaaatagtaaagagcacaaaaatacaatattacaatgactaacacaaatatattcccatgctagttggaaaggttgccaaggtaccgcttcgtcccaaccttgcctagacagaactgaggttcacaggtaaggtggagggtacactaacacaaaccttatttaaaaactaacttttctagacaacaatttttgtttgcgtcatatataatattatattgttatacaaaatactaagcgttttatggaagaaaaaaattagaactcactttttttttctttttgtattttataattttttttaaggacttaaattctataaatttttacatcaaaaatacaaaatgcaatatttattgcactaataccactacacggctatatcaacttttttactcttcttctttattttattactattt

SEQ ID NO: 103694 - DNA, 526 bp, Cannabis sativa
aaaagcaccacaagctatatattcattgttggaaatacagttgttagttggatgtctcaattgtaaaaaattgtagctttatccactacagaggctgagtatgtcgcagtcactaaagccagcaaagagatgatatggcttcaaggtttgttaattgagctaggattcaagcaagagaataatgttttgcatagtgatagttagagtgtgatccacttggcaaagaattcagcatttcattccagaaccaagcatattgaattttgttatcatttcattagatctctattggaagatgaagtattaatactgtagaagatctaaggatgtaagaatccagcaaatatgttgacaaaaaatgtgacgattgagaaactgaagttatgctcaactttagttggcctgcaagaataacaaaactagagagctttgctacataatgtggagtgtgaagacagtttaaaaccagtctttaagtgggagattgttaaagaaataacattatcctttcttagttaaaataaaa

SEQ ID NO: 103695 - DNA, 603 bp, Cannabis sativa
taacggtaatagtcctcaatcaaggtcaaactttttttttttatttatatccgttagtcctaattttaactgctcagttaatttattcaaaagtgccacgtgttgaagccttattgatccaaataataattttaattaaaaataaaataaaaacttaaaaaaatattttaaaattataaatttattttatttatttattattatttttgttttcatagtcatcttcttcctttcttctttttaatccccggaaatcaccctaaccctttctcttctctttccccttcgtcttcttccttctacgcacctccacaaccaccatggccaaaatcgagtgaatctcataccaaaaaaactcataactttccagccgtcacccacctattttggggtttctttctaccaaaaataaacctgcaacaccagcttgtaccagaccaaaatatcataatccccatgtctcaaaacccagttttccatccagcccgatctcgtgagcccaccctctctctctcgtctttatcttttctcgtcgaacagccacgcccaaacccgacgtcggccattctcggtccttcaagcttgaaatgaacccagaaaaat

SEQ ID NO: 103696 - DNA, 516 bp, Cannabis sativa
tacattgcatctgtctgttcacaatcaggccatccatcaaacattaaatcacaataaaaaaaattaattatgtactgccactatttactagaatattcaaaacagtatttacaaacaatacagtcacataatctttcagtaccaacggaatattttataaaagacagcatttcccttaagcaatggtgaacggtaatagaatgcatccttgtcattaaatatacagcaaaatattctctgaactttctaccaactctggaaatcacatttaaaagcagaaccacttatctgcatcaattgatcttctacaagacaataaaaagcacattgaaaataaatatagaataaggaatatccacaaaaatatcttcactaaggagttatgtggtcttatcattttttacattttcaaaccttcttgacaccttaaagctacgagttcacaataaatctttaatttgtattttgcggatgcttgtactgataacactgaccagacagctgccttcttggcaa

SEQ ID NO: 103697 - DNA, 964 bp, Cannabis sativa
tttggatttgttcaccgtctcttggtctctccttccctccaaggtggcaagctcctatacaatcacgctctatcccaagctatataacatttttaccataagcaagcggcaaaggagtggtatatgtattgtaaatattaatatattttatacttttgtatgtatttttctgtcttttttgggcatatgttgttgatctatttatttggtccaattatttttttcaatttaggtggtagaaaaatatgtgcaataatatgttttaaattataagtatttttttcataaagtatctttctatctatatatctatatatttatataaatgatctatgtctatatatctatataaaggagaagtatgagacggtgacatggcgctataaaattgtttgaaagtcatttttttttctccttaattctctcaattttcaatcttttatttggcttataatgtatattaattggtttcatcaattaaaaatactcatacaatttacaatatttatatctataaccgtatcccaaataattttttaaaaaaaaaaaataaaaaacaaaaaactacaaagatgttaaacctaattttcataaaaccttaattacgattgatgattttattatagtttatatatatatatttataaagatataaactaaactacttctcattcccattctctgcttataaaaagatctatctaattatattttctattttttgcttcaaccaaattatattttttaatgtggaggaagaaactttgacaagcatggtcttttgaaaaaggtacggtttttttaccaaagttgtatgtattcttttatatagtaatcatatagattttcttaaaaaaaaaagttatgcaaataattgtattttttgtgatacgattattgatagatatgattgaaaaaaaaaataataatcaatccaaattcaatagttaaaaaaaaaaaaaaa

SEQ ID NO: 103698 - DNA, 543 bp, Cannabis sativa
cccatactcttctccttctgccacgtggacacacactctcttctctttttcttttctatcctgtacttctattactataccaactattttctcagccctctgatttcatatcccacatgatctttttttgtttcttttttcttttctttaaaataaaaaatatatgagtttttttctactaaagcctttcaattattattacttgtttaagtttaacttttaatattaaaaacttttattaataaatttaaagtactatctatttttcataattaactgcttatatgtacattcttatcaatcgacatatttatataagtacacttaatactattattataaaattataagacaatttatagtatttttcttttatttttttaaatattttattttatttaatttttataattttgaaataataatattagatgtagtaatataaacgtacagagccgaccctgaaacaaagtgggccacagggaaaaaaaaatttgggcccttatgttagaaaaaatttggtatttttcaaaatcaataaaa

SEQ ID NO: 103699 - DNA, 534 bp, Cannabis sativa
  modified_base (364)..(369): a, c, t, g, unknown or other
ttttatgccataaataaaactcatttttatacaatcttatttactacttaataaaagatcagaatttattttgtgtttcttgttggcagtattcatgttatttcgtggagcagttaaagcagtctttttgtaggctctcccatgacacattttcctttgtcccttgcaggatcaaatgttccacaatatttcaggtttattttcttcatagtagtattttcttgaggagcagggtcatcaaaaatattttcatcggaagccacttcccctgatttaattatagtctccaatcttgctagagtttctgtaacgcccatatttaaatatttactaaactcgaaagatatcttaatatatttcatannnnnntacttatataggtcgggatcccgagtaccaaaatataattacaaagtactttattaatatgtacgtatataatttttttttttaaaactcgctggcaagaaacatcaaaatacagactccaaaatagtaaaagatcgaaatcctccaggttgcattgccgcgata

SEQ ID NO: 103700 - DNA, 501 bp, Cannabis sativa
  modified_base (322)..(330): a, c, t, g, unknown or other
aggcttaatttggttagatttaaaagttgtgtgtggcgttgaccacgtttgagtttatgaactcaaacttggttcaacaacagtgacttgtgaatttctatgatttttgaggttttagtacctggaaatgattcattatggcttgtataggtgttctggaagtctttatgcagtttggggtcgaattgaattgtttaggaggattttttagtttcctgcactgaaccagttgaccagttcagtggaacctataagaatcgaattttcggttgatccccaggcagaccccacaaaattggtctttcggttggggaaccggtcnnnnnnnnngggcattttagggaaccttagtttattcctatttttgcaatatttagagtattttcatgctatccatagatagaaaaacttttggtttcgattttaagtccccaaaaagtgatctagcgtgtcactcatcaatttacgaatattgtgatttgtgatttaggggcttgtaaa

SEQ ID NO: 103701 - DNA, 519 bp, Cannabis sativa
attctcacatgctgctataccacgtaagacattgtcgttgcacctgtgcaattctaaatcttgcaaagtcgagcattacccagttcagtagcaccaaccaatgccactttgtgaagatttgggcaaccgttggctaattcttgaagccctctatcaataacctcgggaggaagcaaatgggcttggaaagcttgagcatctgccgaaaaatgagaaccaatttgaacagaaaacattttgtggttcaacaaaatatcagaatttagggtcgaaatcaaagacccagaaagcaaatcaacatgggtcagaaagcaaaattgaaaaacacactcattaagttgaactaaaaagatttttctaagattaagttgaaaagaacaatcattgttggcttggatgtaagtgaaaacaaagatttacatatgaaaagcatttagtcattattccttaaatttcaaagcatatggaatctatctttctctataattgtaattagctcttcaaattgaaccataaaga

SEQ ID NO: 103702 - DNA, 672 bp, Cannabis sativa
tgttagggctgggaatttctttgcaaattcaagtagttttcttcaatcttagagtaattcaagtggaggtaacctttgttcaagcgtttcctttgttttcttgtaagttaagaaaagatgataggttgcatgcttaatttttagtggttgttgctgctgtaattatgtgttattttctgtagtttatatatgattaattgagtgaaatagattaggttttgatgcatgattagttgattttaagctaggaattttaactcaaaactatggtttttatggtaaaatgacgattttgttgctgtgcttgttgtggttgttttctattgtttgcagaagcttagttatgcatatttgagtagatttaagcaggttgtgatgcatgttaattaaatttaaccaagcttcagttttgaactcaaagcttggagctcacatggtggtttgtgtttctgtgcttactgggttgttttcatgctttgagaatgttctttggggtatttacaacaggtctggaaggtttgataaggtttgggtttgaattgcatgagatatgaattttttaagtttactgcactgaaccgaaattccggttcagtatagcctgtaggaaccggaattctggttggtgttctgggttcctccgagaaccggaattccggttgtagaactggt

SEQ ID NO: 103703 - DNA, 655 bp, Cannabis sativa
aggtcggtcacttctttggacaaggagatcatggcagcctaaagttggtcagaagcctctaaatccttggtcagcgcggtcactttcttctcggcagcaagaagctttttgttgacttcacccagttccattcaaacggctccgagttgaaccctagcttcatcggcgtccttcttggccaagtctacttccaccctcatggtgttggacatgacaacgttcttggaggtagctgacttagctcgggaataagtgcaagccatctttagacgagtctgcacaggaaaaaaacattagaatctaaccttttaaaattaaatataaaattgagggggagtttacaaaatcatgtaaggtaaaattaaaaggtaatatttttacccttacacacattaagggggagctaatctaatatatattgcttcaatttttcctttcctttttcaaaataaccaaatatttgatatcatctaaaagagagaaattattaactcaaatttttaggtctccttgttttgatgattacaaatatttgattattatttattactaatagtttttttgattttgtggcacaataaaaatgtaaaataaattttctaaggcaaaataaactccaagggaaaaataataattttatcaaaattctcaaaag

SEQ ID NO: 103704 - DNA, 729 bp, Cannabis sativa
agtggccagattagaatctatccgtattctgctcaccgtggcttgttttctaaaaatcaaactacatcatatggatgttaagagtgcgtttctgaatggggttctacaggaagaagtgtatgtaaagcaaccacaagggtttgttgaccctcaatttcctgatcatgtctaccaactccagaaggccttatatggattgaagcaggctccgagagcatggtatgacaggctaacatcctttctcatttcacacaacttcactcgaggtaatgctgataatactctattcattaagcacttacaccctggtatctttgtggcacaaatctatgtagatgacattatttttggatctactagtgatgaggaagtgtcaaaatttgtcagtctcatgactagtgagttcgaaatgagtctaatagggaatcttagtttctttctagggttacaaatcaaacaaactgatcagggcattttcatatctcaatcaaaatacgtcaagaaaatgcttgacaagtatgggttagataaaactaagcatgctcctacccctttgagtctgtcaactaagctgagtaaagatgaggctggagacaatgttgatcccacattatatcgtggtatgattgggagcttactatatctcactgccagtcgtcctgatatatctttcagtgtaggtctgtgtgctaaatatcaggcccttcctaaacagtctcatctcactgc

SEQ ID NO: 103705 - DNA, 521 bp, Cannabis sativa
  modified_base (87)..(93): a, c, t, g, unknown or other
atatatatattcctcttaaattaatgggtaaccacacacatatattatttgttattgattattttcgatctctctctctctctctcnnnnnnnctctctctctctctctccctgttcatcttcttcttcatttttttggcccaatttatttcttatccagttcttcttctcattttttttctttaatttttgaagttttcagtcacgttttttagaaagataagagtggtttttttatctgattttccagaactaaacttgtaaatatagcctctattgcatcaggtgttgaggctgtgcagaagatggttagtttttttcaattattttttttattcttttgttttttgatttgttttagtgttgttttacggttatttttcataatttatttttttgacgtcaattttaccgttcttgctctatcttgctagaattaatgattattttctaggtgttctcgtggttctgtgatggttctatccgtaggtgtggaagatggaggctataaaatatatttc

SEQ ID NO: 103706 - DNA, 623 bp, Cannabis sativa
cataacagagtgcaatgaagcagaagctagcgcaaacgtaccagtgccacaaactccagcatggaaagtatttgtggacggagcgtccaatgaaaacagatccggagctggggttgcaatgatatctccaaacgaactccgactccaggcggccctacgttttgaattcccagcttctgataatgaagttgagtacgaaacgttgattgcggggctaaagttagcaaaagtcgttggagccacgagagtagaagtcttcaacgactcacaactggtggtaaaccaaaagtcgggagaatatcaaacgtgcagagaaagaatggctgcgtatgtagcaattttctaggagctactccatgagttcacggattgtaaagtagaaagagtccccagagaaaagaatgcccacgcggactgtttggctaagttagcatcagacagcgagatcgagaaactgggggtggtgcccgttgaacgcctcacggaaccaagcattaaagccaaaaatattgtggcagcagtcgagcgagagcccaacttgatgatccccatcatcgaatacataaccaaaggtgagttgcctcaagaaagggcactgaccagaaggatacagtaccaagcgg

SEQ ID NO: 103707 - DNA, 581 bp, Cannabis sativa
tgaactgtttttttctccattcttgacacttttacaaaaatgagttttagtaacagtgttattaatgtgggtgactgaaaagatatatagtatttagtaacacttcagggtgagtcactaaactcttataaagtcgctcatcgcgtgtcactataggtttttcgagtcaaactttatcagattataaagtattagatactcttacagagtgttactgtatttttttaaaaaataaatatgattttttattcaaattatatattataaaatttattataataatttaattaataatattttgataaaaatatacttaatgatataatttaattaattaattattaattatgaattaatgcaaaccattacatcaaaataccacaaaatatatacaaattatgaaacaatatcactaaaacttaatcaaaatttataactcttttgaacagtaaaacaaatttcataacagtaaaataaatgggcataaacataaatttaaaacaaaactaaaattcttaaatctttaaacaataaaatacaaaaaattttatatgcctaatatcaaatcccataaaaaccca

SEQ ID NO: 103708 - DNA, 682 bp, Cannabis sativa
  modified_base (606)..(626): a, c, t, g, unknown or other
tgaatctttgattttgttctttttatattcaagcttaaatcaagataaaatcaatctaaatatgaaaaagataggttagacaagaacttggagtttacaaatatgaacaatgttatccaatgcatgatttagaacgtgctactattctattttctctaaatatatggcgacattatcttgatggagaaatatatgagatctacatagaccacaagagcctcaagtattttttctatcagaaggatttgaatatgaggtagaggctggcattagtcaacgattatgattgtgagatttgtatcatcccgagaaagccaatatggtggcggacgctttgagcataaaaggttccaagcaggttttagcctcaaaaattgttaaggctgaaattgaatttgtggttcggaagttacataacctgacacttcagtcaaatttgttggataggatcaaaaagacacaattggaagatcctaagttagtcaaaatttgagatgaggtattagcgggtcaacctaaggatttctcccattgtattcacgggaaagatgagaaaaacgtaaggtatcctcatgtcgatccaactcgccaataaaaggatcaacnnnnnnnnnnnnnnnnnnnnnagctcggtaaatatcctttataaggagactttaaagaaaatggggcttgaaaaagc

SEQ ID NO: 103709 - DNA, 646 bp, Cannabis sativa
atacatattattcacataataatatatattactacattttaatctacacttattatattataaaataatataacaaaagaaagaatcaaacttatatgtttgctctttcctacaaggacatacttttctatgtagaattatcactattttctctcaatgtttacctcgttaaaaaaaatgcttcacaattgtattgtcttgaaataggtccttgcgaaaaacaaaaactacaaatcaaacaaagcaacaccaaattaaggcaaacgcaaaactaatcaaaataaacgcaaaactaatcaaaataattataaataatgattatatgtatggtgaaataaaattataaatcaaataactcaaaagtctcatacgtacccatcaaaataaagcttagtattgtagccatgatgcctatttgctcacaattaccaaaaagtcttaatggaaacaaataaatgataattatatgtaattctcacggactgtgatttaagatttagattttttttcttaaaaaagaattattaactaataactattaaaaatttaatacgtactagcttattttattgaaacaaaatatctgttacagaaaaaataaataattttaaaataaataaatatagagaaaaaaacaggaatattc

SEQ ID NO: 103710 - DNA, 564 bp, Cannabis sativa
gacaatcatttttaattaaaatgtcattggagaattaatttgggtctttaattaaaaattatggcattttatttttatataagatttgggatttttaatttggggtatttaattataccaaattttatttattaaaatgaaataaataaaataaattttgtaaggaaaattgaacggtatacatagaaaatgataaaaaaaaccctaagttagaacctaatcccttttctctttcactcttccgatcccctctctctgcgttctctttgtgcggcgcgatggtcgaagagctggaacccgaagctctggaacaggccgagctgaactccgacgaacaggcccattcaaacgctgagcatgacacaccttatggcaatgcatccgaagaaacggaggagaagcgacctcggcttgatgacaaacctgatgtttcaggtatcgtgacactgttatccccaatgttctaggtttttagtatttgatttgagcaacaccaaagtcggccacagccgacgctagtggttcaaatgaaccagaaaaccccaacccctctccctcatcctt

SEQ ID NO: 103711 - DNA, 671 bp, Cannabis sativa
tatccgattcattttaatatttttctcttatccaattcaatctaattaataattagatttaaaaaattgccatctaatctaatttaattaggtctcaacatccaatttaaaattcaattactaattcgattagattagttttttaattgaatatctaatcatacacttaaattttaatattaacttaaaaatataaaaaaaataggtaaaaattaaatatcacactttatataagtttaatattttataaaaatactaccgatataagtgtaagacagctaaaagtttttttttttgaatagctaaaacaacaatattactaagtaataaaatagaacaaaatatcataaaaataaatatacaaaataattaagtgttacatattcaacattaaaaaatttactaaaattgtaattaatacatatattttattttttattatataaataaatatacataattttttaatatatatataaatgtaaatagattgaatcagtttttaattaaattttaagattgacattcaataaccaatccaatccaattaaaatcaaacttttaacatccaatccaattcaattgtaattggatatccaattttttgtaattagattgaatttaattggttcagttaaattgaattggatattgcccacctgcaaatacat

SEQ ID NO: 103712 - DNA, 775 bp, Cannabis sativa
atttacttctactggcagcattgcccccgatccaaatgctagtgagaatggagaatgtcctgtctctgtcttcttagttgttctatgagcccaaagtacttgaggtagttcatcgatccatctacctttggtagcgtctagtttatttttgatagtatccttcaaggtcttattaacagcttttacttgcccattcacctgaggcctggatactgacgagaagcttttaataatcttgttcctctcgtagaactcagtgaataattcaccatcgaactaaaatccgttatctgataatgtcttaatgggtactccaaacctacaaattatgtttttgactacaaagtcaagaacttttttgcaggttatggacaccaaaggttcagcctccgtctattttgtaaagaaatcgacaaccaccactgcatactttgctcctccttgccctgtgggtagtgcccctattaaatcaattccccatattgcaaatgggtaaggtgaggtcaccattctcagtttcgttggtggtacgcgaggtatatgcaaaaatctctgatatttatcacacttcttgacaaattcatgaccgtgtccttgtttatggttggccagtaatatccctgtctaataatcttttttgacaagctttgccaacctgcatggtctccacaaaagccttcatggatttctttgatgattttgtttgcttctgcgggaagaacacactgtacgagaggcattgaatagccagttctatacaatttgccttctacta

SEQ ID NO: 103713 - DNA, 531 bp, Cannabis sativa
gcggcgacaaactgtctccggaagctgatttgtagcttgttccagcagtccacggatcctggttccagtttcttgaaccactcttcctcagacctgcttaatgttagccggaagcatagacacttgtcgtcattgctgactctcatgaccgtcattacccggttgaaccgtgacaggtgatcgctagggtccgagttcccggcataggttgccatttcgggcatcttaaaatttttggggagctccgcctccaggatgtgcctagcacatggctccctatcttcacagtcagagttatcacctttttgtctctaggagacccgagcaatgtcttttcggagtatggcaagctcagccatgattccttcatttagcgttcccatggagaccgcgggcgcgtgtttcttctggtctacgtgatcccggaggtcaccgtgttcctctccctccgggttcgtggtgcacagaaatgctctttcggtcctctcgatcctaacggccaagactccctttttggagtttgcccctctg

SEQ ID NO: 103714 - DNA, 571 bp, Cannabis sativa
tcttgcttatcctataccaactgtaccacttggctttggtcatggtggtcccccttgaccagatggatatgcaaggaatcctatggctcgtggtgattttggttacaatcccgatggtccccctgctcaacgtggtggtccttttaatttcggtcgtggttagaaccagtaatggtctcagaaacctcagtgccaactatgtcataaaattggtcacactgtaaaagagtgcttctatcattttgataagttattcataggtcctaaatcattcactaattttcctgccaccactcacttagttgagatcgaagtcatgtgtgctactccataaacttttactgatgagtgctagtatcctgattctggtgtgacttaccacttgacaccagattccgtgaaccttggagcaagcacatcttatgcaggtaatgaacaagtgtatgttggtaaaggtattgacttcaataatgagaacattggtaattctcttatccattctcctttttcttctcaataactcactcttaataatctattgcatgttccttccataactaagaacctattg

SEQ ID NO: 103715 - DNA, 502 bp, Cannabis sativa
gtttctctggccatgtatgtacccttttgttcttcgagcttgccttcctttgatggtagtatgcttaatgatcttgttaactgcttctgtttgcccattactttgaggatatgtgatcgctgaaaaagcttttcgaatccccacttcatcgcatagttggtgcatctccttacaatcgaatggtttaccattgtcagaaattaatttataagggatgccaaacctacaaatgatggcgctgtagacaaactcgcaagatttggtggctattgaagtcgcaagaggtttggcttcagcccatttcgtgaagtaatcgacaatgactgcgtcatattttacccctccttttccttttggcgatttgccaattaaatctatgcccctgaccgcaaatggccagggactagtgatataatttaattggctcagctgcctgtttacataagtagctatttgctgacttttgtcgaatcttttatagcgaagctagctgcatctgctc

SEQ ID NO: 103716 - DNA, 1109 bp, Cannabis sativa
taagcttcaattccattaccatcacttgtgtcaaaaaaagcaataattttatcaaaactccaagcacctgtgctagaccaatcaggcttaccccaaccaaaatcaatttcataaaaatggaatcgactcaaactagtaacctgaaattcaatcacctcacctcctctgttctctacactttttgagttttgtttgatcatattggattcatcatctatccccatttggagtttaccaatatactctttgttcactctcttaacaccttctcttatcttcttcacaatcccactagtaatagaagcttccccattaatactcgaggccggaacatgtgtgcttgtgtacactaaaaagtgtccaaatgagttttcagccacaggtggattcatccttggatgaagattcacagtatgcaaaatggtataaaacctttctgttttctgctttgctgcttcggcggctgacaacgcagcctcaaacctacttattaagaaagtagataaagtctcaacacgcgaaggtcgaatattaatgttgttttctttgtcccaatacattgttcttaaggcctcaactgagaaaccattgaaaacaaaaatctttgttatgatacctttcttcatgatatcagtctctcttttcttcaatgatggggggttagggggaaatagagctgcagagacaaactcaggacgaagcgattttggtaacatggtggttgttccggctcgagccatcatcgcccaagttttgatgaatctcatccatgacaaagcgtcagcaattttatcagaaaagctaataccaacaacgattcctccacactcaaacatgttaagttgaaccccaaatagaatttgatgaacatcgtcaccttcatcatggcgagaaattaaagggcaaaacatgttgagttcttgagctattggattggacataacttgagaaagttgcccttttgattgagcttccacgaagagaacaccctcgtcgttgcaattgatgaattgtccatgcttttcgagtcgtccagctaaagggtagtaatgggttaagatggttgataaggacctttttagaatgatggccggaataatggtagtagt

SEQ ID NO: 103717 - DNA, 1086 bp, Cannabis sativa
gagatatatagaacatgggctacttcacttattaccaattagttttgagatagaaccccataattctcatcatggtatcagtgccatatacttagcgggcttttgatccacacctatccagatgtttagccagccgcacgagattcagatggtacaaagacgcttgacttgtggtaaggtaattcaagattggtgagcaaaaatagccaccatcttgagggagaatattggagaacattatcccacatggattaaatgtaaaagtattgagtcatatataagaacatgagctactccacttatcaccaattaattttaagatggaacctcatgattctcatcagatggcagtaaacaatgaacttggattacttcctttactcaaacaatgacaaaatgtatagtctttcacagagatctaagtactaccttaaatagagtgggttggtactcaagacattatagggcagatttcttaagagtttgaattctatagaggagaattttttttttttttattcacttaggatttttagtatctcaccacaaacttggcaatcaaagctttgtcatatgctatatataaaaaaaaaattaatgaactctaaataaaagcccaggccaaaatcaccttatggcccaaggactttaagttttgccattttatttattttaatgaaataattttatctttttccaaatataccatttatctaatctatttaaaatattaattttttatttatttaataattataaataaaagagataattacggaaaaagtctccaaaaacttaaggttgacgcaaattagtcgccaactttaaaaattggcaataatagaccctaaggccacgctttctctatgtctgttggtccctctttctaactgatccattaaacccaaataaaatatcacgtgtcaattttttattggtccaaatgtaataattttaattaaataaaataaaataaaataaaactaaaaaaatatttaaaaatcataattttttttttcatttagttatatatatatttttatattaaaaactccattttaaaattataagattttattatttcta

SEQ ID NO: 103718 - DNA, 762 bp, Cannabis sativa
atgggttgtgtagctcagaatcatcatggtgctatagtagaagcattcaagaagggaaagattggatttgttcaacccgaaattgcctagataataggcattaaagaagtattgagttggattgcaactcattcgtgggatagagtcatgctggaaacagatagcttggtgtgtgtctaagcgattcagagcggtattttatgccttcacaatttgtgttttgtaaaacgatctgcatgcaaataagttggctcattgcttgacaagagactcttgtttctctacaagtcgcgtgcttcagttggaggactattcctctgaagtgcgttctattgttttaaacgaatttattaattaataaatcttatgatttttattaaaaaaaatgaattttggattgtgtctttgcgcttataatatcaatacaatatattgaattgtaccattattttaccattatcattcttatttataatctatgtacatttatacatattaaaaattattaatgaattatgatttttatacaatttttaatttgtaactacacatgattatatttttttgagcaataatttcttttttgaaaaatggtccttacaatttaattttattttttttaaaaaaactatattttattttatataataaaagaagagacattacaaaaaaactgttacttttagtgacaattttttagttgcaacatattttttttttgtgactaaattgttagagaatttatatgtataatataaaata

SEQ ID NO: 103719 - DNA, 542 bp, Cannabis sativa
atttgggtgcaattagagttagaactgaagtattggggccaaaagtcactctttaagatagttgggcaattaggcaaacctctcatggaagattctattactagagaaagggaaagattgaattatcctagggtgttagtggaggttatcatggaccaaaaactacctgatatgctagaattcgagaatgaatatgggatgaatacatcggtgggggtaaagtatgaatggaagcctataagttgctctcattgttcgggtattggtcactcagctgctgaatgtaagagatctgcaccggccaaacaacaatggattgttaaaaaggataataggaagaccacagacattgatgaagatgggtttattagagtatcaaaagggaagaaagttgataagcctgaacagactaaggaggtcccagcagtaacaacaacaaacctttttcaagctctcaatatggaaaaacagttgggaaataagggggaatttggaaaaagcctacctcaagccgatagggggattatggatgacacaagagg

SEQ ID NO: 103720 - DNA, 771 bp, Cannabis sativa
caacacaaaattaggaaactaattgatgtgattttatttcccatctgtcaacactccccctcaagctggactatagatattgatgagtccaagcttgttaactaggaaatcaaagactcgttcagataacccttttgtgagaatatcagctagttgttgatctgtatggacatatctaatgctgataatctcttgatcaattttttctttaatgaagtgacgatccacctctacatgcttagttcggtcatgatgtacagggttatgagcaatgctgatggtggattgattatcacaataaagttgaataggggcctcatactcaatcttcaactcctctagtaggcgtttgatccatattgcttcacacactccatgggccatggctctatactctgcttcagcgctacttcttgcaactaccgtttgctttttacttcgccatgttactacattaccccatacaagagtacaatacccagatgtagactttctatcatcaattgacccagcccagtctgcatctgtgaagacttcaaccttcctctcaattgtcttcttgaagaaaagaccgtttcctagtgtttgcttgaggtacctcagaattctatatacatcattgagatgtccttgacatggattatgcatatattgaccgactagacttatcgcagaggcaatgttgggtcttgtatgggagaggtagataagtttccctactagttgttggtacctctctttgtcaactgggcttcctccaaacattttcct

SEQ ID NO: 103721 - DNA, 600 bp, Cannabis sativa
  modified_base (487)..(492): a, c, t, g, unknown or other
atttagtgattcaatgttaagttaaaaaattttaaatttaattttttttacatgaaattaaaaatattttaatttttttaatttttattatattaataacaaactatatatacataaatgtatataagttttctaatggaagttaaatttattatttttctctacaattctagcttcaataataacaaaacgggtcacagtgggtcgacacgaacacgacacgattttttacaggtcgggttagggttgagataattagacacgagtcaaaaaacaggtcgacacgcttgacacgaaataaaaagcgagtcacataaaatatgacacgaacacgacacgatgacacgttttaccacccctaatttatacttattttacatgtattaatttaacttagagttttttaacgaatttattatatgtcaaataggtataaaagatgtgtactgacactacaaaaatattttacttttagtcacaacaaaannnnnnactaaaagtaaaaaaattgtaactaattataaattatcattcctaaatattgtggctaaaaggttcatgcctaaaggtattagtcacaaaaattactatttgttgtga

SEQ ID NO: 103722 - DNA, 1151 bp, Cannabis sativa
ttttctaagtggttatgtctgcttattgttttacttttgtttttgtgttgttttagtagttttttgttctgatttttttgggcttgcaaatataactgctattgcatttgatattgagactatgcagaacatttgtaattttttttaatcattttttcctttcttttgtttgatttgttttagtgttgttttacagttgttttgccatgattatttatttgacgtcgattttaatgttttttttttctcaatttcaccggaattaatagttgtttttcgattgttcaagtgttcatgtagtggttctgtctgtaggtatggaagatggatgcctcatttttttttttggtgtttacagtataaaagaaaaaaatggccaagacagtataaaagttatttctgccgtgtggcagtattattataaagagtgggccaaaagtcagtatttttgtaagtttcccattcatattactattttatacaatatgagcctgtttagtacacaagactatatgccaatttgtccacttcagtgtttgggcatgttggatgtctagataactaatctaattaatcccatctgggagggtgagataaataatcccatacattgagattttttttttaaaattttgattttgttaatacattttaaatttaataagaattaaaatgaaaatattattataaatttatttatagatttttttatcaaaaatttattcattaaaattagtaaaaatataattttaaattatcatacgtaagttttcaaaatttaaaataatattaattaaagaataattaatttaattggttattagaaaacaatatgataattttatatattcttcttaaagtattagaaaatttatatcagtattttaaaaaattaatatttatattaaattagtgattaaattattatttagcataaataattttatattgttcaaatatttttattttattattttaattatttattaaataaaaaatataataaattattttattatatatttatgatatatatttaattatataatatattattttattttacaatttaattatttttattattcattttattttttttttgttaggaattatttatgaggggacgattcggtcacgcccacatacca

SEQ ID NO: 103723 - DNA, 614 bp, Cannabis sativa
  modified_base (332)..(334): a, c, t, g, unknown or other
attggattggatcggttttttaattggatatccaattacacacctaaatttcaatattagcttaaaaatataaagaaaaatacgtaacaactaaggattcccttttatttaaatttaatacttcataaacatactattcttacaagtgtattgtagctaaaaattctaaataattaaaacaacaacatttctaagtaataatatagaacataacatcatgaaaataaatacactaaacaatcaagtgttacaaattcaacatacaaaacaaatctaataaaaatataataaaaatttattacatttttcaatattttttattatataaatannnttttaatatatataaatgtaattgaattggatcgatttttaattggatttggagattgacatccaataaccgatccaatccaatccaattgtaattggatatccaactttttgtaattgcattggattggatcgatttggttcaattggattggattggatgatgcccactcctaatagaaacagtagctctaagaatgcacatacataggggtgtgcagaaattcatccaatccaattacaaccgaccgatccaatcccaaccgatccaatagaatcag

SEQ ID NO: 103724 - DNA, 577 bp, Cannabis sativa
  modified_base (377)..(388): a, c, t, g, unknown or other
acaaaattaagtgaccaattatgttatgggtatcaaaaggatattaaattgtcatggaaataatgtgtagataccataagttaaattataatttgttaaggggtcaaattataaatacccaaaactcattctaagatgagtctataaataggtagtggtccccaaagaacactagggtttctgtattctctccttccccattagagaaaatactttagaaaatagtgtattcttagaagatcaaaccattctctacaatctccaacaatgactttaggttagtgcttccgctcttcttttattatcatcttcttctttaatttaacaaaagttttatagatttatgatttagtgttttctatattaaagtacttttnnnnnnnnnnnnagatctgtgatttatatattttttgagtattttataaattctaacaagtggtaccagagccatcttttgctaaatttattgaagatctgatgattttgtttacgaaatttagggattttaataattaggattttgatttttgttaaagtaattctgcgacagcaatttttttggggggggggggttttt

SEQ ID NO: 103725 - DNA, 2465 bp, Cannabis sativa
  modified_base (409)..(410): a, c, t, g, unknown or other
  modified_base (2410)..(2417): a, c, t, g, unknown or other
gatagaacctagacacgcgagtctgtattggtttatcgaggttgttgggtcatggggactagctcgctttatagagaatcgtcctctatgtttctgcaggaggattgcgagaatactcgcatatatcatggtatatgcaagttaagtccgttccttgatcccacttaatgcgagcctcgtaaatgcgattagactttggtcatattcgcatcatctcgctgagtttagcttagacgaggtttaaactcgaggagtctctcattgacaccttagctttccttgcgaaaattaggtacacgtgtcctttaaacaggagtccggtctcgagtttctaggtgagaaaaatctcactataacacatgcccctagtttcgtgacttgacaaatgcggtcatgagggaaactatanncgagagacaggtgaaaggttgtcacgaggaggtgacctttggttgtcccattgagggtttcgaaaaatgacggctataattatttcattttatcttatttatggtgccacgtcacgaaactcttcggttttcgtgtaggcgtgcccatggctgaccgttggataggatgaccttagacattcctgctgccacgtgtcacaatcccaatttatgagggatattagtatttaagctctctaatacgaaatgattttctcattttccctctcattcttagcttcctctttccctttttctctgaaattttaaaagatcctcatccatcctccacccaggtttactttttcttcctgaatctctaagatttcagaagagatcgaaaccaattacagggagcaatcagaaaagctaaaggttagtttctaatccacttgtgtatttggttttttcgaaaactatctttctgggtttttgacattttaagaagtttgaatatgtatgtccgtagggaatacacatagggctgtatctttctgtttagagctgggtaattttagaagaaaaatagacctgaaatttgtataaccgtgaactttaggaagagcactttgaatattcgcaccttccttacttgtttatttctggaatactcgcgggtattcggatgaacacttcgaatactcgcatatctgtctcctttaggtttttctagatactttatcatttttacccgttgtttagaacttagggttttattttgttgtgggaatactggttaagtctttcaaatggtgggtgtgtcaccgtattctaatgttcatgcatgcgatcgcatgttccttgaagtactgtgatacacccagccatttgcgacatacgccagtgctctcagttctcttataaccgtattctttgactagtagatttactcgaaacggtgggtgtttcccagtaacttcagggtcatgctcgaaaatgcatgccccttgggtcactgggaacgcccagccgttttttgaggtatatcgctagttgggtatgcgtgacatactcgcaggttgtgattggttagattcctcgaaacggtgggtgtttcccagtaacttcagggtcatgctcgaaaacgcatgccccttgggtcactggcaaactcccaatggttttttaagatattcttctagtcgcacacctgcgattttatgccttggtgggctgattggtttttcgcgagaattcgaatcagccttccaaggagatcttaaattttttatgcgggtgaggtcacttatattgttttcgcacattcaccacactgaaaagatcttctatcttttagatgagaaattttttggacagccagatgcttggctctggaggcaatgctttcgatggcgaccaagaccaagaggatagctttatcccaacctcgatttcagaagaggagaccccaactgcgagagatgcggagctggatccgttgtcctctgcagatatcgagaggatggttcaagagctcgctgaaccaggaactatcgagattcgtgatagcgaatctacggtatcagcccgcaaacatcttgttcactctaggcttccccctgacaccgaagtcgaagagatgggtgaggattgggaggttcctgatcatgaatcagatgaggatggagatgccgaagggagcgagactgattcagttggtaacacgcaactgaatgagccgttctcttgtgaggacttagtttcacgagtccctaaatccgacttgtccacctttttgaggttaaacttattgcgactcggcacaatgcatcctcgcaccactcaaagaccgcaccttcccttcaccaatcctacgatcataccctcagaggatgtcgtagtttccattcccatctttcgatgtggagtatcaatccctttccatccattcatctccgctattctcaagcgctatgatgtgtccctttttcaactgaccccaaatagctatcgcatagctnnnnnnnnttatgcgatgtatatggagtacgcgcatagggagccttcgatggagga

SEQ ID NO: 103726 - DNA, 550 bp, Cannabis sativa
atttcattatttgtagcttttcaaaagtaataaatctcatccgtaaaaaaaaattcaatttgtgtgtataaactaacttctggaattataatacaagttatattccataaaaaattctctaataattaatttatgtactttatatagaattgtactttatcatggaattttgtttttatctcatatcttatttattgaattttcttgaataacaaaaaacaacagcaataacaaatatatataggtttatcttttaaaaaaaaaattaacaaccgcacaaagtgcggttttgttacctagttttaggttatatgagggtgtttagtaatctttgtaaaagttgtataatgggtgattaatagtatcaatctagcccacttagtcatttttttaataaaatatattattttattttctatcttggtaaaaatttaaaattttattttaacaaataaaaatattttattattttttaaaaaaatttaagtatttttaatgttgccaaattagttaaaacgtaaacattaaaaaataaaatcctttaaaaaaa

SEQ ID NO: 103727 - DNA, 904 bp, Cannabis sativa
tcccagaccacctagagatttaggaaggcagagcttatcccaggcctttaggtgaagaccatgattacctttctcaaaaccccaccaaaagtcacggaccaacccatcgatccggttaaccatacgggaagagagctttgtggtttgcatggcatacataggcaaagacaatcccacagattttataagagtagctcgccctgcctttgacaaagttttcgccttccagccctgaagcttggccgtaaggttgtcaaggataaaattgaagtcagcatccttttgcctagacctgaaaagaggcagacccaaatattttatgcatccttcaggataatcaatccccagagcttgcttgatatgatgacgtatgtccatcggggtgttattactaaagaaaattgtcatcttgagcttgttaacctgttggccagaccaagaacagaatttttccaagcagccccaataaccctctgcctcagataaattagctctgcccaccaaaattaaatcatccgcgaagaagatatgggataaaaccggacctcccctgctgaatttaattcctttgatagccccctggtcgagggtgttggaaatcagtcttgaaagaacttcagcagcccagatgaacaagtaaggggatagggggtctccttggcgcagtccacaggagggttggattttcccgacctgacccccattcaaacaaacattaagagttgtggttgaaatacactgcgagatccaaaaacggaacctctgagggattcccgagcacgcactccagaacatacatgcatgatcaataaataaacttccagctcaacctgtcgtaggctttgacaaggtcaatttttatggcaaagaaaccttccctacctttcttcctattgaaggagtg

SEQ ID NO: 103728 - DNA, 1921 bp, Cannabis sativa
ctattacctagttataaatagtaacaaggtaaataagtaaaaaaaaatataaatttaaagttagatgtggagttttgttaattagagctaattaataatatttaaaattaaatataaataaaaaattattaatcatatttaaattttaaaaaattaatttgaaccatgtgattcaatcaatcactataaattagtataccatcaatagttaaaatcttacacagcctattgtattaccttctaaatatatttatatgaaaatttgtggcatatgatatataatatgaatatatgtatggaggtcgttaaatccaaagctattattttaaaattaaataataaaaagtaaattaggtttaacttgaagccacttgtaatcataatatatgtgtattcacgttgaacactattccaaaacaagtgatgtttgtgatgagtctctctcgaaggcccacgacgcgcctccagtttctctgcttagtcaaaattgtgctacgtataaatataaagaaacaaagaatgagccctcagcattatcgcgcgtgaatcacgtgatgacgtggtcatcaaaattgacaatttgacattgacattggaaagagtaaagaaacaagttatggggttatttagggttgagtatgaattaatgagaggtcattcgagtcagctcatcaaacaaactttgttttacagcaaaaaccaaaataattttaaaaatcccaagtctagtttctgtatttgttcagtgtttttcttctttacttttctggttttaagctgctaaactaacctcctaagcttttatatttttggtataatggagaactggttgggtcttcttagaattcacatcaagagaggagtgaatcttgctatcagagacgccctaagcagtgacccttatgtagttgtcaaaatgggaaagcaggtaatattatatggattttgtcactttttaaagattctaaatgtagatatatggtgattcggctttaagtggaataaatggcttcattctaatgatatcttgaaaaatatttcttaactgcagaagttgaagactcatgtggtgtctcataatgtaaatccagaatggaatgatcttctaactctcacagtttcgaattttaatactccagttaagctggtaataatcataatccaaagtcccaagttttattttcatgttttgttgatcaaattccatatgtgaattgtactaactctttccactccctatcataatttttcagtttgcatatgacaaggacaccttcagctttgatgacagcatgggtgatgcagagtttgagataagcccatatttgaaggccttgaagatgggcttaaagggcctcccaaatggaaccataatctcaaaagtccagcccaataggcataactgcctagcggaagagagtaaaatttacttctcaaatggcaaagttgtgcaggacatggttctgagactcagaaatgtggagtgtggtgaaattgaacttcagttgcagtggattgatgttccaaattcaaagggcttgtagggttaaagctagtgcatatgataggcaaaattagagtacataagcgcagtatcctccaatcccttgtgaatctgtcattctaaatgggggttgtgaaagaacatagctcaacaactgctttctgttcattttcccctgtaaaaagtatttaattaaattcattctttattgtattcaaaaaaaaaaaaaatcattctttctaaacgaaattgtaatgctcttttcgtttaatattttgtagctaatttatataaaacagtaatgctattgctaggacactattttacacggaaaatttgagaagggaagtttgaccttcacgctttagtgtgtaacactaattcaaaaaactttaacttgttgcgcacctatctaaa

SEQ ID NO: 103729 - DNA, 564 bp, Cannabis sativa
  modified_base (471)..(486): a, c, t, g, unknown or other
gttcgaccaaatgcctctaaaacaaacgaaaagcctggtaataatttcaatgttttgaaaaactcgtttgccaaaagaattcaattatatgatcccttatatatatatatatatatatatttatataattttgtgggatcaggaggtatatactttgaacaagagcaaagtaaagcaaagggagaatggctcggtgcctctcatcaaaatgagaactgtaaacaagatcagtacaactaatctttgagttaaaattttatgaatggagaaaagacctccatttatgttgagggaatttagctatcataaactagacactgatttaatttattacagccattggtggtagtgctccagttgaactctcgaggttggctgggttcataaaaaagatgaacaagaaaaaaatatatataataaaataaatttataattagaaaatatactttttagttttttattttattttannnnnnnnnnnnnnnnattattatttggaccaataaaaaattgacacgtggcactttatttgggtttaacggatccgttagaaaaaggaccaac

SEQ ID NO: 103730 - DNA, 697 bp, Cannabis sativa
gggcccttcatgacttcctccagggtggccacggtaatcgctcccttccgagaagatttggttccagatgcaggagtagacattttgcttctgtaaaaagaaagagtccagcagttagcccccaaaccaaaccctagtgttaaaagagagaatgggggtcccttaaccgctggaaagaggccccctccggatgtttgccaaagatggaaacccaaaggattttccttagcaaacatcgggtgcaaaaatatcaaaagcagcgaaagtagagggaaagtgaaaaacctagaatgtgggagcaaaaattgccccataccctaaataatcttttgacagaggggtcgattacaaagtagaaggaaggaaaataacgaaacacaaataaaggagagcctatacaccagataacagacttaagcaaagctatttcccaaaaatccaacacttaaccaaaaagttctaccctagcatgcaagtgaacaatagagacataaaataaccagaaaacttacatgaaggttgagaactggggattggtgttggtcgacgatataacgtggattgacagcgacagagaaataaccgtaggaaatatatggtttctaaaattttctctcgacagtgttcttgagaaaaaatggcaaagtggttaaagtaagcgaatgaaggagaaaagctggcttttataggccagaac

SEQ ID NO: 103731 - DNA, 555 bp, Cannabis sativa
tggtcacaaatttgactaatgctaagtaaattaactcttagcccttcaactaatatcacatttttcaatctgggtaacccttcaaaattgagagttcctgtaccaacaacttttccaactaagtcattgccaaaagttacttccccacactacataggccgaatgttagtcaaaaagtccttatcacctgtcatatgtctagagcaaccactatcaaaataccattattgagatgcagcacttttatcagaaaaaccagctagacactttttcttaattcatttttgtttcaaacctttatgtttcttttgagatttttctaaattaccaaaataatttgttttaaacatattttgcaaagtgaaatatttatgtctgatatgtccttttcggccacaaaaatgacaagtaggaacaaatctttttacctttgatcttactctttttgtaaaatcctggagattttacgtcagcagaaacaacttctgcaatgataggttttgaatctgttgcagcagacttcaaatttgcagcatcaggaagattcgttggaac

SEQ ID NO: 103732 - DNA, 680 bp, Cannabis sativa
attctttctaataaatttgattgaagtgtcagattgtgtaactttctaactacaaacttaattttagcattaaccatttctgaggcaagttgaggagctatcatcacaatggtgaaaacctgcccgagacctcttctacttaaagcatctaccacaacattggctttcctggggtgatagaaaatctcgcagtcataatctttgaccaattccagccaccgtctctgcctcatatttaaatctttttgggtgaagaagtacttgagactcttatgatctgtataagtctcgcattttttaccataaaggtagtgtcgccatatttttagagcaaatactactccaggaagctctaaatcatgcgttggatagcgttgttcataatccttcagttgacgaaagacataggctataactctatcagcttgcatcagaacacatcccagaccctttctggatgcatcacagtaaccaacaaacttttcgtggtctgatggcaaggctagcacgggtgctgttatcaatcattgtttcaactcctgcaaacttgcctcacacttgtctgaccatgtgagcagttgattcttcttagttaactcggttagtggcatagaaatcttagcgaatcctttgaaaaaaacgttgataataccctgctaaaccaagaaaattttgtactt

SEQ ID NO: 103733 - DNA, 1061 bp, Cannabis sativa
ttttacaagactaagaataagtatgttaaatctactaagaagaaagtgacaccgttagactttacaagactaaatacccaaaaaatatataactgtatttttaattacaaaaaacatacaatgtcaccataattacacatataatcagccgacattctggtaaaacaaatcaacacaccaccgttcacgaaacaacttcatccggccttgtgtgacatcagctaatccacgttgcatcatgagatgctccacatactcaatgcaataaatgccacaatcaccattaaatgcaacataaaatataaagttagtacaacttaaagcatattttaatactatagtacttttttatcgctatgtaccttattgttgcctttggaactaagtcgtgagtggcttgactcgcacgtatattcggaagcacgttgatctccttcgtagttaacgccatgatctggttattatgtggaaaatccccagttgcatagattagtgagagcaacagttcttcccaagtattcaagatgggtgtcatggcggtccaatgacaaatgctgggatcgcagtcatacacattaattttccacagctttatgtcaacttcaacagtcacctagtgcctatggtcgggaagatgcaaaatgaagtaaatgaactcattacccctccatctcgaaaagaattgggtctgtaattatggagaaaagctaaacaattaacaaaccataataaacttataatcatagttcaacacttaaaatcttacaaaaacaatacctaatgaacacctctgcagtactccaggatataatcctcccacacaaagtttctcctgggacccttgtgattcgtccatgcactgctgatcatgctggtaatgaatatagagagaatgatacccttatgaggaaatgtcagtagatagtcggcgcgtcgcctcctcagcatatggactgctgcatctatatgctacatatgaaggttagagaaagcagttagacaacaaaatatattaattgtagattagttgtaaagtaaagtaaaattataaattagtttac

SEQ ID NO: 103734 - DNA, 734 bp, Cannabis sativa
ccgaacatagactttaccaaaaaatttagagttctcatcaagcaaatcattagtcagattggcatagaattctttgacaatactttcgacatacccttcaaaattagtaagagtattttcccattgatggtattgaacaaacttaacaatggcacacaccctatgagcatggatatcataatttctttcactctcaaactttcgggtagcataaatattccaatcacgctgattatcacggtaataaaatctggaattgacagcttgagagggagagatattaccaagagatgaactctgcataggctgctttcctttggcagcagcaatggctttggctgcagaagaagcacgagggcgtgctagagtaaatttggtcaatggtggctcgagatcgagatcagtttcctcattgtcagaggagacaccaaaatcttctagaagaactttttcagagggaatagacaaggatttggtctcagggtcatcagaggggacctccattggttcttcttcttcagaacttgaaaaagccaaaggtggattcaatttcaacttattggtaggaggaattggtctgtcatggcttcgtttagtgcgaagctccttcttgagtgaagcttgctgggcacgggtgcaagaagatggtcctattagagtggttgcagcaacacccttacgtgatgcagcaggaggcgatgcagtagcttgaggaggagaccccttcgacgata

SEQ ID NO: 103735 - DNA, 858 bp, Cannabis sativa
cgacattaagtatttagccataaagagacgtgataagtggtcatcaatcacgcaatactaaattgtgtgatcgctcatccttgactaaaggcataccacaaaaaaattcaaggatcgtaaggtaaatatgagattttgttacccctatgcagatttttggttgtacaactaaaattattcaattcaactctaattttgaatattttttcatatttatgtgcaccttaatttcatccgagaaaattatcgtaattagtggaccagaataaacataacgtttaagatttgctcgcttaagtacattgccacattaagtacattgttatataatagctatatcgtaatacatggaagataatactcgacatataatgaggacctatcactatgatttatatgttattatgtaatgaggaacgttgagttttaagtggtaaattaattaaatactgaccaagtgggagaatgttagaatatttttatatggtaacaaatcaaatattttattttattttatttataaaaaatgattaattatttactaattaattaaaatattctaattatggtcggatttaactaccaaatatttcatttacccaatttaattttcagtattatttgtcaaaatattttgacatttaattgtgacagagattttgatggaaggtctcacctatataaatatatggtctcgatcccccagctcattactttttctatgaaaatacaataaatccatctaaagaatgtatagagagcttagagcttggaagccggaagcccgattatccattatccacatcaatgagtttccttgcagattaaaacttgtgtgggattaaagctcaaagaatc

SEQ ID NO: 103736 - DNA, 594 bp, Cannabis sativa
  modified_base (536)..(541): a, c, t, g, unknown or other
aatccaaaacaattctacatttacaatcctcttttgatcggccataagaagtggattgccctccccgaggccccacaagacaggcaaaggcgtggattagtacgcaatcaaagtgataataataattttagggttgtcttaatggacgtcaaaccttttgatccagttcatgatgtatttgacattacaatattttgttcggagacaaatgtatggagtgaaaaaaattctcaccttcctcgaacagtgaaaccctcatccctcgcactaactcatggatacattcagcagtttcaaggcgtcctcgaccaagttgggaagtgtacattggatgagaggaataagagtgttaggtgtcaacccatattggaagcataataggcctgggatttgcttctttattaagttaccagaagactttatatgtaatgggctgctactcgatgaacatttttacgaggaaagagctcgcttaggtgtggtacaaggccagttaagggttttagaattgtgcaaaagtccttaaatccaacaannnnnntagttcagggggtatttttaacgatcttaaatgttcaaggggcatgatttggt

SEQ ID NO: 103737 - DNA, 1182 bp, Cannabis sativa
ttttagattaagtttagtatattttttatttagttctactcttgtttggagcaattctaagctttttatcttttatttttgaatatttaaaatagaagaagattagaaaatatcaaaggaataagatggaaaaaagataaaaaaaaaaaaaatctcacaaaaagatgatatataaaatagagaaaattatgcaagaaaataaagatgaaacttcaagcctgaatttgactatgttttgaatagactttggaaaaatgcaaagcataaaagttctaaatctctcttttatctttctataacatctttaattgtctaattccgaggaatatcgagagagttattgccaaaatactatcagtcgacgcatcagaaaactcaccaccccttccaatcctaaggagaatatgttttctaatcctaagcataataagttttctttttcagcaatttgtattttattttatcattttttggctataaaggaagtggactttaataattttgagaaagcaatttagagggaaaaaggagtacgaatttcagagacagaagtcaatactggaggcattctgcagagggttttcaacattattattctctatcttcttctctttcttaaagttaacatgtgtgattttgcttctatgaacatgtgtagctaaacacttgattagggttagatggatgttgtttgacattactttatgattttaatatgatttattttctccctaaattctatgtattctatttcattttgtatttaattacttttaattgtctggccatcaattaactgttttatgatttcgatgcgagatctgagaagtgagtgtcgattatgctatagtaaaataaaatttaatttcgatataggatgagagtacctatatggttgagatagcttatagggtttctgtgtttaatgcctgttgcatgttaaatttatcacgagagtagaaagtttgcacgtaattgatgtttatatatctgagaagactataaattaccttagtaaacctgttattgcataaaaattgataataggaagataatcatattaagccataattcaatagaaattaacaattgaaatcaaagtcctaatttttattaactattaatttccttattagtttaattgcttcttctttcactgtttttttttttttattattttct

SEQ ID NO: 103738 - DNA, 647 bp, Cannabis sativa
gttacatttggaaaaactgtttttctttttccactgacacattaactaaatgaataattacattacgtttaaagatttttattattattattttttgtagtttttttatgaaaataacacgaaaataaaaaaaataattatataaaagtaacataaaaataatattaaaacaacaataaaaaataacatacaaatatcaataaattaacaaatgtataatataaaaatacattaaaaatttttattttctataaataaaatcataaaaaacgcgaaaatatttaaaatttcaaacagtcggatttttatattttttctatttttgttgtatattggtttaataatcccttaaccaaatcggtatatatactatgaattgggctgtacatttgggcctggcccagttactactgtaggagtgggccaggttgggcttagctcctctatctaccacttgattggtctcatcattgtcatatagtgattttggacaaagtaattaacttttctttttgacctatttttctaaacatgttaaaaactttcttaactttattaaatttgtgaccgttatgatttgtgacaagtggtcattaaactcattacagtcacaaatattaggttcattgatttaaaaaaaaaaaaaa

SEQ ID NO: 103739 - DNA, 603 bp, Cannabis sativa
ttcggccaaagagatggtgagagggtttttggggttcggttttgagtgagtgagttttctaggcatagtttcgggtagaaactttgtgggttttttggtttcctcttggttcgggtagaggctgcaaagaagaaaagaaacattttggagaaccccaaccttagaacctgtagcaagaaagaaaaagaaaaatattagaagatcccatagaatttttagttgatgtaagtagaagaagaaaagatagaaaaccttaccatttagttgctgccattagtagagaaaagaagaagcttgaagaaaaatataatattgaagaaccctaaccctaagtgcggctgcaaagagaagaagaagagaaataatccctaaccctagaaagccctagctgccatttgtgttgaagagaaagaaaagagaagaaagaattatacaaaccctaaccctaggtttttctttagcttctgccgttagagagatagagagaaaaaggtttgaaagaatttgaattcttttgaaagaataatggctgccgtaggttgagtgttagggttagaaaagatcattatcttttatacataagaatattagggttgcatttaa

SEQ ID NO: 103740 - DNA, 1143 bp, Cannabis sativa
tccttctccccacgaggttgcctggttctttgatctgaagtctacccccaaacaaggcaggtcggggtactttcatttctctcagcaaggtttcaagtggttgaccggcacgaatgccaaggccatcagcaaaatagggcattttgttgatgagtacttcatggtgaaggatccgagcattacccgaactcggtttcagcagattctgacatatcaccgtcctcctctcactcttgctcttagggatagagctcagaaacttgcccggttgctgggggaagacatgaatattatccagttgacctccgatgaaaatcttgtgaagtacgggctctatcccgaggagttttctcctaagtccgtggcggggaagaagaggaagtctggtgctggccagcctgaacgagctcatccggagaatgagttgattcaactgaagcgtgaagctaagttgaaaggaggtgtcagggccaaacattatgcttaggagtctttgaatcatgaagatgaggccgaggacgagtaggtgaccccactgaagaggaagaagaaactcctggcctcgcccaggcctattgaacatgcaattcgcataaggaagcccatttcacctgttcagccatctcccccctttgcggaaaagggaaagctgtcatgtctgagataagattgatgtcaggtgatgatggacttctgagtcttgtgcgggcgatcaccttgcatttcactttattttattcttgagcttcatgattttcatgccatgtgtttctgaatgttgttttctaaccatatgtttttgttctgtgcagacatgtctcggtagatgctcgatgctctgaggaagagaatgggcggaagctctagtgcctctccttttgccaagaagtccgagggcggtgaggggtcctcttttacggaaaagagaccttctggagaggtcattgatctttctgaggagctgattgctacaaacccctttacccccatgtctgccaagtccaaggagtctggaccaccaacggttgggtctaagatggtcaggagtgatcttgagcgggtgcaggcaccagctccacctttgcctgtgcttccagagacccaaaagggcaagcagatgctggcccactacatgaaccggct

SEQ ID NO: 103741 - DNA, 558 bp, Cannabis sativa
attacacttagttattataacgtgcgttatacgctaagtgtttcaccagtcaattcgcctcgtcgatactttcttatatgtagcgagatggatgtctcgcaacgcattgtccgtaattccctcgggattatgccttctgaggcaagatggtttctcgccaatacatgaattaatagtttggacatccttatctcgcttaagactatatagccagcgagttacgaacatactctatttattctatgagttattccattttgcatttaatgacataattatcattatatttattggttcatattctacgagattgacatgtgtcaatttttgaagtacagccgaatttcgggtataacaattgccccttaaaaagtcattttcaatgaaaagtattttttaaatgattactgagggtatattcatcataatctattttgaaaaaaatgcatgcttttgaatttggctgtttatgttttcgaagcacatcattaacataatgagccatcttttccacctctccctcgatttctaccagttggatcttttgtcttttaatct

SEQ ID NO: 103742 - DNA, 565 bp, Cannabis sativa
ttttcaacatttttcgattccgtaagtttgtacacctcacattttacttcatcaaactgctggaaaaaaaaaatttcaatttctttgcataaaactcatttttggtaaggttctagttttcttggcaattttcgaaaagcttaccgtaaatcgtcatttttcattatttttgagtttttcttgtttgagcaatttttttatatcatatttgaggtgctataaaaatttggggtcaaacggttggacaaaacgggttttcaagccttttcgggaaatttgcctgctgtagaaaccggtttaccggttctgcatatacctgataaaccagtaaaccggtttcttcgctaggcacgattccaaggctgtttaagtcttttcaaaaatgattttttttctataaaagccctactactgacttcctcatcccccattcagataccttaaccctacatagagccttaaacccttttcctctcaaattctcactctctaaacctaatctccttattctcttcaacctcctaccaccatggcctcttcttcaagaccaaagaggcaaaaagtg

SEQ ID NO: 103743 - DNA, 577 bp, Cannabis sativa
gtgttaaacatggacttttagtttatttgaatctattattgtaattattcgttcagtttgcatggaatgaagtgcttaactaactaaaaaaaccaaagttttacaaatttttaaacccattagaaccaacataagtggactcgggttataaggagattgttcaaatagaaaagcgtaaaagtaaagattgttcaataaatataataaataaaatatcctaagttcatgaccagttctggtagaataaatctactccccatctctggcagaagagcggcatatggtcatcatctactccatcgaatggtcgatccaataacttatgctcaatatgctctatgacgtacattctgcaatcgccactgcaatagtagttaaacgcaaaatttaataaacaaataattttttttaatttaattagtaaacatattctcaatttttttgtatttaaattacctcaattttgtgtgagatacaacttttttgtccatgatatcccaatcgaattttctgacctgggttttggaggctgtcatttgagggaccatcaccatgtaatgggtgtcacatacaccac

SEQ ID NO: 103744 - DNA, 922 bp, Cannabis sativa
atgtgctctcactatacaatagtatcaacagacagaaatctcaagaaccactaatgtctataaaactaattatgcatcatattgtatcgacaggatacaaatataatacataatgagacatctgagatttataaaacatgatgataactactgatctggatccactcgaacatagcactaagagtaagtcactggcttgcaccacaagtgtgcagacacaacatatcataagagttatccagaatatgcatgtattcaacaacaaataacaatccttaacatgtctatcatacatgaaaacaatgactcacactgaccaaacacaactttagctccaacaatccaaacaagaaatgacttcttagaagacacgttcaggtaagtcgtgtcagcgtagtcgttgacatgttgtctgtaagtgcgtgttatgatacaatagaggaccccacaactttctcactgcatatggacgtcatcaccatattaatgtagcaattatacttctcaagttccgcgagaaagatatgattgcaatatttatcacataagttcagtaagttcacaatagagtcaactactcttaacactgaaatgaaatatcacaattgcaatgtacaatcaatttcctcgtaacacactacacattctaccttaacaaatgaggatgctgtaaatgtccatacaacagctataactttccataccattatactttctttgtataaaagaggaagttgtaggtgttcatatgacacttaattacaaaatagctcctcctagaatcataaatgcttataagtggatttcatcatccatgcaccctatccaatcgagatcagtaaaaccaacttttatatgtcacaatattagtttgtcgattgtcaacaaatccttggtaccataaggatgatagctcaagtac

SEQ ID NO: 103745 - DNA, 881 bp, Cannabis sativa
tataaatttctgataagtaaaataccattttactaacttataatttataaacaattaaatatttcacaaaataataaatttttgaatttgaaaatattatggttagaatatctataaaaaatttctaggtaattttaaatttattaattatttaatttatcatataagataattttaatataatattttaaatcaaaagataaggccatcatttaatttaaaatatgtccaatattaaaatatcgaatcttataattaaataatctataaatattaaagaaattaataaaattttaaaatctgaccataaataaaaataaaataattaatttttaaatttaaatctcaaaatatcagaaattaataataatttattaaaaaattaaatattattaatttagaatttgatatttaagtttaaatattaaaaataatatattattcttgacttttagggtttgaaattggaaaaattcaaaatttgtggaaaaaatccacaaaaaattggattttgggtgtggctgcccagaaggctgctagtagcctttacgcgcacgcaaggggccataagggaggtgatccgcgcgcgaaagaccctgcttgctgagtgatttgtgtgcatcagcatgtctgaattggggtggcacgccgagttcagacaaaaaatgtctggtgcatccgcgcgcgtttggcttccttgtgcgaagcctcgtgcgtgcgattgagcaccatgtgtacccattcaacccgaaacttcaaaaattcataactttctcgtttttaatcaaaatcaagttctataaaaaccaaaattacttaatttttcacaaggaatccaaataaactattttcagaacgaaaataaaattattttcatgaaa

SEQ ID NO: 103746 - DNA, 790 bp, Cannabis sativa
aaaaattgtgctttatgtaattatgtgcatacacaaattatatacaatttatttattacatttatcaaattattaagattttatcatgattgtaatatgaaccatacaagtcactcacatataagcaatgtgaaacgaaacacacgtgtggtaaagttcctccaaatgaaaaggtctccaatatcatttctggaaagtcgtccctagaaagttaggtgtctcctggatcttgtttctgaacagctaacttgtccatcccagaaggagtcttgcagaatgatagtcgagtctggaagggagttcccagatgactatcatgtccactctgggtccagttctcaaggtagctagcctcactcaaagatggagttctggttggctagttgtcccttcgagattggtagttccggatagttaactccagcaggcgctatcctatctgaaagcgtcatcagcgagtgtccttggtctgtgagtccagaagcctgtatatattcttggaggcactaattcttaggctgacgtgtagactttgctcaaagagaagttggttaagttagttagaaagtatatactcttggaggctctgattcttaagccaacgcgtagacttcgctcaaagagaagttggttaagttagttatttctaactaacttaacaatctcgtttcttgcagccactaactttattcttgatcctaagcttataaataccatcttgtctagctattttagatgacacgaaatagagatgagattgagagcttgagagagaaaagattgagaggta

SEQ ID NO: 103747 - DNA, 525 bp, Cannabis sativa
  modified_base (140)..(145): a, c, t, g, unknown or other
aaattttaaatatttaaaaaatacgatatttataatcatatccaaatgacacactaatgtaacaataattaaatttttttcttaaggatcaaaatctcaaaccccatttaaaaattaaaaaaatacattacctaattaannnnnnttaaacatacatgtattgcacttaagatcacccaattgaacctaattaaaaaaaaaaaaaaactaattatacgtgcattgcacataacatcaacctaatatataaatagatgtgaattggattagatcccgttaacatctaatctatataaatacatattacacaaggtactattttttacaaaaaaaattatagttttatgtttaaataatttttttttacatttttacggtttttcataaaaacaacacgaaaataacaagaaaaactacataaaaataacggaaaaatagcatcaaaataacaacaaaaaataacatacaaataacaaaaatttaacaacaaattaacaagaacacaacataaaaagaccgtatttt

SEQ ID NO: 103748 - DNA, 602 bp, Cannabis sativa
gtgtttaataattaaaattattttgattacttaaagtgacaaacagggagattgtagagtcttttttttacaatttaattgtcaaaatatttttttaattaatgtgaatatttattgagaaataaatatattttgcttatattattttcgtgtgtatggttgcccttttccttttagaaatctttggttaatagctgtatttttttcttttaagaaacttgtcatataagagaaaaaaatttctatatggaaagtttgcttaaatttagaaaagttgactttcccttttgctagttgataatttcatttttgacctgtatgtaacagatcatataatctttttatgggaggtactgaagaccaaatcatgatattagtcttatttggaaaatttcccgttttgacctgatctatctctacaaagtgcaattttgtcgctgtaagtcagggttcacacagtgcactttgtagattcatttttctaaaaggttttgtagggtttacacagtgcactttaggatcttgagaatagccaaacgtttctcacatcttctagattcatttttcatatttttatctttgtgaggagagagtttcttttg

SEQ ID NO: 103749 - DNA, 543 bp, Cannabis sativa
ctacttgttgtgtctctcttgttcttgcccttttttttatgttgtgaaatgagaggagtagttctttatatataggccaaaggacccaataatacttgttgtcctttttgatagttaagttagttaaagactaactaattaaccgaatgtaagttggttgtttaaagaataataccacaaatttcaccttatttctttaagccccaacaagttaagcatgtatgtccaatggaggtggtagtgctatcatgtgtagctacttagcaactaaagttgagtaagtccaagaaatgcttgaacttactatcaggtaacaacttagtgccaatatcaactaggttctcttctgacttcactttctccagctcgattacttcttcttctatcttctctcttatccaaaataaccgaatatcaatgtgttttgtcttctcatgataaactggattcttgcacaaatgaattgaggaatggctgacagaatatacccttgcctttccaactagaagcttcaactccttcagaattccttgtagccatatt

SEQ ID NO: 103750 - DNA, 520 bp, Cannabis sativa
aaaatttctttttgattgaggacttcaaaaagattattctcagcgtctttaaatcgtctcaaagacatatcgtcgcgcccagctttaaacttttttgcttcactcttccaatgtttcaaccgagagtgaaatttccccaaataatcactgttccactctgtaagcttattaccacaaagctaaatcttctcctgaataccactcaaagcagactccacccaacaatcattgataacttggaaacacataggctctcggagccaaaagttctcaaaccaaaactgcttatgacgagaaatatgagaccgaccaaccagattaagcaacaaaggactatggtcagaggagctcaactccaggttcaacaactgagctgaagaaaaataaaccaaccattgcttaaaaacaagcgcacggtctaggcaagactcaatccaagcatccgaaccacgactcttttcccaagtaaattgatgaccaacaagctccaaatcactcaactcacactcttgaattgttt

SEQ ID NO: 103751 - DNA, 657 bp, Cannabis sativa
ttcggtttttatggttaagtgttacaaaccgtaaacttcaagtggtttagccgccaatattcctataatttaatgtaataacttttagaaattaaaagatcactattcaatcatatagtgccacctctagaaggtgctgggtactggtgcccaataataatacccttttaatattaattattctttataatatatattgtacatcatagttatctaagatatatactttgtaaatttttgaaaaattcaaaataatttaacgtacaaaaattaagattcacattgtctattgcatgtgtgtcttgtttattttatacagcctaaaataaacaaattgattaaactataccttctgtattgtaaattattgtgaatttattaaaattttacaaaatatctcaaataactataatatacacgatcatataaaaaacaattaaaattataactatttagatatcaaaaacacaaaaagagtgcatggatacacttaggtgtgccgtaaaaacatcttataaattatatgtaaaatatctaaaagcatcttagacaaaaagagtatttttaagtatgctaaattataacaatacactatattttttagagctctattggagaagagctaacatgaactttttagtttagtatgtcatattc

SEQ ID NO: 103752 - DNA, 1450 bp, Cannabis sativa
gagtcaattgtgtcttttattaacttctctcagagtctatgaaatttaaatttaactatgtgaaaagaaatttaatttatctaaggatgataaatttttattctctcacataattaaatatgtaaattacacatttttgtacatacaagtgacaaatggaaagaagtgccatcttcattttaagtgaagagcatgtgttaattgtgtcaatgatttttttttgaaacccctggccaattgttagtcacggcaacaaggcccttctccattttaaataaagtgtcattccatcttcaaaataacaattcaaaccccattcactttccaaccaaactctcaaagagaaccaattctttcatctcgacaaagaatccctacacgcccaatcaaggtaattttttttttctcttcattctttttcattccttcttctcatcaatccattgcacttgaaattcacaaaatcttaaaaaaaaaaatcccttgtagccatggccttctattggtgaggagagaaggaattttcaaaaattcttcaaaaaatttttggagttggaaacattcttgaggtaatttctagctcttttcactttcttggtaatttgtaattggtttttgtacaaattgcatgaatgaaattattgtggaaatagaaattaggtttgaatgtgtttggctatgtgatgtatgaataaaatttagataggttttgaattaattttgaattggttttgatattggaattggaatttgaataattgagagttgaatttgtaaatttgggcaagagttacaaacttttggtataggtttggatgatgataaattagtccatatctagatatgcggtcattacaagaaaaatcggacaaaatccattcaatgatctttaaataaaaattgagacataacaactccattatttaaattataaataagagaaataataagaccaatcatgttgtaatgctcaatcacaaaaaaattgaagcttaaaaaaaagggctaatagagagatctgaaaaacaccgtgagaaataataacacccttccaaaaacaacttaagccaatcgataaatcacggactacccaatagagtttaaaattatttctatttttcaaaccaatactaatctagcagggcggtgagaaaacaccattattaaaatgttaaaaatataataaagcataagaaaaagaaaaatggctaaaaccatgcacagatagagataaaacacaaacaaaccaaataggtcaatctaataccactaaccaaatcaactcttacaatcaccactccacactcacgaactaccgcatcacacatttgagagtcataggagaaacaaacactgcaaatcccaaaaactcaacatagttgaaccccatcctcttgttgaggtccaacgtcgtcacccatacaagcaacctagtgttgggttttatgcc

SEQ ID NO: 103753 - DNA, 1966 bp, Cannabis sativa
attattggacataattcttagcacctttaagtatattattttacaattggttaactatactctttaaaagttattatattaaactatatgggatctaatacttagttgaaccaataacgatattgacacataagaaggtgctaagcaccactagtaccctctagcatttctcatttatattagtttgaataagatctcatgacgatgtcattatataagaattttttgttttttttgaatgaattcaaactttaattctaaatagaatttggtaattcgttaaaaaatatttaatgtgtaactataaaaaaaataataaattagtttgtgctctaattttaaacaaacaatatggtgatgacacatataaaaaagttagaaaatgaaccattataaaacaataaatacattcaataaactcgcattggaaaatacaattgagaaaaatattcgaacttatccttttaaaaataagagtgagccgtgaataataactaccgttttgtaaaaccagcgaaatgaacaatcaatgtagaatgtctatctcgggatacacggagtacacaacaaaataatcatatgttggaaagggcagataatgcattctttaagagcttgtagctcattgacccacatactcgtgagtatgttgaaaaactaagggaaatacacccaatataattcatctcattgtcatactatgacagtgcctcgcgtttgcctctttcaacattacagaaggacgcgagaagtatttcccagagtaaacttagacgcaaaatatatcttcagaataaagtgtcctgagaggattatttttattgcgagatggagaagtatagttagcataaccatttatagataaagacaagagtgattattacagttatttattattatcccacgtgatgtaaatatgaaatgtggagattattcacgtcacacgaatgattacagggataagatcttaagggaataactgccaccctaaaatttctataaataggaacatgacctagggaacagaggatgactaaaaagaagataatttctcaattcatatgtcttgtattctgtatacacttcataaaatttcagaaataagattgactcgtagagtataaagaattaacatcaaaaccacgttaaatattctcttgtcatttacattaattattattattattattcattaatatcttagagtttatttattacgtaaagactcatttattagttaacaaagatctgcgttaataataatatttttcaaaaaaatatttataattgatacatttatattcaaaaatttgaattagttgcgagtaccaaccaaaaagttgtgtgggattgttctttatttataacactttagagaaataatattatatttttttttatataacagtgtataatatagctataacaaatattttattcatattttaaaaattttaaattatttagagtaataggcttcaaacattcggttactcatttgtttttttttttattattggcttttttcttaacgaatgtaattaattatttcaaactctatttttaacaatataactagggataagaacacaaattttgtaaaaaaaaattattttttacattgaaagttttgtttttatatttttacggtattttataaaaacataagaaaacaacaaaaaatcacatgaaagaaataagaaaatagcatcaaaacaataacaaaacaacataaaatataatatacaaataacaaaaaattaacaacaaaataataagagtacaacataaaaatacataaaagacggtaatttatgtaaataaaatctaaaaaattgtaaaaaatattaaaaattctgtacaaattgtatttttctaattttttttattgttttttttttaaaattatccctataaactatttgaattttttttaagaactgttaaaatatttactatgattaca

SEQ ID NO: 103754 - DNA, 583 bp, Cannabis sativa
  modified_base (368)..(372): a, c, t, g, unknown or other
aggttgaaaatcgactttatgatacgtacacattttagaaattcatgtatacagttagagtgcaattgtcaaagggcccaaaaccatagatgagcatttcatctgaaaagatataagatctaagggttacgtattttattatccatctcacaatactagaattgtggagttaagaattaacttgatcagtgggagtgatcaatctaggaacctagtttctgagaaagatcattcatattttctcaaacttctacctcaagtattagattaattatgattcacaacaacccttaaggttaatggttattgagatatcataactaatcattaataatccacaagtcattgataaaattctaataagttannnnntttagtaattgcttacaatttctaaaataacatgcatattaaaccatttcctcttttaagagtttgtcggtccatccttaagagttcaactacaatactaatttgagacacaaagtaaattatggaatgcaaagaattgaaattgtagtacaatatgccaaaaatgaagaaatgaatattttaaagagcaataaagtttatctttagtaaa

SEQ ID NO: 103755 - DNA, 617 bp, Cannabis sativa
gcagatctttatgatgaatttttaagcctagtaaagtttaaggttggaaatggagataaagttcgtttctgggaagatgagtggctaaacggttcatcgttacttcatacttacccggatttagccctgatctccatagctaaaaacgtaagtataaaagatcttgtagttgtggaaggtgcagcgggagaaagtgtggtaagttgggatttcaagttcagaaggaacttattggaaagggaactgcctagccttataggattgttacaacagttggaacaggttaaattactgaacattaatgttgatagcagaatatggaaacctgatgccaacggaatcttttcaagcaaatcggcattcgtttggtttacttccaaccaaagtgtagctagacccccttggtccaaatctttatggaaaagcacagccccgtccaaggtcaaaatctttgcatggctagttatgctcgggaaagtaaacgtgcatgacattttacaacgaaggcgaccttttatattcatatctcctgggtggtgtgtatgctgcaagagtagtggagaagaagtcgatcacctatttctgcattgtaatttttcctccagtttatgggcaaa

SEQ ID NO: 103756 - DNA, 634 bp, Cannabis sativa
  modified_base (342)..(370): a, c, t, g, unknown or other
ttagcgtataatatacaaactaagtatagaagtcgggtggactcaagacctaataagcgaggcgcctatcttgctataggaaggcgcactcttgttactttcaccaatcaattttagatatctttcagtgagacttatagtcttgacgagtcaaaagctgacattcaaattatgatgactgctgaagtaatctttgttattaaaaactacaattgtcaaaatgaggtgttatgccttcaagcgaagaagcaacgacgcgtacatcctcaacctcagaaagataggggaaaagctctagcttgatatcaaggtcattggtactgagttcctgttgagacatcnnnnnnnnnnnnnnnnnnnnnnnnnnnnnaagacacgatcattttgacccagtaaaagcgaataaattacaactgtgtgatattcaaataataacaacatttatactacgttaatatgtaatcagagcccatgatttttggggagaatggttgtaaaagatcatagttaactctgtaattaactacctactatgtgattatgaatagaggcaagttagactgaaaatgggacgaagaaatcataagaaaaaaagccctaaaaaaccataacaaatctaataagattgactcgt

SEQ ID NO: 103757 - DNA, 1039 bp, Cannabis sativa
  modified_base (165)..(170): a, c, t, g, unknown or other
tttgctaattcaaaatagattttccaaatatctttatattactttgtattcctacccttgacaatattttaaggtagcaattcggggaccatggacctataattctaagctcgaataaactagattatttatgagtcccatcaaccaaataatttttgtttattnnnnnnatgattactccactataaatattgaattgaacttatagaattatatttactgagttttactgcagtgtccattgataaaatcaattccagttattagccctctatatattggttcgtaattagtgttattctaattttcacccacatgacgtgacatgtccacataagaaagatagatgtcacatggagtatagcctgtcaacagatgaactaagtcatcatgcacaatttatcaattgatgaagggtccaaatgcttaagcagaacaaagatacactaaaatagccaactatgagggtcttaccgaacaacccttggctggccaaagaagagtatgtgtcggccaaccctaaacaaagggtaggtcatccagcctctgtaacgacagccagaaagaagctcaaacgtttagtgtttctacagccttcaccctgggtagaccatgactcattattagctgcgaaaccattccaacaacccaccaaagtaggagttcaactctaaatatctacctattctttaagaacaattaagtagttattttctttatatttaaatatgtgaaaaagaggtattatctcctcattttaagggatattagtcagtctattttgaactagatcttttttttataagctctcacctatataaagagcattaggccagattagaaacctaagtcctatgttctaagctctcatctcgaaaccctagttctctctttcttctacacgccacctacagtacacaagaaactaagtctatttctcacctcagttattcgagatctgtcttacattgctctcattattgtaacattcatagagagacacactagaaattatagggtaacatcctgtaatctgtgt

SEQ ID NO: 103758 - DNA, 554 bp, Cannabis sativa
acgagtgtacatcggtaccactaacaagaaccctagtttggtatcggttagtgggtgactctgatacacttcacctaacttgattacagactttgtgtcacgggacccctaaacacctatagtgatagtgtcaatactgcgagtgtccatcggcacaaccaagcagaaccctatttcgatattggtttttgatttcgttacgaaactggtgactaaaataccctacacttaacttgattacatactttgtgtcacgggacacctaaacatcaacagtgatagtgtcattactgcgagtgtacattgacaccactaagtagaaccctatttcggtattggttagttatttcattacgaaactagtaactctgatacactacacctaacttgattaaatactttgtgtgacaggacccctaaatatctaaagtgatagtgtcactactgtgagtgtacatcggcaccactaagtagaacactattttagtattggttagtgattttgttacgaaattggtgactccgattcaatacacctaactttattacagact

SEQ ID NO: 103759 - DNA, 971 bp, Cannabis sativa
gaacatgatagacccgtaaaggagacttaccggacccggatgtgctggcgtcgggggccccagtgttgggaaccaggaccaaggatttaggcctggcaggcacccgatccgtgcccgcttccaggagaagggtcctcctggcggcggcttgggctatgatgtacgccaactcctgttccctcctgaaaaggtacttctggtaccggtcctctgccgaggctataatctctacccggagtgctttctccgcggccggggtgcgaatgttggggcaaagaacctttgaaaggttaaagtcatccaccgactggctcccaaagattagtttaaccttccagcagttctctgtcgtgaccaagtcccccacgttgagatcattcttgtcgtaagtggagaaggtcttggcatgttggagaaacagccaggtcggagccgtgcagaggagaggtggaatcctaacccactccgtgaggagctccgggcggtccatggcctggaagccagaagaaaagaaaaaatgatggcggtactccttgacgttcttttggtgattaaaaggaaccgggccctcattcaaggggtgggcctagagggtgaaaaaatcgtccttaaatttgtcccgcttcttggggacagaaacaagttcataaaaatacaaaatttcggccgggctaggtgcagcccagcctctggcaacgtaaaaaataaataagcctgagagcaggcggtaagcttgtgggatgagttgataaggcgcgaggccaacaaaaacaagaaaattaaaaaagtaatcttgaagagggagcatggccccaaacatgaggtgggtttggctccaagctccgaaccccccgtagttatggttgggcgtctcttcgtcccgaggcaagtggtgcacaaccccggacgcagacggcttgatgcctaccaccgtcacaatcttctcgagctgatgagcgcaaaccaaagta

SEQ ID NO: 103760 - DNA, 915 bp, Cannabis sativa
  modified_base (28)..(36): a, c, t, g, unknown or other
aaaacagagggtccaatcggtaactttnnnnnnnnncagggtccaaaatagtatttgcccttgaaaaatagtaattatttatttttgtaatgaataaataatttattcaaattaataagatagggaaaagacaaaaaattgttaagacaaaatttatcgagacaagatttgtcaggacaaaagacaccaaccatgccctaaagacaatggtaggcgcctatgcttgtccctatccctatgagatttgcctttttagattaattaattattttattaattcaattaggtaaatatctaatttgaaaagtagttatatatttgaaagttgttgaaatattcaatcaagtggttgagagattccttcataaatatcagtaattgaattcaattatagatatttattaatttaaataattaaataataatttaattaaaaagatttaactactataaataggagtctaatttgagaaattaacttcacttttttgttgctatttttgaaatagggagagaaaaagaaagaaagaatttttctcttagttattcttgctcatgtgttaagaactcaacaagaacaaaggttacacactttatcctaatagtccacactatttcttgtgtgtggtggatcgatttggaagacactagtgtgagtctaattgtaaatttctcatcaactggattaagggatacaacatacgagaagttttgaggatacctaataggcttcaagaggtgcactctaaacttattattattttttttttgttttgatttaatgtacacacatctggagatctattgggatatggtatgatgttaatcagataatacgaaactcttctgctgcgtacctgatttagtaccataaaatgttggaatttattttaccaggacctagatttactaaca

SEQ ID NO: 103761 - DNA, 627 bp, Cannabis sativa
tctcgatcacagtcaagcactgctatgcttttagaacatcagcacctcccaagaatattggaggtgcttgcttcctgaacctctcgtacaaaggctctatacggttaccatcaataggttgttctgttggcactgcaggaaccacaacagtaggtggttacgagggaggctcaacaggagtatcccgttctctaagccttcgaatctcttcctcttgttgagtgattcaggcatgcatctcagcaaacctctgctcccaatcaaaaggagcctagggtggattctcttggcgacctctaggagcacgaccgtggcctctaccacatccacgggggttttggggatttctaccaccccgaccacctccggtctcaaccatttcaccctgtcatcttacgttttgctgggcgtccattatctatgacttagcctgcgaacccacaaggcatgtaggttagatagtggttataatatttccaagaccgcatttagggttttaataacatttcacacatatatgcaatacaacttaatcattttgcaaaaggtaaaagcttacggaaccgtgagttgagctcgacactagccttgattgtagatatcttgatgatcttcagtgaacaacct

SEQ ID NO: 103762 - DNA, 759 bp, Cannabis sativa
cctcgctctctcaactctctttattagatggaattttgttgtattgaacagaatgagtgaagagctcagagaccgagaccctatatttataggtgagatactacatcatgcgtcacataaattgtcagaatattttaacaatattaatttagaaaatcaaatctggtaatgaatattgaaatccgaccgtatatagaatattacgtaattaattttgtccaaattcaatgaatataaaatattcatttatcacaaaatcaattcattatttattccacaattagaaatattctaatattcttccacttggtcagtatttagactaaaacattcaaactcaacgttcctcattatataataaacatatgaatcatagcgacatgtcatcattcattatgagtcgggtatgtatttatctttcatgtattacaatatatttaatatataacaatgtactttatgtggcaatgcacttaagcgaataaaccctaaatcttatgtgtatttaagtcatctaaaattttctcaaatgtaaaattaagatgcgcaaaaatatgaaaaaataacaaaataaaaatttcattaataataactttatttgtacaaattacataagggaaccaagtcccatgctctctacacgatccttgactttatgaggtggcaagccttttgtcataggatcggtaatcatcaattcagtgctaatgtgttgaatgaccactttattttctttaacacgttctctaatagctaagt

SEQ ID NO: 103763 - DNA, 544 bp, Cannabis sativa
  modified_base (504)..(514): a, c, t, g, unknown or other
tactaatcacaaatataatcaaaataacacacaatgcatactaataatttaaaaacaaatataaatgtaaatttcgaacttagaaatcaaataataaaaaagtaacttaaaataaaaaatttgtaataacatcttaaagtagaacaatcccattacaggactctcaaaatctgtaaaacattttcgaacaataatttagaaaaaaaaaactaacaaaaataataaaaaacaacacataacaataatttaagaacataatataaatgtgaaaacaagtttcaaatttagaaaaaaataatataaagaaacttaaaataaaaaaatcataaatgaagcaatcccattgcaaaaccctcaaaaatcatataaaatcatataaaatctatataaaatctataaaaaaatcatataaaatctatgaaaccaatctcgaccctataaaaaaaaaagaaattttatctacaccaaaaaaattttatatacaccccattttaataatttttnnnnnnnnnnnaatttatatatttaattgtactaagttttt

SEQ ID NO: 103764 - DNA, 798 bp, Cannabis sativa
aaatcacctcaaattcaacaagtaaacatcgaaactagtcccatgactacccaataataattttacaaggtcagaaccttcataactattctaattcacaaaatccctgtacgaaaccaattgtcttaaacttaaagcgaaattattccttaccttaagctttccttgtacgaaggattgctattccactaccatcagagcctagattgctagatttcagattgaaagttgaaaagataaatataaagagaatagggttttgtcgaatgaggaggacgagagttcgttcgtttccttttactcttataaacttataataataagaatattaataatattaatattaatataatattaagataaattttattattcataattatcttatcatttcttaaccactaagaaatttatacttctagggcgttaagttaaatcccacacactcctaattacttcaatacctatattatcaacttatcacaatattctccccaattatatcaattaaactcgttatgatatttttggcccctgatcgagtttccaaggtcgccaaaccagaaattttttttattccacatatagctcatattacattcacacatgctacataaatctctgtaatttatacgcttatttactcacttatagcaaatttaaaatttatgttgaactagactagtatgatcataatcccacttattaatctaattaactgataagataaatataaatcctaattatttaccattaggcttatcgggatgttacaaccatcccctccttataagaatt

SEQ ID NO: 103765 - DNA, 532 bp, Cannabis sativa
gatcaactaagtgatattagaaaagacataatggtaagtttatgatatcttttctactgtgaatatcggtccagtccgatgtatacctaatacattcgctactattatactttgctaatgccctggaaaggacattccacatatcattatgtacgtaaaatttatcgctgattatcacatcagtgtaaatccagtacactgataaattatgagactaaatactttgaagcatataatcaggattattttccactatgtagacaatactataatcatgaataattatatgttcgagatttaatagaatttatatattaaagatataatcataaaaataatcatgtgaatcatgcaacataaaataattttttatcttttattaattagtaaatctgattatattgaaatgggtactatttaggacataaaaactcaacaaactccctcttgcactaatataaaattaaaagtgcatttgaattaatctcaacaccttgatgtccaaattaagtatagtatgtagtattatctt

SEQ ID NO: 103766 - DNA, 2811 bp, Cannabis sativa
tattgtatttgatttcttcttccaagcatatgaatcaactctcccaccatccaaacacttatttgttcacttttacactaaacccctcaaacccattttccattttccgcaaattatgttttttcttcacccaaaagcactgactttaacggagctttctattgtattcttaccccttttcccgccaattgtgtactatctcacaggccggtttccccaacgcaagggtcaatttttcgtccagccaaacatttgttacatcccagcctttcaagcccttcatgggttttcagaaacttgagccatggttcggtgaatcttgtcatatcgcaagggaaactcaagttcgaaacgcacgaggtggaccctccgaagaaggaaaagtggaagacgaagaagaagttgaagctgcaaagaaagcgagaaaaacaggtgagaaaatcggctaataagagagaccctcgaaggctcggtgtgaagggtaacaaaaagcagaagttcgccaatgccgaagagaggatcaagtacaagcttgaaaaggtgaccataaattcttatagtaaatatcaatactaatagtatgattttgggaagcgattcatttcagtgaatatgctctaaaagtttttatagagatatcattttatttcgttttatggatgaagcaattgatcctaacgatcactgtggctaatattatttatctagctggtgttttatggcatctgattttaaggttcgccgaccatatgtttgtacttgtaactaaactaacaattcaaatgtcattattattgaggtcctcgcattgattcatccttttagctcatatccctatggcaatgtgaaatgtttagctttcatatcaactcacattgccttcttttctttctagtttataggcatatgccatgtccttcatagacactcaaatgaggtattcttcttttagcttcttagtgttactgcatgtctgtgctaatgtgtacatatgtatataccccagttggaactgccactaaattgatataagtcatcttagctatttgtggtagttgttcgtgattcaaaattaatgtcttagtggaggaggaatacatctttctattttgtaatccatttttggctttctatatagtactggttagatatagccttgactgtttagttctttttataaatgtcttaatattgagaaatcttaatactgcaggatgatatccaaagcctaaatgtcttactgtcatttctcgatagagttctaagcaagccttttcttctacaaaaactgagatgatgtatttatatgtatatatatatacatacacacatatatatgtaatataatatatataagaaaagatgatgtatattctctagataaagcttgagttgagttcatgatgcaacatagaagtctaagagaaaattcattaaaattggtgtttaaaggaagtattttcctctgtatacttgtatgccatgacgccattgtgtacttaaaaataccttcccagaactgataaatgggaaaagattttaatattcctataggaaaataaatagcataaaaatatcagaattaccgatatattttttttaatgattcactgctccttggtaacaaagtccagttggcgtttgtgaataggtttttttagacaaaaaaaaaaaaaaaggagtaaaaaggtggagcagatgaacatgttacaatacaaagaatcattttttgataaaaaaaattaattatgagaaacatgctttcaaatatgtaataattatccactctgacttctgaaaacaaaagcttatcaactgctgtacaccaggaagttgcctttagttttgattaactggtcctggggaatttatgttatgtatccctttggttatacaacgtgtatattgtaattttagttagaagttgtggctagaggtgtcttttaagttattaattaatagttaggaatggtgggctggaataattgtcgtttaagttgttttgaagatacaagtacaagagctggggcttgaaccccacaccattcagatcagacacactgatcacccacacaaccacttgatcttttatcttgtaatctcattatgttttgcatcagattaatagtcaccaagtgggtttttgttaaatatcgatacttctccagaaacactcaaacgggattataatagaggggttttaggtattaacgtgttagattatacctattctgtgactttgtcacaaatatataactgtgggtaaacatagtcacttatttaatagcttcgctcttgaagtatgatactagttgcgtgattggttcacgaaatgttcattggtttttgtttaggctaaactacttgaggaattcactacaatctggtgtatgacacaatgttgtacacagctgttggcttgtatgctgaaaggagcaaagcttgcttcaactttgtgaacagcagcaatattgacaattttttgggctgtgtggtaggaaagaaatcgcagaaattttaggatagagaagagcagaagaaagaatttggaaacatttatgttttggtgtggcattttgggtttacaaaggtataggttttgagggactctctatcttggatttaagtagagagtggagcaattgttcgtaatattgctaataatctacacttagtgttcctattttgtatggatattagaatcatagcaactaagagcaccataaccgaaagtcagtccccaaaacttatccttcgcacctgtgaaagctctaaaggcctcattgcctacaagttttggtcacaaatatt

SEQ ID NO: 103767 - DNA, 1219 bp, Cannabis sativa
  modified_base (71)..(91): a, c, t, g, unknown or other
  modified_base (685)..(688): a, c, t, g, unknown or other
aaatttacctgttacaaattattggtttgacctattgacaattgaagggttaaaatcagatcattggatcnnnnnnnnnnnnnnnnnnnnnaatttagatcaagcaataataaaatttgttatacaatcaaacaatataaaacatatacacctgcaacaagttagatagttggatatagggtttatttaattttaaattaatttaatttaatttaaaaaaaattcaaaaaaataaataaaaaaatattttttttcggaataaataaattaaaaaaattaaaattaaacctataattttgaaatattatgtttcaactaacctaagaatctttttcgaaaaaaaatgccaactacctttcaaatttcatgttatttttaaaaattaaatattcaataaaataaaatgataatttaatatcatttttcttattttataatttagtttaaataaaaaaaaaataacaaaatttaaaagttagcataatatcctaattctatttaaaatatcatgattaaactaattttatttcaaatttaaataaggtcaatttattaaaaaaaatagaataatttaaaaatattaatatctgaccttaaattttaaaataagataaaatatcaaattttaaaaaaaataagataattaattaagcaaaaaaagtagatttttacctattttcaagtnnnnattacactaatatcttaaattaattttttttaaaaaataattaatttaattctgataattagatttgaaatataaaaagtaaaaattaaaatacaaaactacacaaaaaattcgaaatttaattccatgaaacagcatgaaaaaatataaaaattggaaaaaattacatttggtacggatggtatgcaatgctggccgagaatcctcggcgctggaggctgcacgcaacctttccgagcgcgggtaggggaattcatacatcccgtgtgtgtttcttcggacacgcagtgtccgaacacgcatctgaccgagtgaaactcggtgtccgcgcgcgtgtgttgtgcacacgatttctgattttttttcgattttcaaaatatcataactaattcaaataaaattgaaattaggttctgtaaaaaatgaattgcttaatttttcccaaactatccaaaataattctagaaagaaaattcaattatttttcataaaaatttcacaaacattaatcaatcatcaaataacacacag

SEQ ID NO: 103768 - DNA, 508 bp, Cannabis sativa
agagacccaatcattcggagctctcgaccacactaatctccatatgggaacatgccaaatattcaaccaagacgaagacaactcaacgacacaagtaatcaagccaagaatttgataaaattacatgtgcccgagcaccccaaagtgacaaaaaacacatgtttttctcacttgggaatttcatcaaacaagtggtgggacctaatttccacaacccaaacttaagccaaaagtttgtaatcttttgcccaaaattgtcaatcctacttccaaattgtcaatttccatcaccaaaaccacaaccaattcaagacaaagtcagaacctatccaaacgctactcccacaacatatatccaaatgcattcaagaaaaaaaaatcctaatttccataaccaccatcatctcatccagggacggagggactttagcccatgtgtaggctaaagccctcactcaaatatatacattaaacttttcacatattgatatatacatatattaattca

SEQ ID NO: 103769 - DNA, 643 bp, Cannabis sativa
actctatttccctctccgttggatctctctccccttcgccttcttcttcgcaacccgtagctcaaacaaccaccaccaccagcccgacgacccaacaatacctcctcggtgtcctcttcgtttgctgacctctgctcctccagaggtatatatataatcaaatattttaatatatatttatagagaaagaaagcattattaatttggtataaagaaataattggtaaccacactttgattttttaaaatatataatatataatatgattttggcctaacatatatgtatatatacagaagagaatttggtatatttagatttcttttattaatataaaaatatgaagaagacttttcaaagttgaataaataatttccaatatatattgcactgtatatttatgttgatcatgtatgaatatcaactaataaaataaaccatttggaattagaataagaacatgatgaaaattggaaagaattaaagtaccaaaacagagattttgtgtgccatgatataaatattaaattgaaaatatataaaaagaagtaattaataattatcagcttgtttggggagagctctccattttcatggccattttttttgtataaaagtgatgagtctcaaatcctcaacagg

SEQ ID NO: 103770 - DNA, 664 bp, Cannabis sativa
tcttcttccttctgaccgaagcttcatagtgaaagcactttgtgtttttatctctattttttagccacaacactttaattctatttctaacgaataaatttctatttctcttttcttctcaaaattacccaaacttggtaaaaattctcaaataagatagttatttttgaattctaattgacttattaaatcaattagttgagtctacaaaatgatagtatctgagacaatgtggggactatgggcctatgtaaccaagctcctaataagcagatcttgaaatttactgagtgaattttctaacttattaattcctcatgactccactatagattcgaaattgcacctatgattccatagaatactctatacaccaagtataaatacgctatatgaattatccattttttcaatcacgccaattattgattctctatagatggtttacatctttacatctagacatctagtagggagtagggacaaaattaccgttttacttttcaacttttcaatatattttatccttaaaacacttcattacttgtaaatgatgtttccagaaactaatattgtaacgtccccgcttcaagcctcgattaggcccttacacccacggaatgatgtaacttcaacttagtatatattgcaaattactcatatt

SEQ ID NO: 103771 - DNA, 1134 bp, Cannabis sativa
agggcataaaacccaacaattcccccatatgctttggatttacaaatcaatttccaatttctccaatgaatccgtgagccatttacagttcgaccccaccaaaagttagacatcatggattctaacttgttacaaaccgttgtaggtaggcgaaagcaactcatagcataagttggaatggattgaacaacagccttgagaaggatttccttgcctcccgaggaaaatattttttcattccaagaattcatcagccgccaaaccttctctttaatatcgctaaacatatgttgtttgtcacggcccgaataggctggcaagccaagataagtttcatgacagtcagttattgacatggagagagttcgatggaagaaaatctgagcagccagagttgtgtttggtgaaaaagacatattggacttttcagcattgatggtttggcccgaagcacggtggtatatgtcacgaacgcgcttgatagagaggcacgaactttcatcagcatggcaaaagagcaggctgtcatcggcaaacaacaaatgtgaaattggttcagcctgcctggtgagcttatatccatggaggttacctgagaattcttcatgttgtagcagccgagagaacccttcagaacaaattaagaacaggtttggtgatagggggcaaccttgtctcagaccacgggttggtgtgagggagcccgtagcttctccatttagcaagaaactgaagtggtttgtagtcaggcatgtcatgataagagctacccattacgaacagaaacccattttttccataacccgctgaataaagcaccattcaactcgatcgaaagcttttgacataatcaagcttcatagcagcaactcctttgcgaaccagatgttctcagtttaattccatggattaattcaaaggccacaagtatattgtcagtgatgagacggtttggtaaaaaggcactttgggtctctgagataacaagaggcagaactggtttaaaccggcctaccaacactgtggtgatgagcttagagattacgttacatagagcaatgggtcgataatctttgacaaagagtagtttcttcttctttggtataagcgtgatcatcgttgagtttaaaggtg

SEQ ID NO: 103772 - DNA, 818 bp, Cannabis sativa
  modified_base (487)..(492): a, c, t, g, unknown or other
tattatgagttaaccagttaataagtgggattatgatcctactaatctagttcaatataaaattttaaatttgttataagtggataaataagcgtaatttttaaattacgaagattttattgaatgtgtgaatgtaatatgaactatatgtggaataaaaatattttcaagtttggcgaccttggaaactcgatcgggggccagaaatatcataacaagcttaattgatagaattaataggaatattgtgataagttgataatgtcggtattagaataattaggagtatgtaagatttattgtagcgccttcaaagtagaagtttcttagtagctaagaaatgataagataattattaataataaattttttattaatattattatattattaacttaaacaaaaagtaaaacacgttctctttatatatataatatattaagttatgttatatgttataaagctaattttacttcgagcaacaaannnnnnccaattttgagtttcttggtcgggttatttgggtcgatttctatctcttccaattcttccattggcccctacatttgtatttggttccccaagtcagggatacacatcctcgtccctgccttgggcgacttcctattgggcaatactcttccccttgcctgaactctagttggaggaattttcctttttggccttggttagggcaacgttatagcattcccgtgcaatttgttgattccctttgaggcaccctaccccattcctcattgggaacttgacgaacaaatggaaaactgatgtgatagctttcaggttatataaggctg

SEQ ID NO: 103773 - DNA, 619 bp, Cannabis sativa
ctacaagatctaaaatcaacggtagaaaataagttccctaccgatagggaacttttgctagcacttaccatagtattaccttataattttattagcataataaaaatatttgaatgtatgtatataattttattggcctgctatatatagttttgattattatttttatatattttgattgtatgattatttattttaaataatacttaattagtttttattttattatatacaatggtagtatataattttgttatcatggtaatatattttatttgcggtatataatttggttagtatcgtatacatatatatagatattagtaatatatagtttaattattattattttttgtatatatattttgatgaatgggatatgtatttttttattatacggtatataatttttttaaaataatatttaagttctatttttttgtacttttgttgacatgatatataattttattagcatcctatataattttatatttatgtattgttattagtatatattcttattgtaaggtatatattttctgttatatggtatataagttttattgtattgtatatcattttattttagataatacatgtttagtttttatttatt

SEQ ID NO: 103774 - DNA, 1419 bp, Cannabis sativa
tgggatttcttctagagttataccttctatcaagaagtcagctaaagcttggcccttgatggatgttcaaggattgtatgttatgtcgagctgctccagttcaatcgatcattttatcaatcttccagaagcatttggttttgataaaacatgtctcaagggctgatcggttaacacttttatggggtgagcctgaaagtatggccgtagcttacgagacacatggactaggcacaacgcaagtttttctagagggggatatctggattctgcccctaataaccttttacttacgtagtaaataggttgcttgtgcttgccctattctcgcactatagttgccctaatcgcatcttctgagatggctaaatagagaaacatgtctctcccgttattggttttgccaaaacgggaggcgttgcaagatgcctttttatgttctgaaaggcctctttgcactcttttgtccactcaaattttttgttgcctcacaatatgttgaagaatgacacacacttatcagttgacttagaaataaacctgttaagtgtcgccattcttcctgtcagggcttgtcttccttaggctttgtcggtgatgacatgtctattaatgccttgatttttttaggatttgcctcaatacccctcgcgttaactatgaatcctaaaaactttcctgaggagctctaaaggaacatatttttgggtttagcttcatgttatacttttttaacattttaaagcattctgggaggtctgtggtatgatccttactctttatcgatttcaccaacatatcattgacataaacctccatgtttcgccctatttggtttgcaaacatttcgtttactagttgctcatacgttgccccaacgttcttcagcccaaacggcatgactttatgacaatagagtctcatgttggttacgaagcttgtatattcttgatctgggacatacatttttatctggttatatctagaatatgcgtccataaatgacataagctcgtgcccagcagttgcatccgctaactggtcgatcctgggaagtggaaaacagtcttttaggcacgccttattcagataggagaagtcaatataagttctccaagttccattgggctttgagacgagaacacgattggctatctacgagggataaaacacctcgtgtataaagtcgttggctaacaacttgtcaacctcctgttttagtgccccttgcctctcagaatccaagggcctccttttttgtctcttcgctgggtaacttggatcaacatttaatgatgacaaataatattagggttgatccctatcatatctccatggctctaggcgaactgaacctggtttgccttcaaaaggcttattagttgctatttaagctgttcatccaggttcttcccaatg

SEQ ID NO: 103775 - DNA, 568 bp, Cannabis sativa
gcaagcaagaagaatatgatcaacataaaccaacaataaatttattaagagtaaaataaaaaagtagttgaaaagtatcattgatagcttcttctttgtatcttatggaaacataaataggttcacaaacaaacaaaagatgaaatattatcattttattattttattatttgttaataattgaatcatattactttgtagtgttattctttgttaaatggtttctagtgttattatttgttaatgtttatttgaactattaactgtaatgtgtgtatatattgtttcggttaatattaataaaaaaaacttattttttcattgctttgtgtatgatttaaaatagtacattgcttgggtaaaattacatttctttgggaaaaataaaaaaaggcattaaaatatttattttctttcctgaaacaaatctcatcaattatttggagctaggttagtgtttagttagttttaattttaaaaagtctctcttacatgtaaatcaactgttcggcctcgtaaaatagattttatgaaaaaatggtgcagaaaagattattaagacgttaga

SEQ ID NO: 103776 - DNA, 708 bp, Cannabis sativa
  modified_base (437)..(441): a, c, t, g, unknown or other
aacccgaacctagacttggacccaaacccacacaataaccgagacctagaccaagaataaggatagggacctgggaaacagaactaggaccggcacctagtactcgaacgaaacccaaacttgaacctaggaccgagctcgtgacctggcaccggaaatggaacaagactgggacccgagattgggatctggatctggaactagggcttggagaaaaccgtactcggtgtttagatttgggacccagccctggacccgaaccttgacaaggacccaaacacacactcggaccttaacccgtcataaacccaaaagtggacctgaacccgtacactgtgaccaaaaattggaactaaaaacagaagttgactgggactggaactaggacttggacatggaatcataactgaaattgaacctagatccaaaaccgtaannnnnccaggacccagactccaaatgagacctagacccgaattgggagccggacctggatcccaaccaaagcctggactcggtacccgaacctgaacctgaactcagactcaaacatggaactagactagagacaaagaactagggtcgggatatagaactgcaccccagccttgatgccaaaccaaaactcagaaatgcgacatgggttctgaaatagaaccatacgtagacccatgacagtgatccagatcttgactcgggatacgtgta

SEQ ID NO: 103777 - DNA, 1223 bp, Cannabis sativa
  modified_base (1175)..(1180): a, c, t, g, unknown or other
tgtttttaatttatgtttcagtattttaggaactgatttcccctttattttttaattgtaattggtttaaattattgtgtgttacttgtttgcatttatgttatataacccattctattttagtgataatcggttttgagttatttcgtgtcattaatttttattcattataacactattgtagaaccggttctattttaattataactggtttaaattattttgtgttatttatttttattcattatgctacagaactggttatattttaattataaccgatttgagttatttcgtgttatttatttttattcataatgttatagaaccggttttatttttattatatccgagacatttgatccccactttttttttaaaaaaattataaccggttttatgagatattatgtgttaagaagtattttattgtgaaactaattttgtttttaatttatatttcagtgttttaggaactgatttcttctttgtttttaattgtaatcggcttgagttattgcgtgttacttgtttgtattcattatgttatataatcagttctattttagttataaccagtttgagttctttcgtgttatttattttttttcattataacactgttatagaaccggttctattttaattataactggtctgagttattttatgttatttatatttatttattatgttacagaaccggttatatttcaattataactggtttaagttattagtgtttattcacataaccagttatacttttatttatatctgaaacatttacttctggtgacttttccagtgacttttccggcgatgttgacttttttgttgacttttctggtgacgatgactttttcggtgacttttctgatgccggtgacttttccagtgccgacgacttttccggcaaaatttattgttgttttacaaatatgggatttctattttttttacaaaaatatggcataaaaaaaaccatatgaatgtaaaaaataataataaaaaaaaaactcatgaccctatagtattatttatttatgccataaaaaaataaactatacccttaattcccatatttatgaaaattccccttattttttttaattaatattttaggggaattacaccaaatactatttttttaacttttttttttttcaaatttnnnnnntgagtttctaaagtggttgcagggctaattgcaataggggttt

SEQ ID NO: 103778 - DNA, 519 bp, Cannabis sativa
tatacataataataataataatttcaagcaataactaataatattttttctttaattatttattgtatcatttttaaataaaatataaaatacttaccataaaattaagtatacgtgtctcgcacgtagttttctgctagtatatatatatgtattacaaaaatttatacatattttgctaatgagatatttggtaattttttataatttattgtagctatgtatatttgaaggtaacgtaaaaattactataaaataaaaattaaaaagttacgtacatgtatcttgatcaacaatattatataactagaaagtaaagtaacataaatgtaccttgatcgacatcctaaaataaattgaaaaataaaattatagcttagaaattgaaaagttaactaaacggaaaaattatatcgtgaaacaatttcattattaatttattcattttgtatatgaactaatttctaggaaaaagcaattaaggaaaaattaatggcagaaattaacttaaatggtatt

SEQ ID NO: 103779 - DNA, 517 bp, Cannabis sativa
aataaattccaacagttatatatgcttaaaaagttccaaagatgtaaaaaagacttgttagtcctaactaataagcacatcacaacaagtggacatatacaaatccacacatgtgggccccaacatcaaccacaactaaaaagtgtagagcaagagaattcaactctgttcacgatagaccttacttgccaatcaacttgagcaagagatttaactctactcaaggatgagtttgacaaatggatataactctactcaacactcaaaacataagcaagagattttaaaactccgtaaaagtttcaaatttaagaaagagaaataactccactctaaattaaaaaacttaagcaaaaagttttaaaccttgcaaaagtcccaaaatcgagcaagagacataactctactcgaatctcacattctaaggagaagccacgtgttttaaaactccacacatacaagtccaaggacattggtcatgcccatgcatacatcttcacaacaattaaggacattg

SEQ ID NO: 103780 - DNA, 3695 bp, Cannabis sativa
taaacaatcaaataatggtatgtatgtattttaaagtgataatttatatgagacttattgatagatgttttttataatcttagtgttagatagatgttttttataatcttagtgttacttttaaaaatagaacaaaaatatgttcactttgtggaataatactatatgaataaatataaaatttgcagtatatataatctcatgagatacatatagagaaaaaacatataatgaaagctttctaccctaaacaaaacaacaacagtaaaaacaaaaagaaacttctaaatttatatataccttagaaatggcaattgtcatctaaagtctcaaaaattgttatgcttatggtagttcatccttacacaaaaaatttagtcttttcttctatatatgatacaattatgatataaattttaataaaaagagttcctagacatataccctatttctttttgaaagaaaaaatcaacttaaaaagtggtctagaattaattttaaactaaaataattagttagaattatatggctcaaaaagtgttagggatattttttaaaatgcttagccatattttaattaaaattttaaatataaatttattatatatgtaagttatgtgagtatagggacttaaataaaaaaagggtaaatataatatattaaaaaaaaaattgatatgtagtttataaataataacgaatactaatcatctagcaaaaaaaaaaaaaattattactaagcaattaaaaagataaagggaaacatattatattttactaaaaattttcttcctaataacatgaaaatggatctcggtaattatgcttatatattatctcttcatattaaatttggtaaaaaagaaaacaataaataatgctagctttaccaatatttgacattttttattgtactccatcaaactttgaaattttattggattgggctaagtgaagtatttgaaaggtttctttccactcaccaatttaggatagattgataaaatacccgaagtatgatcaaaaagacctttattgagaaagacagcttcagcaaattcatatttgtgaatccatgcttcattggccaagatccgatctatcttcgaaaaaattttgtcatccccatgctgcttatttgtccaagtgaaaaaattcacacttgatttgatatcttccaactgacagtagttaacacattgaaggaattcagtgtcaggataagtcttcgccctaagtcctatcctttcttctttagccaaaatgtcatcgaagtcccccattaacacccaatttccacctgttctcaagtcacataaatctttccataaaatttttcttgtagctcagttattagaagcatagaccatggttacaaagttgtcaaacccttcaacagttgtcatccttaaatgcattaattgactagtgcatttaagaatgtcaactgtaaatctccaagggttccatgctataactatcttaccacctgcatgccacgctatattagtagagaagcatcaattttcaaacacattcgagtataaggttccaacttttgcagccttaactcttatttcgagaagcccaacaaaatcaactctttggatgttgataaagtgctttatcaattgttggttatgttgattgttggctcctcgaacgttcaagcaaagtaacttatccattagacagagagggttctcccccctctcctgtcttgactatctcagtaggcatgttctcttctgcattttttgtgatttcttcttcttcaagtgcctgaaaagagttcttcattatcgtaccagtagtctcagttgctcccttctctcggttagcagtacttttcctcctatagactttggtaaagccctcttcatctacctgtggctacttcctattgtcttttttaataatccattgctcctgtcctactgctttcttcttacattctgctgctgcagcatgacctacaccagaacagtgtgtgcaagatattggcttccattcatatttgactcctaccgaagtaatcgaacaaaattcattttcaaattctaaaaatgctggtaggttttgatccatctaaacttcaattaacactcgagggaagtttaatctctccctttctttagtcacattatccaccatgattggcttccccatctgaccaactatcttaaaaagtgacttgtggccccaatatttcaattccaatttttccaattggatccagataggcacactcttcatatcatcctttttgaacgactcatttggatcccaaggcttcattactactggccttctattaaaaaatgtgaagcccccattcaagacttgatccctgtcctcaattgagtgaaaacgaataatgaatatgccataggataacaccttcactctgccaactttaccctactagattctatgaacaaaaccatctaaaatatatacagaggagggtttactcctaacaggataacaccttcactctgtcaactttaccctgccagattctatgaacaaaaccatttaaaatatgcagaacagagtttactcctaacacataacagacaatcgatggcttccaaaaagagatctcatcttcaatatcatctaaagtaatcctcactttattctccttattctcagtgttcataaaagaattctcaagattacgcacaacagaatttgatcgtaaaacaggtggaattgagtttatacctgctgcaatgtcactattacattgcctattcgtctggaggaagtgaacaaaatcactccgaacttcatcttgcctctgaatcgcctccagtgaagacttcagtgagagaggagcaaaaacatccctcagagctggaacatcttctgccagatcttcctcgtccgaaacctccagagcatcaatttctgagatctggtctatcgaaactgatggaatcgtatccgccgttgatttccccactttcttcttcaaaatattagtggcagttttaggttttccatgaatttttgaccttgttttagccatggcaccagctggttcagctgcaagagcaagaacccacggagaacccttatgaataaaaaaattgacacagtaaaattttcaagtcattctttcaaattgtactcattcaacttcagcttgtaaataaaatttatcccacaaagcctttgaatctctatagaacattgatgtttggagtacaacttgttaactaatttatttgctgatgtgtttagtaatatttcagctacttcattaaataagaccaaaattatttcgacaattttgtcattgactttgatatgtattttgatcttatataaaaaaaatagaaaaaaaagagcaaaaattaaagttaatacaaataacataataaattattattttgagaaaaccgaatacaaatttcttacttcacaataggatattcaaattattttttgcaagggccataccaataaatatcatatttatctacatctattctcaagcaagatttgcatgagatataatatcatccaaatgtattatctatgcttataatttttgctctcatcgtaactatatattcctggagtaaaacaattatcataaagtaaaattataggtattgaaaattttaaataatagtaatagtaataataataatactaaatgatatcttttttttttaaaaaaa

SEQ ID NO: 103781 - DNA, 539 bp, Cannabis sativa
gaatgatttgaaatgtggtttaagaaagagggggtgctgaggatgaaaatggtaattgatttgctttggtagcttttcacatgatttgtggacgtaatagtcacacaaatcacaaacataataataaggatcatcagcttcactaaaagacaccacacacatttcacaaacattattataactgctcttcttatcatcttttaggagcataatatgattactgggacagaagcgttgagtctccatttttgatctatataattgaaacaataataaaaaaattcattaatagctcaactataatatatatatataaattagaagcaaataataattttatataaattacatacgaggaactgaataaaaaactaaaggcttactatattcagaacttcagcacccaacttgaaatcaaaaaataaataaatcactccaaagagcttaattttaatttgtatagagaagagagtacactaattttgcttttaattttttttgagttatttcttttgctcagatttgtagtccctttgtat

SEQ ID NO: 103782 - DNA, 851 bp, Cannabis sativa
  modified_base (146)..(168): a, c, t, g, unknown or other
agtatgtaatacaaaagttgtcacctaacgactatacaaaatgtaaccagctttcccaaagattgtacgctccaagtctaaccgccccgacatgtacaatcttcatctgctcgctctcacgattgctcaaccttagccttgccctnnnnnnnnnnnnnnnnnnnnnnntgtgagtcgacagactcagtattaaaagcataatgataatcatatatatatcctggattataattaggtgcccatacacccaactataaccctatccccatgtccaacacggtactgagtctagaatgtttatacggcaatactattgatcataagatcagcctatactcggtactctagtcatactctagtctaccgatgtgatagagttgatcttgtacttgagccaaacatacatctatcggtatccagtacaactctacgtatactgataccactatcaatgtaatgtaataggcttaataaatatgtacgctaaatatgtatatacatgtgcatatcattatactaatcttacctcattttctaattcaggtgtgtcggtcaacctgagtggaattgctcctcgacgatttacatgcccctaaatcacaatattcgtaaaactggtgagtgacacgctaattcacttttcgaggacttaaaattgaaactagaagttttcatatcgatagacaacatagcaataccctaaatatagaaaaaatgggaaaaattagggttccctaaactttcccaacccgtagacaggttccccaatcggaagtccagtcctgtggggtttcctagggaccaacccaaattccgattcctacaggtcccactgaaccggtcaaccggtt

SEQ ID NO: 103783 - DNA, 749 bp, Cannabis sativa
catccatctcgctataggaaggcttactcttggtaagctccagcttgctgccagggttattgttgctattgagaacccccaggacatgattgtccaatctacaaggccttataatccaagagcagttcttaaatttgctcaatacactggtgctcatgccattgctggaagacttatgaacaaatcaagttataatatattaggcgagacaccttagcgagacacattttacagcgtgtcttaatccacgtcagtgttgaccctttaaaagcgattcaaatcacatctgtgtgattgtcaaataataattgcatttatttacgtggagcataattatagcccacgatttcaggaaaatatcattgtgcgattcaaatttgaatgtaattaattgtcaacctatattattataattaggggcggaatgtctgaaaaaagggatggagaattcttgagagaaaaaaaagtacactgagtgtaaagaaccctagttctgtatcagaaaaatcagaataagattgactcatggactatgtagagttaactgcaaaactacgtaaaaacccggtgttacttttgtttctgtcattcttccttaaatatttgataatttctatgctaaacctattacgaaaataggctcatattcattaacgaaaatctggatgaacaaaaatattattgtttaaatatctataaaaatatctaggttaatttcaaaatttattaattatttaaatcatcttata

SEQ ID NO: 103784 - DNA, 660 bp, Cannabis sativa
ttgtcgacaaaatatcgatactatatcgataatttgtcgacaacatgcaaaagaaatgaaacgacatacatatttttcgatacgatgtcgacgttacatcgatagcttatcgataatacacgtgtctgacatgcaatgtggcggttgggaagagttgttgggaacgtaggtaaaatttattaacattaaatgtgtatccgtacaaatgaaaagcatgcaatgtgtatttgtcgagtgaatatcgatacaatgtcgatagcttgttgatagttgaatggattaattaccattgtacacgtgtctgacatgcaaattgtgttgtggagtctatgtcgatagtatgtcgagatgtgtcgattatatatcgatgaggactgccaccctcatgtttgataatgttatcgacataatgtcgatagtatgtctattatttgtagaaaaataaacaaaataaaataagaacaagaggccatatgacactaaagttgacgatttctaaattttccatagagattgattggtgaatatagcttagagaaaaataaaaagattgctcactaattgtgaaaaattcaagaacaagtttcattccaattttgattactccaagtgtgtgtgtgaaatgccttttctcaaaagtttgcttgcaatttagatcaa

SEQ ID NO: 103785 - DNA, 4233 bp, Cannabis sativa
gattgaaaaataaaaaattcaacataaaataataacaaaattaatatgtaattgaagaaaattaacatatacatattaattgttatacaaattatagatcttaaatcatatatagttagcaatttgataccacatgttagaaaaattaataataaatcaagatacaatttgtatataatatagacacaataataatatataataattagggcatgcgtactgattgatccataacaattaccacattgatattgcaatactatcaactaagtcattctaaatcagaagctattttatttatctagttatcaaaagtatacaattgtgatgagtcaatatgtatttatagagatagggagaggaattagctatataaccctagttggattgggctgctcatcaaaggttttagttaactagaaaagcccacacttctccttcaactagactttacacacaaatgttaagcccatcaattattgagcactaataatatagacttacacagcaaaaaattatcaaatcaatccaatttttaataaaacaataaaaatttaggggtttttacataaatattaaattttagacaaaaatttataattttactattacacagaattttttacaaaaatactatttttttttttataaaacaaccgtaaaataacgaaacagaacaactaaaagacaatcgtggaacaaccgtgaaaacttaacacattacacagtattttttttttaaaatctgccccatagtgaaaaagagaaaaaattaaaaattttaatatgcggtgtaaaaattccaaaaatttaaaccccaataaaagtctgacaactatttggtaactaataaagaatactatttggtaattatcttgaatgcaaatttagtaacttctttgatttttataagattggggtaattttattatttttctttctattttataatttctttgaggcataataattatattattttcaataataattatatatttaagtataatatttagtttgttattaaaattcttatgtcagttataaatcttttttaataaactttatttggggtgaatatgttagtaacaaatttaaaagattctttacataaaggaatttatcattatgttaagtacatgctctttgtataattgtgttaaatccccaaaaatcaatgtgtggaagcccataaagttgaaagtcaaagcccatgtgatgtgaagtttgacctctccttgaaataccatttagctttagccctatctctgtcctttgctatacttttcatttcaccaccccaactaaaattttgtaggcacatcagaactgccatacccacaatcaagttcttcactctattgtattctctcttctggtttcaaaaaagattaatggtctaatgctgttctcacccatcattctttttcttaattttgttttctttaaataaataattaaataaatgtgttataatatgatttgctagtaactaagatgatatattatttaattagtttttgggggcataatatatgaatggagatttgtattttaaatgagtttggatgtacttggtttgaacttgtcgttgtgtatgggttttatggtgggtatggctgcaattagtattataattagtgattagtttaattattattataaaatttgtgtagggaatcaatgcatgtgtgtgtggggacacaacacaagtaaaatccatctaaaataattagtttctttaaatattatttattaagtaatagcagacactttatgacctagctaatatatcatctcacaaactcagttcaacaatcttatctaaactaattctcatattagacatagccgttttttttcttatggtaggggaacccaaaagtcttactaaatttaccaacttgaaaatcatcttttttttttttttttggataaatgaataaataaaccatatatacagcataattaaccttatttacacatgttagaattcaaacatttattgttatcaatcacattaaggcttctgattcctctgcaggaatgagtaaccttgttattagaagtatagcatggtcaagttttttttttttaattcccaacaaaaacccaaaagattaaaaaataaataaagaaaaagaaaataccaataaacaaatgagttaataggatatggttctgacatataatcatgagcttttatgatagtctgctaaacagagtgaaagtacaattaatcccaagaatggttttcccactagtgataaggttataacttttttttattgttttaataaaactgttgattttgcatattgtttagtaaatattacctttttctactttttagaattttttaaactaagaaaacaaaaatgtatgtgattaaaataatccttgtcaactatattttacctctgcttttaatgtgtaaaatgatttatttatttttgttaattaaagaagctgatatgatgccatgatggggtaaattagtatttggggaacaattaattaagggcatttattttttatttgtttttggaggagggggacagtgattgagccaaaaataaaataatcttttcaactgggttaatggggcatgaattaatttttttgttgactgatttaatataaaaaattacaaaagtaacaaaaagttagggtcctactcaagccccccaaatgaacttcatttataatttagctcgggcctctagagggggtggtggtggttgagatgctctaaagaatgagtttatttggtgttaattaattatagtaaaagattaatagtaaaagatatcagtggtgtttagtactatctgaagtgatattgctattgatataattaaacatcgagtctcatataatattttttttgacgtagtgattaaaatcactcatgaatttacgatgcgaaaatctacaaacagcacagaaatctcctcaaatcaagatagctcatataatttaattaaataattatcataaaatatcgctaactatttataagacactgcctctaaatggtgctatagcaatgtacataaaaaaaaatgataaaagacactagtaaggtccaacactactacaatgtgatatataataattagtgtaataatgattaaatattaaatttcacatatttttatttaacaattaaaattacacgatatcgtgaatattattttatgatggtaccaaacaccactagcgtctaatagcaatgctttaattataatttgaaaatatttttacttttgacgtagcttttttttccttctctttgtatatatgtatgtgctcctcttttgtgaatctgattagacacctctaatcaaaatctgttaagagaaacccttattagaatctcaaacagttcatttaagggcagaggctctctcccaaaattaaaagtaatgatgtaaatgaggcaagaaagttgactatcatttcccactataaagcaaaagttaataatatgtaattatttcaaagatggggtacaaataagagcagcatttcaaccagacaaaccttttgataattgatgggttaaatggggtttcaaacacacctttcttataatgttgccttcttgttaaagtcaattccctctctctttatctctctcaatttacaacatattcttaattactctcttttgaaacttaacacataaatcaaagagagttacattagctatttttttttatgtacaatttatatatgtcttgctaaaaaacccattaaaataaattaatgcttttgaagggattagaagggtatgaataggattgtttaacctattaatgattgttattgagatcttaagcttccacatatagtaagcaaatgtcatgatatgctcatgtttccatcatctattatcactcattgctttgtgtgtgacaagataattaagttttgttgtgatttaactcatgaagaaaccatgtgcttatgttcccaactagcaattaatgggccaattgagtaggatacattaaggtcatctcaaatgtaatcttttattccataaccaattaggttttagttttcatggccaagacaatgtggcttgttttcttgccctaattctttttttaattctctttacactttgcttctacctctcctctacacacaagagatatagcaattaacaataattaaaaggcccattaatattattatatcacacttttaattaattaaatatat

SEQ ID NO: 103786 - DNA, 501 bp, Cannabis sativa
agagattcaggcgaagcccgggaggggtatgcccgaacagtatagcacgagcaagaagaagtagtcctggccgtagaagggaggaagccgaagatcccatgatcgggggaacccaccataacatttaatgatgaagatattgtcaagatcagatttccgcacaacgacccgttggtcgtggaatccagatagccaacaagatggtagccagaaccatgatagataatcgagcctcttccaacatcttattcaagatcacatatgaaaagatggggctccaactcgaagatttaacccctgtctttagcccatgtatggtttctttggccaaggagtcgcacctctagggaaaatttgcctacccctcactgttggacaagctcacaccagcttaagtataatggcccaattttttgtattagacattccatcagcctttaacgtcatattaggccgaccaactttgtatgacttaaaggctgttacgttgatattccattc

SEQ ID NO: 103787 - DNA, 1036 bp, Cannabis sativa
gtaatgggttttatttagggcacaaaacccaacactttcttgatagacttttcaggaggcttatcttcagaagtctcttctttggcttttactgtttcttcaacctcaggaccggttgacttgtcttctacacccccattaagtactttaccactcttcagtgagatggcattacattgttgtttcggattaacaactgtatactagggaaactactatttttttgcaaagcactcacaacattggccagttgtcccacttgcccctctatgctcttcatggaagcatccatgttagaaaaatgagtttctatgttgtccaaccttgcttcattcttgttaaacctcttgttgggttctatcataaaagtacccaaaatatcttctaatgatttcttttcaagttgttgttaggcattaaatccaggaggtggttgcaagacatttttagtgttaccataagaaagattctcatggtttctcaaccccggatggtagtagttaggcattggattttctcagtagttgttattgtaaggttatttgccatatactgtgcttgttctatactcatctcaggcccttgtggtgtagatgcagcaacaacaatctctatagttgatgtattcttctgattaactaaggctgccacttgattagataaagcaaaaaatttgagctgctatatttatcataggatctacttcatgtaacccagccacatttttgtgagtatttctttcattagtccaattatagctattagtggctatcttttccagtaaattaatggcttcagttgcaagtttagacaataacgctcctccagtagcagcaacatcaataatagtcctagttgacccattcaacccattgtagaaaattgaaacttgtatccaactctcatagccatattgtgagcagcgacacaataagtctttgaattgcttccatgcttcataaagttgctctaaatcaagctgtctgaattgcccaatctcacttagatcggaagagcgtcgtgtagggaaagagtg

SEQ ID NO: 103788 - DNA, 563 bp, Cannabis sativa
tgatagtcccaaactcatcactctaatttttcaagaaccatttggttccaatgatgttcagaaaaggtggtcttggaatcattttccagactttgtttcgaacaaactgatgtagctcatcctgcatagcaagaaaccaatattcatccattagtgcttcttttactgattttggctctaaagaagaaacaaaacataaaaattgaattatattagcatattttcttcttgtaaccatgctctcatctaagtttccaaggatgagatctgaaggatgattctttttaaccctggaggatggttccctctaaattggatcagtgatggaatttgaagaatgctcggattcttttgttgttgaagtttctgtagcaacagagtcctgcactgtagcctcggcagcagctttagtagcttcgttaggttcctttttccttgacaacaggcttttccaacaagtcttcaagctgttcttttgttgaaaactgagacaaatcttttagataatcaacaataacattagcagattccataacagttctcatgttatacacacgatatgc

SEQ ID NO: 103789 - DNA, 807 bp, Cannabis sativa
tttaatattaaaaagtaaccaatcaaaaataaccgatccaatctgcacttttacagattgaatttgagctattgtgcgaattggattggatctaaaaaatagaatccgcatttagtgcggaccggatcggatgcactataaataaaatagtgcggattggattggatgaacacccctatatatatctttataaagaagaaacataagacagttctatgagttctattctaatttatcttttttcttattttttacattatttatttactttttaaaattttattgatttcactctttagtgagttattttaaaaaagtttccacattatttagaaatgaatgtggtgttccacttagagactatttatagattattatttctttcactttagtttgtgcaaaattaatattacataattttgtacgtgtaactgataattcttatttaatttattataatttttagataaatagaaggtatatttttgattttttcaaattttatcaaaacttgagtttctttaattattttaacaaacaaaaaaattattaaatttcgattattttaattttttaaattatatttttttattatttaaaacatatatttataaagtaaaacacaatttatataaacatgtcattattagtctgcttaatttttatcatttaattagatttttatgctaaaacttaatattttatataaaattaaaaaattacaaaataataacaaataaaaaaaattatcaataatctatatagatatatacttatataaaagattaaatataaaatgatgatgtt

SEQ ID NO: 103790 - DNA, 664 bp, Cannabis sativa
aacacatataaatttatagaaaactttacattggtggcagcggaatataatgtctatttccgtttagatctttaacccttgatcctttctgtcgcagagtatgatcaagctctaaacttggatcttcttccgttgttggaattcttcacagtcttccacaaagacctgagtattggcttgaattgtgtgggtaattccttctgagtattggcttgaattgtgtgggcaattccttaattcactatagggcattcgaaaataagaagaagaaaggaggattttgaaatttgagaggcactctctttattatctaaattgtctaacgaagtgaaaactaggttaagttatcaggttagaaaataagagacatctctttctatttataggatttcatctaagattagaattagaattatatgtaactaaaaaaagataaaataatagcttaataatcccttaagtggatgaaccctatgtgggccctacatgtttcaatttagtcattttatttaagaacttatattttcttttacaaatactataatttaattctagctctctaaatgtcaaatccatctatttaataattataattaatcatcaaataaaattaccatttaacttatttattaattagaccttacaaagtctcttaatcaataaa

SEQ ID NO: 103791 - DNA, 975 bp, Cannabis sativa
aactatgggggcaacacctagcaccgcatccattgatttggttttcctaacatcaaaaatagaattaggacctttcttcttcaccggcttcatcagatttcccttcccacgccctctacctcttgtcttcgccatggctccagcacttgctgcaaggagtcgagagagagagagagagagagagaaagtttattctttatttctaattgatcaatatttctaaaacccaaaccttcgaagtcttttgtcaaacaaagttgcttagcaacaagacctgcaacatccaaaaaataagagattttccacaagaaaggtttacaaatactattaatcttctctaaaatgtatttaggaattatcattaattgtgcctaataaatgtgaacaaccatcaaagtagaattgattatagttaatcctaccagccatcttttaaataatactatcacactcaatttttatttttttgagcaaataggaattttgaggtacctaaaaggcaagctgctcttgacaaaacatgaactctccaaaatgaattgctcatatgtcctatttatttcgtaacaataaaaaatcgtactactattattagcatgtaatcctaatatatctgaaaacctatttaaagttctagcgagggtcattatagaagcagtagtccctcttgagaacatcaacaagtcatcaataaaacataaatgatttaacttcaaattcttacacctatgatgatgcttagactcactcctcttcgaaactttggttaacagatgagaaaggtactctattcccagtacgaataacaaatgaggcatgagatccctgcctaagacctttttttgaactaaagtagagattttaatgagtcaataactataagagagaatttttgggtagtgaaacattccataaccaattcgatgaacaaattaggataatgcaaggttgtcaacatttctcttatgaatcctc

SEQ ID NO: 103792 - DNA, 710 bp, Cannabis sativa
agttgttaatacaactaataagaaaaaggctgctaatcccaatgcaaagcaaaaaggaaagtgtttcgattgcaacgaaaagggacactagaaacccagtgtcctaagtttttggcaaagaaataaggtatttctatctatgttataaactcatgtgttttagagaattattatccccttgggttattaattctagatctattaaccatgtttattttcttcttatttcagctccaattgcttaaacttggattgctatcctagcgagttgagtcagatggttggacagaagggtaaagattgtccaagtgaagatgaagctcaattcttcttttaatttttgatttaattgtttcagtttcaattattggtttgggattttattccctatttcatattattacagacaattcattatgacctttttgagattatttaataaaattttctctttaagaaattctcattatgaattgtatttatgaattgagatttatggttactttatcttgtgtatgtcattaccaattatatttatatgttatcatgtttgtatctgtttgtgttttattattgaagcaaaatctatgatatattattctttataaagagataataccacataaacactttgaattaaaatttaatgtttatgaataattgttaattcttaagcaattattaagattttgtttaatataaagatcttt

SEQ ID NO: 103793 - DNA, 728 bp, Cannabis sativa
ttccaattaccactaaagattagtataaatgaattaaaattaaaataattgtgagtgaataggggtgattagataaaaagtttggtaaggtagaaatatagttatgcaaatcctattttaatactgatattaatttaaaatacagttgtaattctacaccattaattacaactggaagatatatatgttatgagcacaaattaaataatcttgaataaatttaatctcacttctaatttcacagcatatcatattatatgtcataactcgataaaatatcactattggcagaatgcagtaaacaacatacaatataataaagtaccaaaataattaataacctaacttacataagaaaagtatgattgaacttatataaaagatactattaaatttgaaagaaaaattagaagatgaagagcaatttaataaataagatatggagatgaagcacaaaagaattaatacaatattgagaataaaaagtataatagctacactctaacctcaccaatattactactctagttcactcatttttgtcacagaaaattagtgaaactaaaatagcaacaaatgaaaaataaccaagcaacaaagtatattttttctactacaaaatccaatgccctttacattggatttggctctttttataaacccaatgtaaccttaaactggggtacaattacatatagcacttagagggaagcatggctaaaagatat

SEQ ID NO: 103794 - DNA, 1488 bp, Cannabis sativa
  modified_base (172)..(181): a, c, t, g, unknown or other
tttttaaacgagtgaagtgtcgcatgctgtaaatgagttagggttttgagggtttagttttatttatatatttttaaaagttaacgggaggatcaaacttgtgttaaatttaacagaatattcttttatttgtaaagtatattctgttaaaccaagaaatgccgttagatannnnnnnnnnatatataaagatatatatatacaaacttttttttttctcttggtggattaggtaaacatatatacatgcagtgatctctgaagggagagaaagaaacatgattatttctaatttgattggagaaagtagaaaacgtagatatgtattaattcttaactagcaatggtgtagaatttatgtattttttaaaaatgtgtaaaatttattgcataaaataaagtttaatagtacttttttttttttgaaagtgatattatgttttttttattttatgaatttattcaaataaactagcattttgagtacaaaagatgttggaattcagcactaatgaaaacttagaaatgctacaactagggtaaagttgtgaatgtctagcaacatgatgtgctactcgatttgttgatcattttatccaagataacttgacattagaaagggtaaataaaagtatttgacagtccttgataagaaggccaaaggtggatctcatggagtgagtgcttcgaatggcttatatagaaacaagattgtctgtctcaatctcaacaaagcgccaattattagcctggacccagctgagggcttccttaattcccaattacctcaatgactttaggtgcataaagactgccaaaactaccagcgcgggctgcaattacattaccaaaatgattccgggcaactagaccaaagccatacttgttctcactatcaaaaagccatgcatccacgttaatcttgattgtgtttttactaggtttagtccaagtctcagagtcatcaccgatgctattcagacacaatgatgacaatagagttttatcttgagctttaatccaatgatcaagagctgtttgggcagatgcaagaacatttgattattaaaaagaaaaaaaatatttgtttatttattattttaaattattttataatattaaaattattaaaatgatttgggccaataaaattatgtcacgtatacatatgtgtacacagtaacaattctagttgacatttaacagcaaagtttaataggtgtattagatttgcaaacagaataatactaaatgggagttttgccaccaaaaataaagattaggagttatgtgtataacaattaaaatataaggggtttactgcaaatttctttattaaatgtactaactatttaattttttaataaataaaaaattaattaacgtattaaattttaattggtttaacactgacaccactttttaaccggcgacataaagagaagatgtaatttatcctgaagaaaaaaaaatcttattgaattacca

SEQ ID NO: 103795 - DNA, 1101 bp, Cannabis sativa
actttaaaaactaaagttactattttggaccctgtgttttggaaaaagttaacgattggactttctgttttgtcaaatgataaaatagatcttgtattttttttatataaccagcttgaagacaatctctagcacgaacagatgcagaaaatgtaactacttttgtcataacacatctagatcagaatattattaagttttactttgacataaaatcagttcaaaatcttatttgcaccattttagaaaatacaaattgaatagatggtccaatcgaaaactttaacaaaacacagggtccaaaatttagtaaggttcaaaaaaataaaaacatatgtagcccataattgtattagcaagcttgtatttgtatacacaatgtccaaagtccaaacaaatcagtaaagcaatgaagatgactccactcctttcatgaggcttaaaatatttgcagatgtaaatgaaacaacccaaataaaatgcaaaaagatgaatttaaaggaagaaaaataaaaacctgggtaggaaaagaaccagaggacgatggcgcaaaaaataaggagtagaggtataaggtggatggcattatgtgcggatttgatacgagactgctctctcatggcagcttgtgagaggggatcgtaggtggggaggcactgctgcggctccggttccaaatcatcaaaggtagtatctccatacgtagtagtagtggtagtagttaagaggtaatcaaattttctgatgaggatagtcttgaagcccttgaagaagatctctgcatcgtaattttgaacaatgcctcctctcgtcctccctcttcttccttactccgtctcccccacaccccactctttctctcttatttacacttcaacacaaaaaaaaaaaagaaaatgagaaaatacgaaattatacatctttatgtcaccatacaaattaaagagacatactctcaatcacactaaccactatacaatcaaaatatgtacaatcaagaaaatatacagaaactatgtaaggggccatcatccaaattgacaatcacattcaaaaagaaagatgagaaaggtgggtaattagttctttgttatttcattg

SEQ ID NO: 103796 - DNA, 866 bp, Cannabis sativa
tatatttaagatttatatcccacttacacacatgtatttgaatttgaattcagttgttgaattcagttatactgtttcatttggtccctaccaatacaacttcaatagctgcactttttgaaatactgatcaaagttaaaattccattgtagtgtcgcctgatatctatagtataggattttgtaaaaaatattcttcattactgtttctttaaaaatttaatgataatagaagcctatgagggctttggcaaagggaagatgacagtagtaatgtggaattgtagaacatgtaattattggctacttagaatagagaggagtcacctttgttttgaaaagaaggatttgtaattatcataatgagaaacacccaaacttcaagcttctttgctctttgcctttccagcttttgattgtttttagttaaatgaatgtattgttaaactacttttttttttctctctcactgatttcttgttatttatgcttgaaaatacttaatcctcttattaaatccaatttcatttgatctttttcttattttttgcttgtgtggaattttgtttccttcataagaaaaaaatgtctcacgcttctactttaaaacatcagaaaaaagtcatgatctaggcaaatttttggtgaagttaacagtactctgaggtcatatggtttatgtacatctttcaactggaaaacaattagcacagaattcaaagatgtcatattctgacttaatgtagagattggcatttttttcatccaatttagtttttttttaggttttctcataatctgattacaactcaacgtcataaggtagctcgcatgattatgcaagataatgctctggtttcttacttt

SEQ ID NO: 103797 - DNA, 690 bp, Cannabis sativa
  modified_base (210)..(212): a, c, t, g, unknown or other
  modified_base (623)..(658): a, c, t, g, unknown or other
aatcaacttcactgtgggagtgatgtattgctgacactcctttgaaataatctgttgtcaccaccattcgatgggatttcggagggcgttcacgctgggtgattgaggatgtttgaaagctatcttcaccgacttcattgtcagaaggatgggggacacttgtctaaaatcatgcggcatcacaccaatcaactgggtggttacgttggnnnattgaggatgtttgaaagctgtacgaaccgacttcactatggtagtgatgtaatgctgacactcatttgaaatcatccggtgtcaccaccattcgattggattttggcaggcgttcacgttgggtgattgaggatgtttgaaggccatcttgaccgacttcactgtcagaaggatgggggacactcgtctaaaatcatgtgccgtcacaatcatcaactgggtggttacgttggttaattgaggatgtttcaaagctgtacgaaccgacttcactgtcggagtgatgtactgcttattgaaagctcggtggtataggcccatgtccccatactagttgagaccatactccttgtaatactcagttaatgattttaatgaatcaatgataattctaaaattagattatgtcnnnnnnnnnnnnnnnnnnnnnnnnnnnnnnnnnnnntgaagaaaagagattctagggcttatttatta

SEQ ID NO: 103798 - DNA, 796 bp, Cannabis sativa
actcgcatttgatctgcattaagtgtgaattttatattttcacaagtacatattggatcagttattttaaattagttactttttcaatgttaaattatttaatatttattaatttttttttcgcataactaataacaaaaaaaatattattgttttatgtttctaacaataaattaatataaataaaataaaaaattcaaattcaaattcaaataaagaaaaaaaaaaactatatgtagaagaaatatttaattttgttttaaaatatatgttaaaaaaattaattatatgtaataattgattatatatttaatatattaagttttcaaatatatttttattatacgtattagaattttaaattattttttttacattaaaatattgattgtatatataattttttttttaaattatgtggatttaattggatcgattatttttacatatcaatcaacattcaatacgtacaagtgcggattttaaatttttcaattcaatctgcacaagtgcagttatccacacttgtaaaaattacattgaattagattgaattgactattttataaacacccttaactattcagaatgattctgtctatactcttctttcttactctttcttccaaacttattgattccatctatgcttcttttttcttctcaccattttcaataaatttcttattctttcttccacttattgatttcatatatgcttttttttttcttctcaccattttcaataggctaattaagattttttctccagtaactttaacatgtactaaatcat

SEQ ID NO: 103799 - DNA, 787 bp, Cannabis sativa
tttttacataaattagaattctcttcttgtataataaatttttaaataattaattatttttaaatgatattaaattattttttataactagaagaactaagcatgtgtttttctattagagtttgaggttgcttcgttttttggagcagcttgactttattttttgagtaaatgactccttataaaaaaaaaataaataaataaaaagatggaggagtttagccatttttctttggaaaatacattcaacctatttcactttttaatttttaaatatttaaataaaaaaactaaataattaagtgtaataattttaaattaaagttataagtataataaaattttaattatgaaattatatgagtataattgtaaattataaagaattttactaaaaaaatttaataatttaagggcaaaaaaattgctaaatgatctttatttaataataaattacgaaaaattaattaacaattataatttaattttaaaatataattaatcttcattttataagaaaataaattattaggtgactattaagttataagttaattattatttatttttatttaatttttaaattaattacaaccattcaatgataatctaatagctaaaaaaataaaactatgatgattacatatttaatgtaacaattgaaacctcctccataaatatatatatcaaaagctgacaaataccgataaaaacaacccatctctattccaagccgtataagtctcacatatatatatatatattttgatttaagcgtttatatatt

SEQ ID NO: 103800 - DNA, 1218 bp, Cannabis sativa
  modified_base (1055)..(1070): a, c, t, g, unknown or other
tgattgtaccatttgtcggtttgatggagataatccatcataaaagtattttaccaatctccatttctcaaaaccatggtgtggacattttagcaataaatctttaaatctttccccacattcgtaaaattcttcgtgatctttttgataaaatttggagatttctctccaaatattatctgttttagacattggaaaaaatttggataaaaaattattaactaattcatcccaagtagaaatagatcgggttgggagtgaattaaaccaggctttagacttatcttttaatgagaatggaaaaaagtctaagcctaacagattcatcagaaaaattttgaaatctaaaagtagagcaaatttctaaaaaatctttcacatgcatgtatggatcctctttacctaacccataaaaagatggcaaaagttaaattatcgaaagtttcagctcaaaatgtgtagcatttgtttcaggaaaaataatgcatgatggaagattaacataaatgggagaaaaataatcaatgagagttttttcttccatatttagttgatttggttccatgatgtagaattttcaattttaatttcaacccacaataattttcttttaaccaaataatttttagaatttcgttcccagtaaatcatacaccaagtatcacaaaaattaaaataataggaaaaattaggaggcggtgcctaccatataagtgcatataaagactgaatttaaaatataacgggaaataaataatatatatatatttgacacaaatataaatactaatattaatatatgtgcagaaataaagacagaattataaatacataaataaataattatatataacagaaatataaatattaataatagttataataaataatatataaattttattatatataattataataatatactttaatatataatattataataataatataatattaataataataataataatattttatatagataaacttttttttttaaaacttacagtaacttacaattgtaagataataataataataataannnnnnnnnnnnnnnnaataataataataataattttacatatatatatataagtgttacttcgttatcaagaaacgtaatataatatatatatatataatatattaacttgttgtataccaaaatggtacgttttatatttatcaactcgcaagcgcacgaat

SEQ ID NO: 103801 - DNA, 637 bp, Cannabis sativa
  modified_base (353)..(367): a, c, t, g, unknown or other
ttttttctaacttatgatttgtaaataataaataatatcacaaaataaccaatttttgaattctaggttaatttcaaatttataattatttaatttatcatataatataatattttaaattaaaaggataataatatcatttaatttaaaatctatctaatattgaaatatctaatcttattattaaataatctgtaaattttaaaaaaaattaacagattttaaaatctaaccataattcttaaatttaaacttcaaaatatcaacaattaataacaaactatttaaaaaatggctttttttcataaatgtacaacaaaaataatataattacaaaaaatgtgcaaagaaannnnnnnnnnnnnnnttatacattttgtaaacttattacattaaactatacattttaatcattaaataatataaataattaatgattatactaattaccataaatagattgatgtaattaatctttgtaatattattttgtaatatctttatcattatgtttattatattaatgttttaaaaatattaataatacaatttcgtaaaattaattaaataaataataaacagttttataaaataaacaagttaaatattttttttattaatgaattattataattta

SEQ ID NO: 103802 - DNA, 545 bp, Cannabis sativa
  modified_base (251)..(264): a, c, t, g, unknown or other
  modified_base (475)..(483): a, c, t, g, unknown or other
tcttcaaggatttgctatcctgctactaccagagcttagatcgctaagttttggattgaaaatcaagaaaaatggatatagggagagaaaattttattttagaaaggagaacgagggttcgttcgttcgttccttcgtttctactgttaacttaaaacttaatatatatatattttaaaaataataataataatataatattaatattaatataataataatatattaataataatattaataaaaatttnnnnnnnnnnnnnnatcttattatttcttagccattaagaaatctttatttttagggtatttggccaacttcgagtaccctaaaataccccgatatttctaaaatcaacttatcctcataatctgatcaatatttttaagtaaaactgttgtgacatttttggcctccaatcaggtctccaaggttgccgaacgtgaaaaatatttttatttcacaaatgactcnnnnnnnnnccacgtatttcaaataaatctccgtaattaacaaattacgcttatatatccacttatcgagt

SEQ ID NO: 103803 - DNA, 501 bp, Cannabis sativa
  modified_base (27)..(46): a, c, t, g, unknown or other
ttatctaaaatcaatatcggtcccttnnnnnnnnnnnnnnnnnnnnccgatactggtaaactttgctaatctacaaaggacataatacttatccaaggtgtatgtataccttgtcgttgattatcatgccaatcttaatccagtgaactgacaaattaatcatgggaattaaacttttgaacatataatcatgattatattcgactgtattgacgatactataatcatgatttgggggacttaagggcgtcagcttctaaggcgaagtgaagagcttcgccttttccctttttggaagagagataaaataaagggagatatgagaatgtgctttaccaaatagacttatgtagtttttagtgagccattctcatccaacatgcagcaaagaactacatagcctacaaaataactatgcataatattatcagttccctattagggaacatgagaagccaaaaaaggaaaatgtattttataattgatgttgttacataaaac

SEQ ID NO: 103804 - DNA, 1091 bp, Cannabis sativa
attgtaataacccttaaaattagttggcatactagttttgttcaaatttaaaatttagttacttctttgttaataattaatgaaaaaaaagaaaagttacttttatatttttttatcatggaaaaaatatatatgtttcccacaattcaaaatatagttcaaaattgctaataagaagccttaaggtatcttaaataataaaataacataatatagcttaaaaaataaaaaaaaaataaaatcatatttttaaagttaactaattaaaataagcaactaaatatgtaagagaaaaaaattatcttgaaatattttttttaataaaaattaactaattgatatattatttacatcaaaaaaataaaaataaaaggttgcttttttttaaaacttgcataacactgaaatttctcgatgcgagattttttaattttttttttcattttcggtaattattttgaatctcaccgtcgaagtttttgatcgaaggctttgagtagcttcaatgatgagttatttcggcactttcgattagcaactgtagagtttgttttgatttttgttgatcgaagcttttgtcaagctttaatggtgatttttatttgcatattcgattgacatttttgcaaagcttcaatggcacaagttgtggaggtttgaatagccgaaggtttctttttgatttcttttgttctcaaatggttatatatggttcggcagtacgatatgcacggggttgatcctattttttctggtttggtaggaatttttttcgtaaatctcggtagaaatatacatatataaggtatttatgttttattcggtaactgtaatattaatttgtgaatttggtatattagtaaaaattccccataatattttgtgtaagtctcttcaattatctgagggaggcttgtagtaattttggtaacgtagtctcagggcccgcttggcacagcttttgaaaaatttaagaggttgtttggctttatactttaaaaactgttttctattttttaaaattgaaaacagtttttaaaaactattaggagtcgtttggtaaaaaaatttaaaaactgttttttaaaaat

SEQ ID NO: 103805 - DNA, 2661 bp, Cannabis sativa
  modified_base (521)..(541): a, c, t, g, unknown or other
  modified_base (2628)..(2635): a, c, t, g, unknown or other
ccacacttgctacctcgagcacctcaacgaatttccttgttgagaacaagatcctaaacattcattaacataacaatacaatcaaaatacattcaagtatgaatatctaaactcgttcgaattcgagttcgtttccaagctgcaccttcgaagcttcaaaaatggcaaatctcgaaacgaggacctccgccctttataccacgttaaaatgcttccttaggtcgtatataagtgatcccaaacccccaatttcacacaggttgtggtccgcttgaagaacgaaatttttggtatcgtataagccgtatacgttcactccctctctctctcgttcgttctctgcttttagtgtacgaaaatagaactcaaaaacctaatttctatcgtatttaaacccaagcaaggagatcgctttgaactgaagtggaacgattcttattccacgaaaatctccattcagttcgtgcgtatatacaacaacaacatcaacagcaacttaataatactaataataataatannnnnnnnnnnnnnnnnnnnnataataataataataacgttaataataataataataatgaaaattttaaatatgcccattaacattataataatatttaccaatattattagaccaaaataataattccaatattattataagttaacattcatcattattattattcccacactaataataatatgtaccaaaatcaaacaaatgacacacccatataatagccatatatatatatttattaggcattatgcacatgccaataatatcatatcatcacaaaaaaatctcatacataaataaatccataaatatgtaaaataataaaaaatactcttagctaaataaaatttcaaaaatagcctttcggagttagcggatattacaaagcttgaggtagtcgaggctaattctaaggaaaggagcaacattgttgcaagcgatccatctaaagagcctgtctggcaaatcccgacatggacttgagcttcttaggtgaaggtgctgaagaggttttggtttactgcgagcaaaccaaaaaagaagaggcagtggactccgaggaaaaagaagagccatccaagtctcccaccatgtagaattagtttttactttgttttttttttaatatttagaaaaatggcattctggccgagacaatagttgcccttagttgcattatttttgtaaaataattttgcattgttggatggccaactttgctctttatgtatttacctttactttaaatatctcgtatcttatgtttaaacttaatatgtttgtttatttgtattttaattcacaatctaaatatttatattttgatccaagttaagatatatctaggaagcatttccattgttctcgcttttcctttgatacatttaagtagttattaatctactatgtatgtttgtgagcagttatattctgcgtatgtttttcgattcgcgagcagttatagtctgccttactatacacgagtagtttacaatctaccagatattatatgaaaaagaatttagagcaaacttaaaaatacttcgaataattcactttaggaattattttgtatattttttttattgcacatatgaatagttaggcattatattcatattttaggttaagtattattttttaaaggaatttttgtgcctcatttataatacatacctgaatattgcgagtcgttgaatatttagcttcgcatgtagctttgcgttgttttataagttgatctcatttacaactgctactttgattttcttatctgaagaaaagattcttcaaacatttgactttatattgtccaaagacaattttaattaattatcctttcttttgtggcaaactttgtggaaaacattaaaaatgggtttgcaatataatatgtaattctagattaattccagttaacatatacatatatatgccccttaagtaattttaaagaaagtattgtcattacttgaaccaactttaactttattaataataagaatttacttataatagaggtaattacaacatttacattttaactttactggtaataaggtcacaaatgttcactattccagtggttctttattagcgagccattaagccgagctaatttataaacccggctcccactactacctcgataaaataggggccttcccagtttggattaaatactccagcagacggatctcgtgtgtttgcaaatactcatcttaacaccaaatctccaacattaaagagccttttcttaactcttttgttaaagcatctcgtgattcgatgttgataggctgcattacttatttgtgactcagtatgtctttcttcaagtagatccaaggacaatttaaggagttgttagttctcttcttgattgtagaaaatttacacctatgggtcacaatattaacctcaatgggtagcattgcctccgagccaaatgctaacgagaatggagtgtgccatgtagctgttttctctgttattctgtgagcccaaagtaattttggtagttcatctacccaccttcctcttgcagcatccaatgtcttcttgatagtatcttttaagtgttggaaacattttaccaggatctnnnnnnnntaccatgtatgtttcattaacatcct

SEQ ID NO: 103806 - DNA, 823 bp, Cannabis sativa
  modified_base (27)..(50): a, c, t, g, unknown or other
gtattgacttaagaacaaggaagaagnnnnnnnnnnnnnnnnnnnnnnnnacagtatctctgaatatataattagcttagctgcgtgtcgactttcaatctctcggtcccctttgcccagtgaacatacctcactatttatagggctgggaaacttgaggaggaagagtttcctctctcgctacaatgcgcacaaacaaaaagatggtggaatcaatgctgtatgcaaggatcgtgggattgaggctgagtacgctgatagtgggatcgtgtgtatgccgtatccacgtaaattgatccctgagttatagggattgagctgatgactcatgatacgaaagctgaattcgctaactgttgattgctctgcacggatccctgaatatcttactcaagacatgtcagcgaggcatcctactcggcctatcttcgcgagaagatgcttcaagtggactccacgtgtcaccattctcgtgatgccactttagagtgcaaaatttgggataacattttcccccaagtctgtacgggacctttgaggttgcgtatagaattcttctgagctggttctacctttggatggggatacgtggcgagtgtgaccgtttgagactcgatgtgaagctgattgggcgtctcttcggttttcagctaataaatgctctgacaattaatattttgaaatctaattttctctctccacggctgacagttgcactcaattacttctgcgattcttttttaccatgtcgtcatgtgggtttacagccatagagcttgtctctgaactgcattgcgtccgcctttcatcttgcttattctaa

SEQ ID NO: 103807 - DNA, 1236 bp, Cannabis sativa
aaaaatatggtcaataaaaatgtaaccactgaataatcaccctatatatatatatatgaacaactcatattacaaagcccaaatcatagaattaaatttgaaggaacatccatataaattattctcattcattatttattcttgcttcaaggccttgacttttttttttttttacttaaaatcactctctaccaccaaactaaataatatattgttatagtttcttattatttactattttatttatgtattgatttaaattttacaatttcagagctttaagcatacagggcctgagatacacacctaaatcaccttacctgacaatttgatttaaaaaaatagttaaaatccactacatttgcaccgtaaacactcttatgcaaaccatgatgtctaacaatgctcttttcttaaaaaaattttaacaacaatgttttttaatttgttgtataaatacttaagtttaactctcagttataaataaactagataatatagtcgcgcgtaacgcggctcctttaattaattttaatataataataaaaaataaaaaattattaatataataattaataactgacaaaaatttcaatatttaataatgttaaagttacattattgcatattattattacttttattatattaaaacaatctccataaaatattgagaatatgtttaacacaattttctatattattagtattaatgataattatttttatgaggttgataaagttatgttccttattgagttataataaattttaaattgttaatacaaatgtgttataatttaaagataattaacgtaacaaaaaaataaatttaaaattttaaaaacatattaataggtaaatatttttttcgtgatgcattatctttattatatcattcaaaattattttcatcattctatttcattagttgttaaacattgttatttttttttccaatgattattaatattttttattgttaataagtttattaatagtgtcataatataaattgtgatagtattttagtgtaaaaattgtaaaactatttaatattattatattattctttttttatggatatgagacgaacaattttaaatagatattttaatgattttttgaaaggaaaaatatatttattatattgtaaatagatattttgattttttcaaatttttaatttttagaaaaatttggtacaaataattaataaattaaggtatataggtt

SEQ ID NO: 103808 - DNA, 934 bp, Cannabis sativa
aattattttgtaaaacgggatcccaatttaatacaagtatattattttggtatttataattaggtaaataaagttttaatcattcacagttttcaataaacttgttgattaacaacgagctgcacagttaagttaaaaatcacgttaacacacctaaactagtggggtgttacactttcctcatgtcaatgttgaccataaacttggcttgcaattcttccttccatatagcgtcactaagtcttggcacaccatgatgttatgagctatatacctcccatgaacaattcctccctaattttttgctacaagatctagaagaactctccttaatcttgagcaaattacctttgctactgctttatagatgatgttgcaacacgatattgggcaaaaatccctgagttatcaactctagttgagacagtacttgttgaaacatggctgggggtttgcttcccgagccagtttttaacaagttcatctcttttcgagcttcttcttttcaaacgaacacctgagccctctcgttgaactcagtgatgttcttcactagacgaccttataagtcgttccacaatttgcccctagcggtggatagatcagtagtgatcctcgcctgaagagcagtaagttgtgtactatcatccagatttctaactcttgtagcacccatgctaaaacgacttaaatatgccttaagtgtctcgccccgctgttgctttatgttggtttgcgaggatgcctcgggtcgcctatcccttgcggcctggaactgctttttaaagtccttggacagctgttcccaggaagtaatggaatgatgcgtaaatttgttgaaccagctgcatgctgctccaactagcaaggtaggaaacaaggtacaacataaattttttgtaacattacttgctcgcattattgtattgaagtt

SEQ ID NO: 103809 - DNA, 656 bp, Cannabis sativa
ttactagtgttaagataggttaccatcaatgagcaaaacactaagggagtttaggtcccatccctaaaaaaattcatgttataattttgtacagagattaagcgatttgttataacctctcactattgattccatgtgaatcatgcatgccaaaatatagtgttcactttgtaaccacttttcttcttaagtacttaagctttgaaattcaatcaaaaaagattaattttcacacaactcaaattctcaataattttgatatcaagcatatcaaaattaaacactaatttagacatcaaatatgtctaaatgatactttattttaagacaccaaacatgtcttaaactttttacattggagtatcacccccacactttcgcatttcactatcaagacaatatcttggttttaaaatatagaagaccactttgtctctataatttctcttaaattttaatttccttcttgaaattattttcaccgaaatttgacaccaaatatgtcaaattttttacatatgcacatagccaaacttgatttagaatttgaatttgaattcaaattcaaataaattaatcaacaatgtctcaacactttttgattagatttatggctcaccctcacatttttaccataaagtgtatataaaatatca

SEQ ID NO: 103810 - DNA, 719 bp, Cannabis sativa
ttgcataccaaatgtttgtaaataatctcataagggttagctttgattttctatatgtacaattatttctggtttgatccaagttcttgttgtgatcgatcatcaccccttaataattaagaatggtgctcaaagagcagaaaagaccagcagtgtaatatccaaataagctttatggtaaataattagaatttataattatattatgggttaattaggtaataagtaagattatgatcatactaatttagttaaacgtaaattttaaatttgctataattggatataaataaacgtaatttataaattacagagatttatatgacatatgtgaatgtaatgagttactagtgtaataaaaatatttttaggtgtggcaaccttagagactcgatcgggggccaaaaatgtcataacaggtgtaacatcctactagtttaagcgtgctaccataattttaatttaattgttcagttcgttgctaatcaacaagtttactgaaaatcatgaataattaaaactttatttaaatacttataaataccaaaataaataacatatatatatatataaccgggatcccgtgtacaaaatatttacaactatttcaggtatttgatacaaaagttattgcctagcgactatacaaaatatgaccagctgtcccaaaaatcatatacgctcaaggcctaacagtcccaacatgtacaatcttcatc

SEQ ID NO: 103811 - DNA, 1808 bp, Cannabis sativa
  modified_base (67)..(72): a, c, t, g, unknown or other
gaccaggacatggacccagacccaaaactgtaaccggaccaggatccagactcggacacaaacccannnnnngattgggtccaaaacctgaatccaaaccctaaccgagactgaggacccaaacccaaacctaaactcagactcgaacattgaacacgactcaggacccagaacttggatcgagacctagaattggaccccaatctcagtcctggacctagacccagacccagacttgggacatgaactgaaaccagacagggacccgtgattgggattcagatgttgtcccgggatcagagaaatggggcttggacaagacccatagtcgatgtctttatgtgggacttggaccaggagccaaaactggactaggacctggacccagacccagactctgaacccaaaaccgaaacttaaaccagaacgtgaccaggaccctgaataggatcaggaccgtgaccaggaccttgacctacaccggcacccagaactagaacgaacccagccctggaacttgagctcggacccagtctcggacccggtcccggacccagactaggactgagacttgaacccgaactcgggactcgatcccatacccagaccaagcccctgacctaaattggtattcagacctggacatggacacgaacctagaccaagacccggacccgaataccgacccagaccaagaccgggatcaaaacacgagacctggactaggatccaaacgcaaacccagacctgaacctgggacccgaacccaggacctggacccagatcaagatctgaaaaacatgtacccggactcggaataagacttggaccccaaccccaaccttgacccaaacccggacctagaaccaaatccagacccgaaatcagaacaaaaactgtgactaggactaggacgtgacaccagaaccgaacccaaaccataacccaaactcaaactcggaattgcaactagaacttgaaccggagtaggactagactcgaacccaaacccaaataaaaaccaaatcgagacccaaacttgaacctcgactaggtaccaacacgggcaacgaaactagtcccagtccgtgtctgggtccgagtcctaatctatgtccgtgtccgtgtcttgcgttcgagtccgagtcccaagttcgaggccaagttttggtacgagtacgactctgggtctgagtccggctctgggtgtgggtctgggtctgggtttcgatctgggtctaggtttgggtctttgtcttggtctgggtctggatctgggttctggtacgggtctaggttctggtccaggtcccgggtcacgggtcctgggttccaagttctgagcgcaggtcttggcgcaagtctgggtctgagttcgggtcttggtccgagtatcgatcctagtctgggtccgagtatcaatcctagtctgggtgtgggtccgtgttcggttctgcatctagatctggttctgggtcaaggtctaattccttttccaaggtcctgaatccagttcttgttctgattttgggtcctggtacaattccaagatccatacatcgactacgggttgggttggtgggtccaccaagcccaagccccgggtcggggtcgtgggtcaaaatacagatcccaatctgggatcccggtctcgttccgatttagatcctaggtcccagtctgtgtccatgtccgggtgcgggtgtgggatcgagactggggtcggctcttgggtcccagtcctgggtcttgattctggttctaatttcagttttgggtccccaatctaggtttgggacctaggtcca

SEQ ID NO: 103812 - DNA, 769 bp, Cannabis sativa
acacctttatttgctttcctttaatatttattaccaaaacaaaaatcacaaagtcatttgttactattatcacttattattaaccttttgttttttatttttatatttctcctaacgctttagtctataatcacctccctgtggaatcgaccgcccgatctatactacaaccaccgctagtggaagtcacattttgggcgttaaacagtgaactgcccattcttatttattgtcgatattctatcgatatcatatcgacatttcatcaacaacaaagggaaataccattgaaaccgttcacacaaacaaggggaaatagatcgatatcatatcgatataccatcgataaaaccatcgataactctgtacaaatataatttcaccagaaacaagtcacagaatccacaagaacaatgataaatcacaagtaatcaagcaatccacaaaatctagcaaaattgaacaatttaaaatcttttataagaaaatggtaccttttttttactcggtttggtggtggcttgactgagaacgtaacaggacggtggtgggtgtcgattgagaatgcctgggtttcgtggtggttggttcgacaggattcgaacgaacttcgatgggttcaacgtggtggggttcttggaggttgcttgtggcgagaggacgcgagggaatggaggttgagttcgagaatgcctgggtttatggaggttgaacgccggttgggtttctcggaggtaggtgggggttgggagagagagagagagagaga

SEQ ID NO: 103813 - DNA, 895 bp, Cannabis sativa
ctcaaaaacttgtgtttaagttaggaaaatactacattacattacagtatgcattccacatatctatttttttcttttaaaaaaaaaatgcaattttgtacatgaacataaaccaacaaagctttagatttcaaattaattcactcataaattattagtttcttgtatttgcattaaaatacatgagatttttatagctaagaaaaataccacacaacttaacataacaaaagaattgaaaccatgttgaatggtaggaaagtttgagacataaaacttatagtagagaccccacattgctcaatgctcacaaagaaaaacataataataagattttcttgttgagatcaaatagagatactagatgtcacatgtgaccaaaaattaatgagattaataaaaaaacaatagacaatgttcagagttcagaaatcagaaatcagaaccattttgttccatccatactgctaaatcctttcttatatatatatacaatgtccccataggtatccaatgtgaactacaataatcctatgaaccaaacaaaagtacaatcggtgagtatcatattatatataacaaaggacacaaaaaattaccaagctgaataatttttgtttcatattcattaattattacctagataatgaatgaaacaaaagaaaaattaataatactcacatgcaaactgccacatcagaaacctccaataatagactattgattttatattagctttaatccttttatttataaacaaattaaataattaaaaacatgttgaagcaacaaaaggacatgcaaggagcatggcatatggatggggttagaaatggtgtaagaaagaaataagaattatgtcatgtgtttgttccagcacatgaaggttctcttt

SEQ ID NO: 103814 - DNA, 4034 bp, Cannabis sativa
tgtgagattgattgaaaatgaagaacagagaagaacaagagaaagaaaccaaaacagtgatgacatgaatgaagaagagtccttctcattgaattgaaacaatacagtgtatatacatatatatatatatacagctgaatggagtgaaaggagttagttacagagttagttaggtacagtttgaaataacagaataaaactaacaactgtaaagagaaactaatcctattctacaacagccccctcaaacttagtgtggatagagaaaccacactgagtttgtctcgaaggaagggaaaccgattgctggaaatggcctttgtgagagaatctgcaagttgatcttggacagggacatgattaacttgaagctgttgttgcatgactttgtctctcacgaagtaaaggtctatttcgatatgcttggtgcgcgcatgaagaataggattggcggttaacatgactgtgcttaaattgtcacaccagacagttggaggtgtggacaatgagatgttaagctcagttagaagtgactgaagccatgttatttctgttacaacagcagcaaggctgcgaaactcagcctctgtagatgacctcgagattgtctgttgcttcttagatttctaggcaacaagattgttgccaaaaagaacacaataacctgtggtggagcaccgatcatcagggtcggatgcccaatccacatcacagaaggcagtgatgtcatagttggtagatcgttgcaggtgaagtccataatctaaagtaccagccagatatcgtaaaattctcttaacaactatccagtgggactccaaaggattttgaataaattgagagactttgtttactgaaaaggcaatatcaggcctggtaatcgtggcatattgcaaagctcctacaacagatctgtatagagtggaatcgaggacattgtcacttccaaaatgagagagtttaaggccactagtcataggtgtattgctagacttagctccctacattttggttctgtttagcaggtcttgcaggtatttggtttggcacaggtgcaaacctttttctatctttgtaatctgaaggcctagaaaataatgaaggtcaccaaggtccttcagtgcaaacagagagttgagattagagataagagcaaatacctctttagcatggcttttgatgacaataatgtcatcaacatatacaagaagatatgttgtgtgctgagattgaattctgagaaagagagaggtgtctgattttgcatgactgaatcccaaactgagtagagcagatgacaacttggcaaaccaagctcttggagcttgttttaagccatacaatgctttttgaagtttacatactaattctggacgctgaggatcaatgaaacccggaggttgacacatgtaaacttcttcttccaaatcaccattgagaaaagcattgttgaaattgagttgtcttagtgtccaccctttagtgatagccactgtaagcagaacccgaattatttctggtttcacagcaggactaaaggtttcattaaagtcaaatccactttgttgatgaaaccctttagccacaagtcttgctttgtattgagtttgactgccgtcttcattttccttgattcgaaaaatccatttgcagcctatgcattggctgccaggaggtgatctcaccaaaatccaagtattgttctttttgagagcataatattcagtgttcattgcattgttccactttggatcttgtaatgctgttttactgttgcatgaacaaaggatgcagtgagtacttttggttttcgaatccctgctttggctctggtttgcataggatgctggttcacaacatgtaaagggtgatcaggtatttggggtcttgtttgtgagacctgtaagggaacaggtgggttgggagaaggaattgatgatgctggtgtggaattgggaatgttggttgatggaaagaaagatgttgaatggtcaggtgagtgagattatgagtcaggtgcatgaattggtgaggagatgacaggttgtgatgaagagataggtggagatgcaaatgtggaggatgaagtggaaaggctatgttaggggagagcagtagttttctgatatggaaaagtggtctcattgaataagacatccctagacatatagattcgaccatccttggcaagacacttgtaacctttttgagtgagactataacctaagaaaatgcaaggagtggatctgtaatgcattttatttttgttatagggccttaggtttggaaaacatagacaaccaaaggttttaagtgtagagtaatctggtttggtgtggaataaggtttcatgaggagtaaaattatttagaaatctagtgggcattctattaataagatagataaatgttcgatatgcctcatcccaatacttgagtggcataggtgaatgagctaatagagtcaaaccagactctactatatgtctatgctttctttccacaatcccattttgttcatgggagtgtggacaagagactctatgaatgataccacaagactccactaaagaagtaaaggccctaaactctcctccccaatccgattgaataccctttatctgttgattgagttgtaactcaatctgtgttttaaatttgataaatgttgggagagcctcatccttggttctaagaagatagaaccaagtgtacctagaataggcatcaacaaaactaatgtaatatcgatatccatttgaagagaccataggggcaggaccccatagattcgtgtgtaatagctgtaatggagcagtgtacacagtttcagaattaggatacgataatttgtgatgctttccaagacaacaggcagtacacaaatcaaaagcatttttattgataggagtgatattacatttggccataacagattgcacaattatcttagatggatggcctaaacgattgtgccaaagattaaagttggaaaagggtacactggaggtatttatttgagactgaaatgcagcttttggtgaagactcagctgctgtagtggaggagttacagttggactgagaaatggattgaagaggttggtcgaacctatagagacctttgtcaaccttcccaaccaataaagtcttcatagtatcccgatctttcacaaaacaaaaatgagggtgaaactcaaaatagacagaattgtctttagcaaattgagacactcattaagtttttagtaatatcaggtacatgaagtaaattattcaagttaagggattgagaagagaagggagaaataaaagagttgtgaccaatgtgaaggatattcaaacctgagccattacccatttggatctgatctaaaccaggaaactcttggggagccacaagattatgtaaatctggagttaaatagttggtggcacctgagtccggataccagctttggtcagtgatagattcaggtgtagcaaccagggcttgcatctctaccattgcaaccgatccactaaaggattggaaagattcaggtcctgtaaatgatttatcgaatcggtagaaacattactttactgtgtggccttgtttatgacatagttgacactgaaccttaggagtagaggaatctcttccaattcctgagaaacaaccacgaaaaaacttcctcgagatccacgaggattgttagtaaaagaaggatatggaggagtatagggattaccatattgatgatggccagtgttgtaaggaggaaagtgattgaaattggtggtgtagggaggaaagttgccacgaaaagagccacgccccctataaaagaaccaaattgaatcggagagaagttttgatggcctcctcgagtagctgatggtggttgagctgccagattaactactggttttgaaatatcaagatcagattcaaatgtctcaattcgaacttcttgaaccatgagtaacgactcaacctcagcaacagaatagtcatctttccgagtggacaaagtgttgggttttatgccct

SEQ ID NO: 103815 - DNA, 532 bp, Cannabis sativa
acattggatatttttacctctaaaaataaaggtaaagtatttaagtatataaaatatgaaatattaggtatgtatgtcgcaatttactcaatttttatatgttaatatatattagttgtattacataaaatataatagtgaacaataaaataacacatgcaataataataatcaaatgaaaatttttgtcaaataaaaatgcataataaatagatgaaaagttttgcactaaaaaatatctgaatgatcttgattactgtcgatctcatctaaattgatagtctatgacaactttcgataattataaaacatgtggtaagacattaatatcatctaaatatattagtttattgttgtaaaattaattttttttatgtaaggacatacaatggtaatttatttgctatgcaagtacacacagaaataaaactaaacacttctttatacatataattttttcttttcttgtgtttgttattttttgttttatttatttttagtttgttgttggcgacataaaataacaataatt

SEQ ID NO: 103816 - DNA, 988 bp, Cannabis sativa
  modified_base (935)..(937): a, c, t, g, unknown or other
aacactagaaagctaactactcttgagaaaagatatatgtcaaaattgcaaagtagctagttctagtgtagtttggtctgcagctccttgttaggagtttgtgtttgggtcctgtgttgtttattggtgtttgtatttgctcagttgattaatgaagttcttccttcttgatcaaaaaaaaaaaaaattaatgctaaaggacaaaaatgcccctaaggccaaaataaagcatacacatcaaacaagggtaaaaatgtcatctctaacataaatattcacaaataaaaatttagattattcacatataattataatgccaacaattaatcccagaattgtatttcggccccgaacccggttcggcccgaaatacccagttgtgactataccacgtcaacctgtcagaacacacctgaaaaaaaaaaaaagaacacaacagatatactatataataatatattccataatcacgtaaataaattaatttcattgttttacccttctcgggtcataattactaaaatacccctggctcactaacggggtctttacatgttataaatcatataaattcccatatattaaattatataataatataattccttaataatacataattatctagttagggttttgctaaactatttacataaacttagggtattacaatgttattttctataaagacctgattcatatcataaagatgatcaatagtagatcaacttaaatcttgaataatcatgaactcctgctcatgttattagcttctgagagaagatgattattacaacttctattttgggaatctaataatatggatggtaggaacatgatctacaattatggaatcctaactttcctaacgaatcgaatgttaagtgttaattctgaatctgaaaagttgtgcacaaatttagattggatctaannnatactttcactagtgaattaacgggactaaagaataaagaagtaattagaa

SEQ ID NO: 103817 - DNA, 730 bp, Cannabis sativa
atctggaccgagatcctgacccagacccaaacttggacccgcagtcgagacctgaacatggacctgaaccgaacctagacctagattggggtacacacctagagacaaattcagacacagactcggacccaaagtcaaacccacacctagaatcagacccaaagctagaccaggacccagacccaaactcgaacccagaccatgatcagaaccaaggacttagacccaaaattgaatccaaactcaaatcggtattggaacttgggactcggaccgaacctagacaaagacccaggaggcgaacccacacccgaagcctgatctagacctagatagacattcggacctgaacccaaactcagaccaggactcgaactatgacccgaactcaaacccaaactcgaactcagaatggcaaatggaactagaaccgaactaggactaggaccaggaccaagacctaaaccaaaacctgcaccgagaacaaaacccagacagagacctaaacccaaaccgagactaggactcgaacctgaacctacactgggacccaaacccacacaataacttcgacctggacccaaaatcaagaaaagtatctgagaaacagaattaggacccggagctagtacccgacccaaacgcgaacttgaacgtacgacccagctcgtgacccgacaccagaaatggaacaagattgggacccgagattgggatcctaatctggacc

SEQ ID NO: 103818 - DNA, 536 bp, Cannabis sativa
cctaatattattaaatctagtaattaaaaaaaatatatttttttatgtaaatttctaaaaacaaaaattaaacataaacaaaagtttaatttttaaatccgtgtaaatatttcaaattaaaaaaaaaatataactaacaaaaataaaaaaaaaaatcatgatttaatagataagttaaatactttaaactacaaaattttatctgatgtgataagttacaatatatttaaggtaaaaattatattttaggtgtatatgtaaattgaaacacaacaaaaaaaatttaagcatatataataaaactattttaactaattctttttactatatataaatattataataaataaacaaattttacctctgaactataaataattattgtacttctatcaaacaaaaaaaaatatatgaagttcattataattgtttaattgtaatatccagattaaaatagtatttaatttttttttctctccttgggatattaattgtgtgaggataattatcttatatatttgtgttgttagtgagtt

SEQ ID NO: 103819 - DNA, 731 bp, Cannabis sativa
tcgaccgttgctacaggtcccctagaaccagaattccggttctgtgtcgggaacacgaaaaatgctcccatgacctcaaaatcaagacaaactttgcaaaaactctccagtatacctaaacaacatataaccaacattttccaaccagtgtttcacagaacaaaccaaagaaactcaacttgcgattaatgatcaaagctttgaactcaaagcttaaacttgcagaaaactaaaacaaaacatcaaaaccagctgctagaacccttaatgaactcaaactaagtccagaattcgaaccctaagcatcccaaaccataacagccactaattttcaaaattacaagttcaaaccaaacatcaaagcttcaaaacataaaactatggttctagggttacctttgattgctcttccttgaatcgctagcttaatttcagagaattaggaaggaaaaacttatccttgccctggttttgtctcagccgaaagagagagagagagagagagaaagaaatagaggattttctatttttttgttttctttgattttacatttaatttccctaagtggaaataaaggttaatacattaaccttggctgaagtaaaatcttgctaggtgtcactcaaataggcagccaccaaaacatcatttaaccaaattaccaaattgcccttactcataaaactagggtatctcaaaagctagcggtaaaatggtcaaattccataac

SEQ ID NO: 103820 - DNA, 565 bp, Cannabis sativa
  modified_base (232)..(238): a, c, t, g, unknown or other
taccttatgcataagaaatcttaaccggttgagaagtttcaggaatttctagcattggctcaaaactaattgggtaaaactttaaagatcttgcaaactaataggggtggagaatatatgaatatgcagtttaaatatcatttaattgaacttggaattgaatcccaattgactgccctagcactccacaacaaaatggagttgtacaaagaagaaatcgcacgcttttggnnnnnnntaggtccatgcttagctactcaactcaacctacgtccttctggggatatgctattcagatggaaaatgacatttttaatgttgttccatctaaatcagtccctaagacacctatataattatggaatggtcgcatacccagtttacgccattacagaatctaggggtgccctgctcatgtcttaagaaagaaaagatggaaaattagaaaagcaaactgaagtttgcatatttgttggaagttctaaggagactaagggtggactattttatagtcgcaaggatgataaagtgttcgtttctgcaaacgccactttccttgaagatg

SEQ ID NO: 103821 - DNA, 641 bp, Cannabis sativa
gaaatttgcaggaaaaagaaaaaccatttgcatgaataatatcttgatcaatgacaacaaggaagaagctgaatccgaatctaatgagtcagaaattgatgagaactctatggcggaatcttacaaggtaatgtttggtaagtagttagaaatatgtgctgaaaaccgttttatggttaaagataataaagacttgtgtaacaacattaatgagttggaagaaaaaaataaatgttgtgaatctgaactgtctttaaaagagtctaaaattatttctttgactaaggaacttgaaaacatttaaaagaatgtcaaaatgttaaatccaggttccaacatttttgaaaaaaattaaaaaatcaggccaaactaatcatgctggtctaggttatgtttctaatcaatctgatttcaacaccacatttgttaaatttgatatttttgtttctggaagaattgtttctacctcgcagtattttgtcacttcagtaaaacactctgttgttacagaaaagaaacaacacggcaagtttgacaattccaaagagaatggaagacgtttcatccatatttgccatttttatgggataaaaggtcacattcgacttaagtgcatcactatacaaaacatgtttaaatct

SEQ ID NO: 103822 - DNA, 597 bp, Cannabis sativa
  modified_base (275)..(275): a, c, t, g, unknown or other
cctagaccaagatctgggtccagagctaaacacaaacctggacacagacttggacccgaactcaaacacccacacatagaatcagacccaaagctagacccatactgtaatgacctctctagtaatttagattagtaagagcaattagcactaatttttattattttattattatatgtgaattaatttaattgtggaccccaatatttagaaataaatactagagctataatttctcagttccggagatgttattaaactctaggggtattatntagcttatatgtgaaatatgttatttttgtaatttttgttcggcaacaacggaaaatgcgatagatgactagattgatcacatgggtaagtttagaaccttatttcataaggggaaatattttagtgaaaataaattatcaggattgagcggggttgtaaattttgaccattttacccctagctttagataaaccttaatattgggttaaatggcattttactcttttggttaaggggtgagtgaggtgactgcccaagtaattgacacctagcacattattttttcagcaaagagttaattggggaaaaccattttcattt

SEQ ID NO: 103823 - DNA, 526 bp, Cannabis sativa
cactagaaactaaataacaaagaaaagagtatgattatggaagttgtatttgcactccaaaaaataataattacatttttttttttgaaagagtgaacaaaatcacaatatgataatcatcgacgcagaggaatttccagtcaacaagctaattgtctagccaaagatatacagagttagaatatgagtcactacaaacaaagcgactatataaaacaaagttatctcgaaaatttagacaaaacaacttgagaccactttcaagagacattcgatgtaaatagttgcctggaccaaaactacctacaaataaatagatgtataaaggtagattagtacactatacaataataatgatgtataaaggtgaatttttaaattaaggataaactgcaattattattataacaaggaaaaatttatctttgaaatctttatattaatagagctaagtcttccaaggtacgtagaactatactagccaatataacctacatcatacataagatttaagagattaatcaaa

SEQ ID NO: 103824 - DNA, 699 bp, Cannabis sativa
agcatcagcgtaaacctgcagagaaccctcctgcaaagcatccgagactctgttttgcaaatgaactgaagcactaggatgctgattaagtgattagtgtattgtgcatctaagtatttgaaaaagtaactaacataccaatcaaaaatatcagaagctgggataacattgttatgatgaagatgattgttcctttgattccaaaaagcccataaaaaaacaaaacaaaatgtcaacataatccttatccaaagcatcaaaagagcataataaaaattcactaatatcaaggtgtttatattttataataatgatccacaaaccttgaagatttccaagcttttctcaatttggaacaccctagcaaagcatgatgaactgtttcagggctgtttttacaaataggacaaagtggagaatcaatagtatgtctagccaaaagggaggaagcaaccggaatagcatgagacaccaccctccaaacaaaatgtttaattttaggaggaactttagagtgccaaatcttactccaaaacttcttagaactgacaaaggaggaggaagaggggatatcttgagaagagagagctaattgataggctgacttgacactgaaaaaaccagaactctcccttgaccaaataacatcatctttacctggcaaaccagtaacaggaacctctagaatatcatgaacaa

SEQ ID NO: 103825 - DNA, 640 bp, Cannabis sativa
attttggcaaaagatgggagactatacgctcaacacaacacacccggtgctcctcttaggagacatgaatggaaccttgagggaaaatgaatgttttcactaccatggaaatacttcaagatattcatttgatttcagacgcatggttgtagagttggtctgattgacttgggattccaaggcccggttttcacttgggtgaaaggaggcaatgacccaagaagaggaggaagtatgaaaagagctagacttgatcgagggcttgcatcaacggattggagaatcttattcccgcaagtagtcataaaccaccttggggcctctgaatcggaccacaggccgttattattggatacaatgggaggaactagatgcactagacgtcagtttaaatatgaaaatatgtgggcgcgtgatcctcgatgcttttgggtagtaaaataagcttggaaatttaggatgcatgacaatcctatgaataacttccacatgaaggggaaagctacgggtagaaagcttcagagatggaacaattcgcagttcaagcacttatctcagcaaattgataaggcaaaatctcaactccaagaggcagaaatgaagaacccaatcaatatggaggaaattaataaagctaaac

SEQ ID NO: 103826 - DNA, 1457 bp, Cannabis sativa
caattatttcgatctcttctgtgctagtaatgctaggctcttcgaggaactggataggaaccaagtttgctttatcatttacattgctgcttgccaatcgagctaatgcatccgtagtcgtgttttcttcgcttggaatttgtctgagaccgtagcttttgaattgtgcgaacaggtcatgtattttgctcagatatgctatcatcttttctcccagagcctggtattctccagatatgtaatttaccaccagctgtgagtcactgcagatttcaatgtgttcggctttcatctcccaagccaattttaggccagcgattaaagcttcatactcgacttcgtattggatgccttgaatccaaacttaaccgcagcgtgcaggtgttgccccctaggcgtgacaagggtgattcctgcaccaaatagcttatctatagtcgacccgtccacgtgtagtttccaaggcagctgtctgcactgttacttggctaaggtgtttgtaccagctcggggttgctttctggtatgctttctttttttcctgtgaattctaccacaaagtctgctaaggcctggcctttgattattgttcggggttggaaggtaatttcgtactgacccagctccactgcccacttgagtaaccgtctagaggcgtctggcttttgcaatatttggcgtaatagttggtcagtgtacacccaaacatgatgagtttgaaaatagggccttaactttcttgttgctagaatcaggtagtaagcaagtttctgtatcaatgggtactggccctcggcctcaatgagtcttttactaatataatagaccgggtgttgtatgttgctttcttctctgatcagcacgacactcacagtgtgctccgtgacagctaagtatatcccaagttcttctccgtccagaggtttcgagagtatgggaggctctgcgagttacatttttagctcttgaaaagctttttcacattcttccgtctacttgaattgcatatttccccgcaggatgttgaggaatggaacacacttgtttgttgattttgaaacaaatttgcttagtgcagaaatccgaccagtcaaactttgtacttccttggttcttgttggtgacttcatatctaggagggcttgaatcttctctggattggcttcgattcctcgggcattgacaataaagcccagaaactttcccgagctgactccaaaggaccactttaagggatttagtttcatgttgtacttcttgaggtctttgaagcattcatccaggtcatctatgtgccccccagccttcctggatttgacgagcatgtcatccacatacacttccatgtttcacacgatctggtctttaaacattttgttcacaaatctttggtatgtggatctagcattttttagaccaaacgacattactttgtagcaatatagacccatatctgt

SEQ ID NO: 103827 - DNA, 670 bp, Cannabis sativa
acatatcgaagacactatacttttatagagaaccagatatgggcagtatgagtttcctataatgtcattcaaattgactaatgatcctgtggcctttatagatcttgtgaatagggtatttaaggatttcctcgataactgcgttatagtgtttatcgatgacattcttgtatactctcaatcagcacgagcatcatttttgaatggtattgcagcgacttagaaatcacaagtggtatgttatgtttaaagagtgcgaattctggttgtctgaggtgtctttcctgggtcatattgttgagacgaatgggattatagctgtatctaacaggattgaattagtgaagaattggccgaggccaaagtctgtaacggaggtttgaagttttctcggtgtagcaagatattatcgacattttctcgagggattctctcaaatttctatgcctctaaccgaatggactaaaaaaaatcaatgatttgtgtggtcagataagtgcgaaacaagttttcaggagttgaagtaacgtttgataacagctccagtgttagctttgccatcagaataagagaaattcgtagtttattgtgacgcatcccgacaaagtctgggatgtgctctgatgcaagctgacagagtcatagtttatgcctctcgtcaactgaaaga

SEQ ID NO: 103828 - DNA, 860 bp, Cannabis sativa
  modified_base (112)..(115): a, c, t, g, unknown or other
tttataaatgtctcataagtaaaatgatataaaatatcttttttctaacttataatttataaagaataaattatttaataaaatagccaattttgaatttgaaaatattatnnnnagaatatctataaaaatatctaggttaatttaaaaatttattaattatttaattcatcttataagataattttaatataatattttaaattaaaagataaagctatcatttaatttaaaatatgcccaatattaaaatatctaatcttataattaaataatgtataaatattaaagaatttaacaaaattttaaaatctgactataatttaaaataaaatattcaatttttaaatttaaacctcaaaatatcataaattaataataactattaaataattaaatattattaattttaaaattttgatatttaagtttaaatattaaaaataataatttttacagatatttattaatttgaaattaaaaaatcaaattttgatgaaaaaataaccaaaaaaacaattttgggtgcaaagccccctagctgccgaggataaggttgtgttcaacctcaatacgtgcgtggacgggctttttgcagggttcatagccgagctttctcggtgtattgtagcatcatcgtgcaagtagctcctatctgaatgagtaaggatcgagtttcagacacgaagtgtctgaggcacgcgcgctgggtcttcttgtccgagagtctagtgcgcatgagcaccaccctctacacccaatggacctcaattttcaaatcaacatatcttcttcgtttttcatcggaattgagttccgtaaaaacaaaatttgcttaattttttacaagaaatccaaat

SEQ ID NO: 103829 - DNA, 524 bp, Cannabis sativa
ggtctcctccaacattcaacctttcaataatcaattgcattctatcatatgtccaaggactaccattgatcacgcgttggatatcgacttcgtggtaaaattgaaaaagaaatcgattagtatcaagttgtttaacaaacatccccatacctggctgccatagagaggctaatacattttgcattttttcaaaatcaataacccggtttgatagtaatctccccaccaaacaccatcgatcatctatgccttcttctctttcccccgctgtcactatgactgcttccagatcctcttcttcaatattgaaccgtatcgtatcctccattgcctccgaatgacggctagaagaagccattttcgtccagaacccgaacagtaaaaatagacaaagaccaaccagtattcttcacacgctccactccaacagcaacaagacaacaccttgcactcactaactcactgaaaacaaaatgaacaacactcaccaagcactagacaagacaaaacgataaaccatgtca

SEQ ID NO: 103830 - DNA, 1344 bp, Cannabis sativa
atatatatatgatattatgatgatatgtcatatcatacattgacacaagaaaaaaaagtagtgagactcatcattacatatgaatggaaagagagagaaaaataatgttagaaaaaaaaaaaagaaaactagagaaagagtctgcttcagtgtaagaatatatatatatatatatgttttaacggtatacttataaacggtatatctgccaaatacttgaccaacgatattatagaaattaattttagattttagtccgttgatacaattaattctaataaaaaagtaatacttttattttttactattatatattctgacccattaatacaattaatatctgcttcagtcggtttatttactttttttatttgtatattttgtcgtttattattaaggttatatggactatttagtaattttatattatgaatgttatttttttttttattgtgtaatgtagttttgtgtattttttatactatggtgtcatgtaatacataataaccaccttaaaacacacaatacttcccaaaagattcatattattttgctggtttttataaaaattaattgttttttgaaaaaaaaagagagtgcaggtaaggtactttttttttttttttttttttaaagtaatgcagatacttgaaaaaaaaaacaatatagatccatttaaaaagatgtgccttgcatgaagtatgccgtaaacatgttgaaacatgttgaatgttttgatgagcttcccatgatattttggtaactacatcatcaaaataactatataaataagctaatgatgtgccattatatagtttttagcatagcctagttaattgttaatacaatgcatattatagatatttttaaaatattaaattttgaggtctcggctgtttttagcatattatgcaatgcatattatagtttttagcatagcctagttaattgttaatacaatgcatattctagtaataaatactctgaaatgagtcctgtgtcgaataaggcatatttgtatctccttgaacattctcgttccccgaatttgtgtattgttccaaagtgtggctggttgtggctctctctcttcccctagttggttttgttccacgattaggacatgatctactgttataacccatctcacaacaaagcccgcattgcctttgtgtagagcctgtgccatttgtaggttctccgtcccttcattgtgcattacctgttccttttgttctaaccctagttgggtcttgaatgatgttaggattgtcacgatatgatctaggggcaagtgcactaagacttgattcaccaatttcgaacccttccttgaacattgtc

SEQ ID NO: 103831 - DNA, 642 bp, Cannabis sativa
aattaaccacttggacttggggctagctcttggggctagctcaagtggctagctcaagtggtcaagtggccatataagtggccatatgtgggtgtgtgtggggtgtgtgtgtgttggaggtcctgggttcgaatcccaagtaaaacatgattgtaatatataaacgcttaaatcaaaaaattgtaatatttaaattaactatgatttagataatataccaattggttacttttcacaaaatgatcaactttagataaaaaaatatctcccgtagataatcttcaatttttagattagttatttaaaagctatatattcatttttaacttaagtgagcaacgatatggttagaaaatagttttcgaaatctggttactttttggttaactaaatgaaaaaataaactacttttcaatgtggtcattttgacatgtaagaaaaatgtgtattttctcatcgtcaccataattaaaagtaactatttagttgtttatgataccgaaagtgaaacttagaagtaactatgaaattatttttctacacaacacaaaaaatgattcattcttttattaatatgtatttttttattgataaacaaaatattttcagttgtttactatgtcaataaaaaatattgtaatg

SEQ ID NO: 103832 - DNA, 539 bp, Cannabis sativa
gactatgaaagagcgatttagctttcatttcatcagatcggaagcatccttggactggtttggatagagcagctataacattaccatgatggtcccttactatcgctccacaccccaggatttttaagtctgtgtttgcagcaacatcaacatttaatttgagaccacaatctggtggtggtgtccagggaaaagctttgaaaatacggtctgaatgttgatgatctacatgtacagcagtagaagtgctagctctttgatctgcagggggcatcctcaaattaacattaagaacatgtacagattgttgctgaattggtgtagcagcagtggctgtactggtgcaggaagagtgaggctgaattttggatctgctccgagcatatttctccaagtgcgtgctagcaaaagtggcaatggtgagacttgatcttgggacacccccatgagttaccttgttgcgctcatgccaaatagcccacatggtacatataatcaattcaaagtcatgttttgagtgaattgaagacaagtgaatg

SEQ ID NO: 103833 - DNA, 1184 bp, Cannabis sativa
acttaagtaggccttaagcgtctcacccggctgttgctttatgttagtgagtgaggacgcttcaagtcgtctatcccttccatcctggaactaatttttgaagtccttagacaactgttcccaagaggtgatcgaatgatgagtaaatttttgaaccagctgctcgctgctgcaactagcaatgcgaggaacaaaatatagcgtagattgttcgtgacattgctggcttgcataatagtattgaaattattcaaatgtgagaccgaatctgtggtaccatcgtatgacgagacgtgagggttcttgaatctctgggggaatggagtattcatgatgtctggatggaaaggctctagttcctcatctgagtcatatctagactgctttccttgttccccgacttgatacctcctgaatttgtcctccaactcatcaattcgcaattggataggatcctcttacttttgaccgagttgttggtgaagattaggtttcttttggttcaagtgattacgaagatccagtatttggtggttatagttgctaacagaccatgtcctactcatggaccttgtcttgttcatggacctcgtccttgagtagctttcagttttactcgtgcctgtactttcttgatcattattgtgacaaatactttctcctcctcgcgttgattgactatgggttctcatgcatcatgaggtaactctcgcctcttcacgtcctgtccttctccctttggtatgggtaattgcatgccccttactagggtttgtacgtgccccttccctattagtttaagaaggatgttggcgatgcctcgttggtgacccacgtgtcccaggttgagtcccaggatttccatcgttcccacaagggatttttcgttccctggtacctagtccacttcttttctcatttctgtgaaaaggctctgattgatcatttggttgttcattctcaggaggaccctcagtttccctaggttgctcttcctgagtgttttgaggactctcctgagctgtgtcctgcctcttggtttgtgagccacgaggtctgcctcgtggtcttctcactccacgattaggttggttttgtgcgttgttcccttgtactgccctaggtgcggctgcctcccattcccactcagcatttcatcggttcgcctcctcccagcggtgctt

SEQ ID NO: 103834 - DNA, 1598 bp, Cannabis sativa
tattaatatttaaggagtatcgttagtcaatcgcaacgcgacatatcgagaaggtgctaggcaccgctaatgcctaatagcaatgctcctaatttattcaaccgtatcatttaccctagagtttgagtaatttttcaaactacacttttaaaaatcggaaaaaaatatatatgtaatttagttagttacaacatatatttgtataaaaaataatatttatagacataatagtagacttggtgtaatagttaaagtagattacatataaggtgaaagattcaaatttcactaacaacactttattttatctttttaagtttatttttgcctctaggttgaaaacacaaagaaatacgcctcctcactttaaatttcgagtccaccattgtgtgcatgttgggttagctaggtctatatttattcgtgttttttaaaatataagtcgtatcgtgctgtattaatatttttaaagagtaggtatggcacaacctgtacactcggtattttcatatcatgctcgagttcgtaccctactctactcggctcaacccgttttcttatacagactcgaattcaagctctattttctcaaattttatttttataattaataaaataattactaaactctatgtgttttttcataatttcaattatttttatataatttttcatcaatatcttacagataatcataaataaaaaatcattagaatgattaaaatttgaatgtttattaataagtactcaaatattattatcaaattataaggatttaaatttgtcgtgttttcgggctggaccattcgtatttacgtgtcgtgttgtgcttaagcctatattttcatgctatgtcataccaatttgtagcattgtgctatgtcgtgcccaagcccatatttttttgtgtctgctcatgctcgtgtcgatttcatgtcgtgtcaaaaattctggcccatatttacagcactactgcatacacaggcgaacctacattagataaagggagtagtgggccctatttaatcttttgtgtgaacatacaaatatagagtttttggcggttaaactctcacaactatcacttcacttgcatttaattttctaagctcaaattttagcgataaaactctccaaactacaaaactgttagtaaatttgaggtgtcatccatttactacagttaatgtaacgctctagctattaggcacactacccaagataaataagaaaccctaatcccctagacgggattactaataaaataagcgaggaaattaaactttaaatgcaaacggaatgaaaataaacttgtaataattttaactttacaaacaaacaaaagttacatgtctcgggatcccaaaaacgagttacaaaatattactaagtctgtttccaatagccgacctaagcagcaaaatagagttacaagaaaatcatcactggtatcatcactggtagacccaaacgcacttggtctagcacttggtctagtgtggcccgaacatgtacattcaccgtccagctcctatactcaaggcagatcaataacagatttaccatttcctgcacagtagagcacccgtaagccaagc

SEQ ID NO: 103835 - DNA, 616 bp, Cannabis sativa
  modified_base (432)..(433): a, c, t, g, unknown or other
aaaaaatgcagaaaaataaatctttattttgctaaaaatcccttttatgaaccttactcaaaaatgggaaaattactcatttgcccttaaagccataaaacacccacataagtatttcaagggtaaaataatcacttgcacaaacaaataaattcaattaattttcagattattcccacataaataaaatgccaataatgaatccaaaaaattatatttcggccccgaacccggttcggcccgaaatactcggttgtgactataccgcgccaacttgtcagaaaatacctgaaaaaagacaacacaagcatactatataataatataatccataagcacgtaaataaattaatttcattgttttacccttctcgaatcaaaattactaaaatgcccctagctcacctacggggtcttaacatgtcatatctnntattaatttacatataataaattatataataatataattccacaataatactcaattaaatagttagggtttttctaatccattttcttaattccagggtattataattactccctccttataattttgtcccaaaatttacctgaacaactccggatatttctactgcatatccgtctcgag

SEQ ID NO: 103836 - DNA, 1502 bp, Cannabis sativa
aaagaaatagggtttgtggggagaaagaaatggggaaacgttaatataaaaaaaattaaaagaaaatccctttattgtttattgtttttcttttattgttcgataaattcaattaaaatttgccacctttaattactttattttatcatattttttttatttattaaaagtataattatttttttttttaatttagggttatgatatagtgacgcgtcactgtaggccagtaattttcaaattaataaaaaaaaaaaaaaattgggttttaccttttattgacccacattacaagagactaacagtgaacatttagagtctacttgtgttggtcactaaaaatactcctaaagtggagtgtatgcatgtatttttaaaaacattattattaggcacttgtgtctaatcttggattaaaatccttaatataaactcatatatattagtatattgttatttgaaatttaactgatcaaataaagtgatcatgttagtaataatttttattaagtattaaagtgttataggctaaatgtgtagataccttaagtgatatttctaattttattgatgtgctaaattagaaattttaaaatttaattacctactaggttttataaattagaaatatattggtagtggtcccctaaaaacaagagatattattcttatcttcccccatcgagagagaaaactagagaaccctaagtctttttaggaagatcattactaataattacatcaaagatcatatctatcaatgaataaatatacactttcactatttgagttattatctttgaatcaacgaatgtattctttaaatctatgtttatacacttacaataatatgtaatatgttcatctatgaaattaatcttgatattgcatattttatgagtgataaaaaattccaacaagtagaactagatctatatttaattgattatgtgaggatttaaggtttttgtctaaaaatttaagaattttttaaaaatctttatatttggattttgatctttaattaattaaatttgattttttttcatatgatatatatttaaaatttgaattcaaattatttttttattttacaactttaatttaaacatatataatttaaatttaaatttaattatatatttaattatgatattattttattaaattatatatatgtgtaatttaaggacactataattaaatctcattagcatttatttatatattttatttttaacttgataaaacccaatattaaacatttaatgtttaaaaataaaaaaaaaaaaataagagctaaaaatcaaagttaaaatggtattaatatttacttattctataaagaataaagactcaatgtcagggttaaaatggtattaactttaaccgaaaatataaaagaaaattatcccatatactattttttttttcaaatttacggtttgggtttctcaggtagtttctatgtgggttgctatacgaattttggttgcgattta

SEQ ID NO: 103837 - DNA, 544 bp, Cannabis sativa
gacctggacctaggaccagacctagattggggacccaaactcaaaattaaaaccagaatcgggacccaagattgggattgggacccaagacccgacccggtctcggtcccagacccacacctgaacacggactggacccaggatccgaatcgaaacgagaccgagacccaagattgggatgcggatcttgacccacgacctagggttggacccaacccgtagtcggtgtctagatcttcgaattgtactaggaccctaacctagaaccatttgtagaccaggacccaaacccaaactcggacctgagacccgtaatcgaaacaagaagaaaaataagtaccttggaataggaattgcacttggacgcaaaactagctctagacgcgaacccggaccaagacttgcgaaaggacctgcgacccaggaaccgtgactcgggacctggaccagatgccagacccgtacaagaacccaaactcaaactcagacccagactcaaaccaaaacccgaacccaaacactgactgtaacccagacccagacc

SEQ ID NO: 103838 - DNA, 501 bp, Cannabis sativa
caaaggccttgcatcttccttctctagctattccagatgaagaggagagtgaaccacttgacaaggatgaggttctttcttagattgtgggtcaaaagatggtgtggcctcaaaattttgttatctcagtcacaaatttaacttacatgtatgtcgtgcttcacaaaatttctacaacaaattggaaaccgacttctcacactgcaaccatcttctttaatatggattctttcttgtacaaggttgaaactggacatgacgttgattaggccagcgtcatctatgaccaaatcattagtttttggaaaggtaacaagaaaaatttaaatcttccttttccttaagttatttacaaagtcttaagtatgcagaaaagtgatctaaagatagagcaagaagatttggtggctccttccactggtgcatcctacaaggcctctacaccaattcctgatactatattgaaccttcatcatcaaagaaatccaagcctcaatctct

SEQ ID NO: 103839 - DNA, 533 bp, Cannabis sativa
tgtgtatcctttttaagtttggaatcatataataattgaaacaagtttatagaatgatgagatgatgtgatgtatgttttatatttattatcttattatttggagtatagttaagatattataatacagtggctatatctcccacattcaaaatgtgcttgtaggatattaaactattataacagcatgaattgggtaatgtttaagattaacttttatatatagatgttatgtttgtgataaatgttgtgattggctctttgtagttgatatatgaaatctagtaaatattttgtgtatttgaaatcactaattgaaaatgttgctgctttatattatttcttaattactaactttgttcaataatttgtcaatttacaagtttagttatggttttagtttctagtaagctggtaatttacactttcctattactgcagtatgtttttaatttagttacttagctaacattgaataattcagtatgtaatgaatactaatttagatagaggaacttgaagttttcacaatca

SEQ ID NO: 103840 - DNA, 1364 bp, Cannabis sativa
ctagctatttacacaacattataactaattaattaagggtaaatagtggcataagtactcaaagtttcaaatttgtaagtagcataatctcaatatttatttttagcgacataagtacccaatgtttgtaaaactgtaatttttctctaatttcatcagtacgaactctgttattttcttaaatagaccacatataaggtccagattctagatcattgggtctagacaaaaatatatagtatcagttacttccaaatgttcctttataaattcaaaacggggtctgacaaaactagagaaaaattacaattttacaaacattaggtacttatgccactaaaaataaacattgggttatgccgcttacaaacttaagactttgggtacttatgccgctatttacccattaattaactatatatatagttcattttaattatagtgatttaccaaccataaccagaaatcatacagttaattaatttaattttatcatctgataaaaaaatttactttcagaaaatgtaactaattaaaaattataattcttatgttatcattaaaagtttcgtgactaaatttataaaaatcgtaatttattgtgactaaacctaaattagtgataatttatatttaaataatatatttgtagtcacaaataatttttcattttaactaaaagttatatttagttacaaaaaatttatattatgactaaaaagttatcatactaagagcatctctaatagtagcattctttaaagatgctaaaaatttacacatcatctaaaaatataatattttattttatctattttccacatcatatttggcacttttatttctaaaactactctaatgtataacaccttttaaaaatactataattatgatctcacacattattatttaatatatatcctaatttttagatacaataacatttagcttcaattttttattaaaaaataatgaataatatcaaacaacatagcatccatgtaaatttctaaaatgatatcctcttctctctaatagtataacatcttaatattttgtcacgtaatatgtctacttcactaagcatcctctaaagttttactattggagatgctctaaaagacactagtgatgtctattaccttcttgcgtgtcaatatcgatattaatgtaattaagtatctgatcgcatataattttatgtaataacttttaagtagtatcgctaatcaattataaaataatatatccagaaagtgttagctagacaccattaaacccacaataatgctctataaatatagttttttttttttttgaaaaatgaaatatcaacttcattaaaactagcattctgaatacaa

SEQ ID NO: 103841 - DNA, 642 bp, Cannabis sativa
atatttatactcgcaagtgcacgactcgtttcggaatatatagttcatgtaagtgcaaggtcgaacccatgggagttgactaacatcaaaagaaacttttttaaacaaagcaaggatattctaacctagttccaaatatttgatgggattttggttttgaaaaatacataaaagacaagtaactaaaatatttaagattaaagatgagtgagtacaaaaataattttcaaataagatgtgtaaaataagattattaagatattagaatccacaaaatgcaagttgaatagtatctataagtatattgatttccaagttcatatatatagttgaaataaatcacactatattttctaaaatgtatttcctatttaagcacaagtttctttcaaaaaggtaggatttttcttcacttataaaatgtataatttctaagcattaaatgtgttacaatttaatgaaactacacaaaatcaaagaaactatgtttagacaaaatatgatgcttatgttctagaaattagatgtaaacaatttagtgaaagacatttaatcaaagagtattatatttttgcatgatgaagatctaagtggaaatatgctctaacaatcaaaaatacatgatattaaagatgaaaaaga

SEQ ID NO: 103842 - DNA, 514 bp, Cannabis sativa
  modified_base (50)..(60): a, c, t, g, unknown or other
  modified_base (227)..(230): a, c, t, g, unknown or other
  modified_base (376)..(380): a, c, t, g, unknown or other
  modified_base (454)..(455): a, c, t, g, unknown or other
aatttaagttgataagaaaaattagttagtaataactaatttataacttnnnnnnnnnnntttaatgaaataattaaagtaagttttagaaaaaaatctagttagttaaaatccttcatttaattaaatacaagaaaaatacaaatagtttatctaaaaataatatcttaaactaagagtgtttttcttaaaattaactttgaaatattaaaatgaaaataaatttnnnntattttaaaagttaattatattgctaatcaattttattaggttaaactaatttaattaacctaatacagttattcaaatcaggcaaatgagtcttcacaatttaggtagttcatgtgagggatagctgggttcagtatgtcgtacnnnnntctattggcccccatctctcacacaagaccgaaagagaggaatttcactgtaaaataaataactgttattaatnnaataggtccaaaaactaaatggaactaaataaaatctatcagggtgtgacattttattt

SEQ ID NO: 103843 - DNA, 663 bp, Cannabis sativa
  modified_base (76)..(90): a, c, t, g, unknown or other
  modified_base (635)..(635): a, c, t, g, unknown or other
ttgaagcggggacgttacacatcccaaaaccaattggcaatgagaggagtagccctttcatcttatatatcacaannnnnnnnnnnnnnntagcaatgtgggactaactcttaacattatcttccacgttaattaatttaaaagtcttttattcatagtatcatttggctttgagttggatctattcgtgtgtgaatagataaaattatttatgtgtatggtataaagttaaaatctaaatcttacgtaggcataattggaattttgtcattgtaggcgataattgcaatgaagggacattatattggattggatttgtatagacaaaaatgtgcaataggataccaagcatgttgtaaattaatataattccacttaagttaactaaaagtaagataataaaactaaaaagagtttaaaaatgatgtaacccattcatgcatgtggctttgtcctttacattaagggctctctatatggattgtctcgcccaaatattgaataaaataaaacctagggttaattggaatgacttacaaatgtgtctaaaatagtgagctcactcatttcaaacccacatttttaattggtggttttaaattaagccttgtataacagaatttttggtttatganaaactcatgggtgactttttatttatat

SEQ ID NO: 103844 - DNA, 647 bp, Cannabis sativa
atgactggcataagtccccacgtcatcacccacgtcctcaacgtcaacccggacatgccgccggtccaacaaaaacgacgacccctcgatttagtgaaggcccaggccttagaaaaagaggtggataagcttttagcaaacagcatgatccgcgacgtttactacccggaatggctagccaatccggtcctggtaccgaagcctaacggaacctggcgagtttgtatagacttcactgatctaaacaaggcttgtccaaaggactgtttccctttgcccaagatcgatcagatggtagtcgccacttctggatttaagctactgtccttcatggacgcatacaccggttacaaccaaataaagatgcacgcggcagatcaagagtgcactagcttcaggttcgataagggggtatactgctatctagtcatgcctttcggattaaagaacgctggtgcaacctatcaaagaatggtcaaacggatgttcaaaggcctcctggggcgaaacatggaggtgtacgtagataacatgttttaaagagtgcaatagccatgcagacgacttagaagaatgttctgaggtagtccggagatacggaatgaagctcaacccaaagaaatgcacctttggggtcaaatcaagaa

SEQ ID NO: 103845 - DNA, 583 bp, Cannabis sativa
ttttattatttcttaaaatcaatggttttaaactattgttgtttcaagatatgtatattatacatttactatttaatttagtttgcatatttcgataagtgaatatatgatttactaatatttgttagtgatccaatataatctaatataatcaaagtgataaagaatcacaaaatgattacttgaaaagctttctgaagaagtcttgcatacaattgttacttgaagtagttaaatatctttgtatgtacctatatgtatagtttttatcaagtcatgataattagactgctgaatagtctattaataaattagaccagttgttagaaagatatgaaaaaatataaatgatatattatggttatatctatttgaacattacaacaatatgatgaaattgacatgtaccttttaaattatacacatcattgaattaatgatagtaattcctaaagaaatataaagttttatatgcataatagttatttctgaagagtatatatgttttggtgaataatataattattttatttgtgtatataaaaataaaacttgtaacgattacttatatgttgtgatttta

SEQ ID NO: 103846 - DNA, 551 bp, Cannabis sativa
tacctaaccgttaagtgtaaaagttaataatcacgtgacattccttgatttgtcaaagtcataaatttatattatttatttaaaaattaatttaaatataccaataataaatgatataataacttgacatttaatggtcaggttgaataattttatcctgtttgtaacataaatattaaagtttaaaatattcatctcaacccaatgaacccaacccaacccaccccatatattattgtactaagtaagtagggttgggttgtacaataaaaaaaattagtgaaaattacatcaaatattaagtaactagttttcataactggttttttttattgttattcataattgagttttaagtttcaatatttttatttgattatttcaggaaactggtttttatttgtttgtttttattttggttattttactaactgattttttatattccactattttttgttattcttttatgatttttattgcatttttgtctctttaatattctttatttcttttttttttctttatgatttttatttttgattctcttt

SEQ ID NO: 103847 - DNA, 513 bp, Cannabis sativa
cataagtccacatgtgattacccatgtcctgaacgtcaatccagatatgccaccagtacagcagaagtggtgtccccttgacccaataaaggtggatgccctagaaaaagaagtggataagctgctagccaatggcctaatttgggatgtgtattacccagaatggctggccaatccggtgcgggtgccaaagccaaatgggacatggcgggtatgtatagactttaccgatctcacaaggcctgccctaaagactgcttccccttaccccggattgaccagatggtggacgccacctccaggtttaagctattgtccttcatggatgtctactccggttataaccagattaagatgcacgttgcagatcaggaatgcactagcttctggaccgataagggggtatactgctacttggtcatgcctttcagactaacaaacgctggtgcaacataccaaagaatggtaaactggatgttcaagggccttctaggatgaaatatggaagtttac

SEQ ID NO: 103848 - DNA, 694 bp, Cannabis sativa
  modified_base (440)..(450): a, c, t, g, unknown or other
ggtgttaaataacatacttgtgagtagatttaagaacctggtaaaataatatccaacactaacttgggggtgctttaaaaatgtaaattagttttgtgcaatataattctctgattcatcaaaaaaaaaaaagttagactttgtctagtttatgaattttcactaagatatggcttgattgtgaagtaatagaattttaggatttatttgttaataaagagactttatggagtctaactaataaataatataaatgacaattttatttgataattaattttaattatcaaataattagttttgtcatttataggattgaaagtgcaaaaagtggtttttgtgaaaaatagataaatggtttagaaaaatggcaaaaatctaactagtgatggacccacataaagggccggccacttaaccctatttttgctctatttttnnnnnnnnnnnattccaaataattcaatcctaaccctaatagaattagtataaaaagaagagtaaggtctcactatccaaactaatgcttctgtagctttaaacctagttttcattcttgacagacaactagtgttttgagacttcttcttcttcttttctctcttctaatttgaaattcttagtctttttaacaatcaaaatttgagccttagtgattgagtgcatgcccacccataacaagttagtcctcaat

SEQ ID NO: 103849 - DNA, 884 bp, Cannabis sativa
atcaaataatttaataagttactattttatttttatttttatatttagacattacaaaattaaataaaaatagacttatttttataaaactattttaataaatttatgaaataatttttaaagaaattgaatagtatctgaaacatcatataagttacattaaaaaaaaaggtaacctcattgtatcttaaacaataaaataacataatatagcctaaaaatataaaaaagaaataaaaaagtttcttttaatattagtcgttcttttttggataccgagaaatatatgtttctcacatattaaaatggttattttattatttatatatgtgtaaaattcggaaatacattttttaattgaaaagtaaccaattgatatcttattcacattgatatcttattcacattaaaagcaactaaatggttatttttttcttttcaaaactcccaaaaaacaaaaaatttctagaaacgagatttttccattttttttattttcggtaattgttttgaatttcggtatgtatgctgacgtggcacaacggtatttgtgtaaataattttcttaaaggtatttttgtaaataaaattaattttaggtataatattaaaaaaacccctatattcaattcatattaacatgtatatatgacttcattgatgatcacaatacatgatacgaattattttatattgcgtatacagtgtttttatctgaatatactttagtattatttgcagagcaaatggtagatttttgttttgcatgtgttgtgggacccatatttgtcattgcaggttacttttagaaagggaaattttatttacaccctaaaaagttctaaagacaccctattttgataattttgattttatataaaatt

SEQ ID NO: 103850 - DNA, 502 bp, Cannabis sativa
tgaccaaagtcactcggccaaagaatgaacatatgtcactcggccttgcgctgaccagagtcactcagccaaagagtgaacaaatgtcactcggcctcgcagtgaccagtgtcattggccaaagagtgaacaaatataactcggccttgcggtgaccaaattcacccagccaaagagtgaacaaatgtaacttggcttcgcggtgaccaaagtcactcggccaaagagtggacaaatgttactcaacctcacggtgactagagtcactcgaccaaagagtaaaaaaatgtcactcagccccaatagcgactcaaagtcactcagcctcatggtgaccaaggtcatttgaccgcatggtgacttaggtcactcgacaagaaaaagagaaaagagaaaaaaaggggtagatgaggttcaaacctaagacctcctagacaatgttagaagaattttccactactccaaggtgctgattgtgaagtgaaactcaagcaagggaggc

SEQ ID NO: 103851 - DNA, 736 bp, Cannabis sativa
caccctctcagcacagaattaaccttatcctttaaaaaagcaaaagaatgatacttagatctagataagcactgcggaagtcctaaatatttacatatgaaggcccgatcctcaagattaaacgcattaaagaaagtagcacgaatatcagacagagtattaggagaaaacaaaatagaagacttagcaaaattaataacttgtcccgaagccttagaataaacatcaaaaacctcttgaagggctgaacaggaagctctattagcagtacaaaaaacgagactatcatcagcaaaaaatagatgggaaagagatggggcagttcgagaaatagcaactcccttaagcataccaatatcttgtttggctcttaacagagcagaaaggccctcggcacaaagaatgaaaagataaggggacagagggtccccctgcctaatacccctagagggctgaatggaaccacatacagagccattaatcaaaaaagaaagtgaggtagtagtaatacatttcataataagagaaacaaatcggggaggaaaattgaaatgaaacattacactctctaatcaacacggtcaaaagccttggacatgtccaatttaagagcagcccacccaatcttcccatttttcctagaattgatagcatgtataatttcctgggcaataagaatattatcaaaaatgacccgaccagagacaaaagcactttgatagggggaaataatttt

SEQ ID NO: 103852 - DNA, 626 bp, Cannabis sativa
caatccccaggcgaattttgaatactatggcgataccaaagacatgtttctctagtactgcactgcttaggcagcctatggggaatctgaggcgaccacttccacctctccaactggtcaaaatgttgaagtgcctcctgctcagacaaatgatcctccatctctagctgacccagccaacccgtacaaagagcctgggactccagccgtttgaatgctttctttttctatctttttctttatctgtttggccataaggcctttttttaagacaaagtggccgaccaagcggtctttaaacttggaatttattcttcatttttcagacaactagctggccgggcagcttttaatcttgggtttgcatgcttttgttatctttaatgaatttcattctctatttataatcatcgtgcaattgtgtttgttttatttttactgaatgttttgtataggtataggtgccccccaagtgaccgagtagagttatgactcttggtcactttttacaggtatacgctcttgtctgtctggggttttgggttcgaccaagccttttgtacgcacttgatggtaaattaataacatgctaatagattcgactcaattttgaattttgaaataaa

SEQ ID NO: 103853 - DNA, 762 bp, Cannabis sativa
cttccggcccagcccaggcctgttgaacatgccattcgaattagggagcccagttcgcctgctcggccatcttctcccgaactaggaaaagggaaagctgccatggcggagataagggtcttgtcaggtgatgatggactcttgagtcttgctcggacaatcgctttgcaggatattccgtcttgttttaaaactttttgactatcatgctttatgattttgatgccttttttcctctaaccatgttgttttttgtttcgtgcagacatgtctctgaagatgctcgatgccctgaagaagagagttggaggaagctcaagctcatctcctccggccaagaaatctaagggccatgaggtgaccccttccaaggaaaaggcatcgaccggggaggttattgacctttctggggagataactgttgcggatccttctactccaaaagttgctaaggccaaagattctcgaggaggaagctcgaacaggcctgagcgatcaaagggtggatacgagctagccaagagcggatctgagcaggtgcaaactcctactccacccttgctagtgcttccagaggccaagaaaggcaaagagatgctcgcccattacatgaatcggttggttcctgaggtaagtgagcagctggctggtgctgataacgagtcttccctggagttgatgatgggaggagtcttcaaggaattcaccagggtaagtctttgttgatagtttgcttttattcttctttacttggttcagact

SEQ ID NO: 103854 - DNA, 645 bp, Cannabis sativa
tggcattgaaaagttcctggaacccaggtcatcgtagtaacatcatgtatcatggacaccatgtcccaccatactaacgcatcttcttgaaactaaaaagtggcacagaccactctatcattccctgtgacccccatgaaatttaatatcttggtgatcatagttagctactgcttggctttcataacatccggacctcccaggaaaactggaggtgcctgcttacggaacctttcgtacagaggttccatccgattcactgcaactataggttcggcctggacagcaggggcgggtgccactggaatttctggagcaggcactgcaggagcaccctgctgtctcaatcgctggatttcattatcttgttcctcgattatggcttgcatttctgcaaacctgttttcccaattctgggcttcctgagcaacatgggcagcctgtggcaggttagcatcaccccgaccatgtgccctgcccctgggacctctacctcggccccgaacatttggaggaaactgagctccttgaccttcatttgacccgactgagttcccctgactcctggtatttcgcctggcgtccatctaatctgaacagcctgcgtaaccaagagctagcatggtcagatcatgatcaacgaga

SEQ ID NO: 103855 - DNA, 551 bp, Cannabis sativa
ttttatattattctttattatttttttatagcttaatattataagaaacacctaaactgagataaaaaaaaaacgatgccaaattatacaagagaggccaaagatatatacatacaaacaaatgaccaacatatgactaaatgtggtgttaggaattgtcgcctcttctctctatatatagctatattagctagcagagagtaaatagtatttcattcttcagtacatgttcttgttcccatcgtcaaaagtgttttaaactattacaattttccttttattcatacatatatatatatatatgcaaaaataataattataaaagaaacaaagaagatgctctatctctgatcgttctcctgtagactttattaaacattttcattcaaaatctcttgtcttttttctgatataaagataaaatacatatacatatatatatattctctggcttcattaatccaccattattttctgactgtatatcatccatagaaaagccattataatttggatataccttgatatatacaaagttgtccatatataaa

SEQ ID NO: 103856 - DNA, 529 bp, Cannabis sativa
gttccaccgatgagcggcatacaattttccgctacccctgaatatagtcagggtcaggccttagcccctgcgtcttctcattttaggaactcgtctgggataagcggacaagccccatctcactccgctccgaccgcaagcttagaaggtccctctcaaggctctcagagcaagaggtcctcaaaaggcagcaaccggacagaggataagcggcagaaaagggggtacactcttcaatatacccagtacacggggctaacagactcccaagagcgtgtgtatttcgctactaggaaaaacacgcactaccggagaccacctcctctgtacagggatagctcccagagggattccaataaaagatgcgagtatcacaaaaacattgggcatagcaccaatgaatgcaaaaacctcaaggacgagatcgaaaacttcatccggttgggacatctttacgaatggatcaagaatccgttgcctcacctcaatccggttcaggcaacatgacctttgccccaaggagcaccag

SEQ ID NO: 103857 - DNA, 808 bp, Cannabis sativa
gatgtattttgagactctattttgtcgcttaggtcggccaaaggaaaagaacttgtaatagtgttttgtaaatacttttgggatcccaacttttgtaacttctaaattatatggtttaaattattacaagttattttcattctgtttattaataaagtttaattttcgcgcctatttttctagtaatcccaattaggggattagggtttcataagtttattgggaagcgtgcctaattatttagggcattacaaatatactattaaatgattttttccacgatatacaatatcatataaaaactatattctgcaatcataagcatatatactatagtgaaaaattaatataccacccgtattgtggaaacaatttatatatatatatatactaagaacttaatttaatattccacattttttttctttccttcatgatatactaatgaacatagacaatatttcctagtgaaatataactatacctcaaacttaaattaatattccacatttttttaatttctatctttcgttcattatatatcatagcacattaaaataatcacaatcttaaactaatatactacctctcagtgttttttagtatactattgcacataaaaacgatatactattgtgcaaaacaacgataccaaacacttaattattcaaggttataattgtaatttcatcatcaaatttttaagtgaatggacattttgttaattgtctataaaaaattgtttataaaaagggacatttattaacttaattgttagatttatggccattttgcatcttcgccctat

SEQ ID NO: 103858 - DNA, 2045 bp, Cannabis sativa
tatgattgttaaactagagtcaaatacagtatgatattaattgtaactctttgtacctcagtggctcattggctctagctggtttttccattaagtataaatactaactatgtattcttgattcataataaaaaaaaaaaattaattctttttttcttttaagtttcctttatagtatggtggtgtttgttttaatgtaatataatgtaatgggaatggtaattgtaatgtgaatggtagtataatggaataagaattgtaataagaatggtattttgatgattggtttaactctgtaattaatgaacattgtattcaaataaaataagtcttatattgacaaaaatatttttagttttattatttttaatatttaaaatttaaattaaagtaacaaaaaaagacaaaagaaatattttctaacaatgtaatcatcattatattggttttataatgtaatggggattacaatacatactgtaaggaccattacaatataaaggcattacaaagctttaaaaatgaaagcaaacaatgtaatggtaataatgattccattacaattcccattacactaaattaaacatgctcacttagaatggtagtgtgcacttttattgcttaaaaatgttggtttagaaacatgactattatgtccttggatggggatatattatttatttttaacttgtcatttcttttataaataacttaaaataaaactaagtataagtgccttgcacattttttttaatttttgttacataatgtttgctttaaattttacaaaacctatatctttgttcctctaaatattctataagtaaataataaatattattttgttatgacttatatatacacaattatattttactaaccaaatataatagtagtacaaatattactttaatacaaaaaatcacttgcataatcatacctttagttatagaaatctaaataaaaataaaaaattaaactttagataaaactaatatttaggcacgtaacttcaaactagtatatataaaatgtggttaatggtgtatcaatgttgtgtaaacaatactcttactgtgtattaattttcatacacttatttaaacaaatatttacaaatatataaaagttaataggttgagatttctccatctcgttatgaatccattagcatttttactggttcgttgctttgtttccaccaggtcatggatgcttatggtcttctttgagctcacaaactgtgccatataggctttttgcaagtcatcctaggtatttatggatcctgggggtaattgagtgtactaggtgatgttttctctcttggacaaattgtctaatcaatagtacatctgattgggcagattcaccacatgcaaaagtgcaatatgccaaatgtccatggggagaaccgttaattccatcgaactttttaaacttttgtctgacatagtttggcggaaatgagatttggtcatagtgagctaggtatggcttatgatatcccagaataggcatgcatttcatcctccacatggttgtctacttgtgaggtgttacattctgctggcatatgatcattgctaaggttaggactgagtactgaatgctgaatttgatcaataaaaattatctgtcccatttttgtgtctcattttatgttcctttaatataaaattctcatgtattttctatatattttttttgaataagtattttctatatttattatgtttagaaaaacaaaataaataagaattatggattttttttttctttctttttttttttttatctctcctccataaattttttaacactttaattactcataatgtgagaaaatataatttttttttaacaagtaataataattttcgaacattttttaaaaaatatatatataattttcaataatattaataataataaatagtctacttacaaataactaaatgtgtaatgaccgctctagtatatggattagtaaaggcaattagcactaattttaattattttattattaattgtgaattaattta

SEQ ID NO: 103859 - DNA, 943 bp, Cannabis sativa
tccatgagtttaaagaactgatgagtggcattagaggcagaggatatactattaagtctctgggggacatttctcatcaaaacaagtggaatgatgagattatcaagcaggtgtttggcacggagttagggaatcggatctgcaacattcctagaatcccagctcccttcacagaccagatctattggaagaacaatcaaaaaggtaattttactgttaaagatgcataccaagtggataatgttcatagatttgctcccagtaaaaggatttggaaatggatttgggaagagggagtccttcctaggaactctgtgatgctgtggagagttttgaatgaggctattcctaccaaaaatcggcttcatttccttcaagataagacctgtagcttgtgcgattatgatttggaaaatgcttcccatcttttctttaattgtaactttgctagagctatttggtttggtggtcttttccccgtaagagttgatggtatagtctcagagagtttgatcacattgctggaaacaatagttgatatatatcaaggtaatagcagagtcgatatactcaactatcttggatgtactctctccgaaatatggcaccaaagaaatgcctattgtattcgggatgctgcaatcaatattgatctggttttgggaagaataaggaaaagtttcttcgaagttcagcaggcaggtgccaatagcattgggcataaggtcactgatcaagtcgcagatggctccgaggctttgcagaattccattgatgaacaggaaagacagtgctgcaacattatatttacagatgcctcctggacaaatataaatgcaggcatagcttcaatggatattgacactttttctggcatttggtttgttaaagctcaaaaggtccaagctctttcggtttcggaagcagagttattagctatcca

SEQ ID NO: 103860 - DNA, 614 bp, Cannabis sativa
  modified_base (517)..(520): a, c, t, g, unknown or other
tccactatgtgttaataatcacattaattatattagaatgaattcatacaaaataaattaaaaattcattggtgataatgaagtgtgttttatttttttttaattacacattaaatatctgtatattctagatgaagttatgagaataaatttttgaaatttcaactagtattgtaaaaatttatgaatagttatgtaataaaattacataattattaaaatatagttttgagttttaaaggaatcatatttttaccaatgtataaaaatgcttaaatataaaatcttattaaataaaaattatctgtgtgctaaatttttaatttaataagatcagatttagatgtagattatgatagatttacacaatttataaaaaaacttaagatttaatatttctatctcaatgaaaagtgtgaaatattattttataaatgtttcaaaattttatactttatgataaaactattaaattcaatctacataatttcatgtgggataaattaagagaatttannnnaacatattatcctaattaattatataaacataataaaatccttgagaagtaagattattatatccacataattaattataattcatgtccatta

SEQ ID NO: 103861 - DNA, 1729 bp, Cannabis sativa
gcttgaggaaacagtatatatgcttcaaccacaaggctttgaggatgctcagtatccatctcatgtttgtcaacttaacaaagccatttccgggctcaaacaagcaccacgtgcgtggaatgacaagctgaaacacacttcatcagtggggatttcatagcagcaggtcaaatccctctcttttcatacatggcacgggttcaagccgtgttatattgctggtttacgtggatgacattttgattactggcccgaattctggattgatttcttctcctcacatcatttctggtttaaataataaggcatgttctcttaaggatctaggaccggttcattactttttgggagtagaaatacacagagataactcaggcatgtttctttcccaatcaaagtatataactgacttgcttgtcaaattacatatggagggagctaaagcaaaacccaatcccacaagtgctgtagcaaagttggctttgaatattggtgagccactggaggacatcacattatataggattacacttggtgctcttcaatatttgtctctcacaagactagatgccgcagtcataataaacaaacttagtcaatttttacatgcccctacttcaacacattgggaagcttgcaaacgagtacttcgttatcttaaaggaacaatttcacttggtctacacattcaaccaagttcatttccatctctaacagcctactcaggtgccgattgggcaggttgcatcgacgattgacgatcaacaggcggctacttaatcttcttaggagataatctagtgatccagttggtttgcaaaaaagcaacatgttgttgctcggtccagcacggagaggaagtttagggcccttgccaatgctactacagaaatacaatggctcaaatctctcttatctgagctacaggtttcaatgcctcactgccccaatcatttgggttgacaatcaaagtgctactgcactagcagccaacccagtcttccacgctcgttcaaagcacattgagatcgatctacaaaaaatattacatgaaatataattcaatataatactatacaatacaatacagtgtaatacgaaataccaaacaaacccttaataacataatgttaattaggatagatggtacataacgggtttccgttattactgttgaaagttagtttttctgttatttggcatttctttgcttttgtactctgctattccatataaataaagcttccctaagtttagttgagtgagttggttaatagcactgttctagcttagtgtttgaattcagagattccctgttcatcatcttcttttccactctttgggtctgatattggtgtttgtaataaatcgaataattttacatagaccatatgtttaaaacgaagttaataatttggtctcgtccagggtgaatgaatgactatataaatatatatatatatataaaaaagacatgcacacacaattattattattattattatttatggattcataatacatggacataaaacatagaaacacttaattaagtacatgcatgtttggcactacgtacgtactatagtgcacataaagttattaatcaccaaacttgctgcgcacggaattaaggaccagcattaatattacattttattggcccccaaaataattaagtagtgaccaaactcttacttaatttatataaaaccaacacagacagtac

SEQ ID NO: 103862 - DNA, 546 bp, Cannabis sativa
cacttcaaaagtctaaattgataactaatcagattgtaatgggttttatttagagcacaaaacccaacactattttattgcttgggacatccaacaagttcgtcattgccacttccaaagagtgccaacctatacatgctccatccccaccctccagatgcgggatagagctaatcatattttgtccctcccgattgataggaggaatatattgaggttagcctgtacaggtaacttctagagatatggtctatatattgggttttgtgccctaactaaaactctatttcaatgttatcttgaatattcatttatcaataaagaaatagaattattttattacttatttaatatattgcttggttcacatatttacttcatgatcatttgtttgatttataaattcatttaaatccttatcacattattattcatgatcattttattgtctacacagtgaaaagtaatcaagattatgtgaataaaatttagtctcatgatttatcagtacacaggatttctactgaattgaactaccatgttccc

SEQ ID NO: 103863 - DNA, 766 bp, Cannabis sativa
  modified_base (426)..(445): a, c, t, g, unknown or other
aaggacttaggcaacaactagttactaatcatagaccttatactatcatcaatatgcaaatcgaatttcttgggaggtaagtttgaatacaattaaaaatttcaacttaatgatctgcatatccaccaaatatttctccacccctatcagttcacaagatcttcaaccacttaccttcatgtttttcaacattgctagaaattcatgaaatttctcaaacattgcaaatttctttgcataaggtaaaatctagagtgatcgtctaaagaatttaacaataactcatatccacccctgaatgtacatccatatgtcaaatacagatgatcctactttcaagtggatataggcatattgactctttgcaaagaatgatcttgttaaaaccactatgaacaagattcaaatgccatagatatataagannnnnnnnnnnnnnnnnnnntgacttaggtttagttacaataaagagttctttgaatagtgcaagtggatcctggtcacagaatactaaacttaattccatacattaagttacagtttgaatccattgacagaaaatggatattaataacttgtgaaagtcatactgtattgtccaacgtattctaggaaactgaaatttcaaatttttatttggaatctaaaatttaaagtctaagacttaaatttataccaactatacaagagtgattattctttcttggaccaccactactaatctaactctaagtctaattttcctaaagtaaacatatacaagtag

SEQ ID NO: 103864 - DNA, 500 bp, Cannabis sativa
  modified_base (446)..(456): a, c, t, g, unknown or other
gtagtaattgacatgccattgacccttaatgctatgataggtcgacaagccctgtacgacctaaaggtagtaacgtccatctaccaccttttcctaaagtttccaacaaggcatggggtatgatgtttgaggggagaccaatagtctgcccatcattgcatcaacttggccttgtctaaagctaagaaagaaaagatgcccgccaagagctctgatgaagagccttacaaagggcaatgaagtctaggcaaaagcggggaggtactcatagatccttactttgggaagaactgaaagaagtggaggttgattccacttttgcagccaaaaaactaaagatcaagaaaggtttagtgctggaaataaaatcagtattggtaaatttctaagggaaaaccttgatctctttgcataatcatatggagactgttggaaattattttacnnnnnnnnnnnatctactaacaagtatgttgattaacaccctaaatagatcggaa

SEQ ID NO: 103865 - DNA, 1158 bp, Cannabis sativa
  modified_base (457)..(462): a, c, t, g, unknown or other
atagcaaatgggtagggcgaggtcatcattctaagttctgttggcggtacgcgaggtatatatgaaaacctttgacacttatcacatttcttgactaattcaaattcaactatgacttctaacattgccgaatctctaaacgcaacaaacttagcagctagagaactaccaatcacaacacaaatggagtcattgagagctttgatacaataatggacatacacaaacaggaaaaaagcacagaaaaccacaacatttttgacacctacagcagagaaaaagctagtcaacaactttgtggactcattgacagaaaatgtaaaatctctttaaactttaagttgcattacagtttcctaatagttgtttttcagtttgctgtacagtttgacaattgattatattgacctaatttgcaggtaaagccaataaacgagagcatgttcgaagtggtagnnnnnncaagatcatgggtgatcaatctaaaggagagaacatgaagttgcaaccgattccaaattgacgaattaccgtgtgctcatgagcttgctgtgataaaagagatgaacttaaatgtttacatttactgttcacattattacacgacaagaacatggcttgaaatatacagcgaatcaacatatccggtacacaatcacacaacatgggatgtaccacaaaacataaaagatattcttgttctgccaccaaactaaaaaatacgatctggaagaccacggaaaagaagatttatagctgattgggataaaaaaatagaacaggtgcagtaaatgtggtcaacatggtcacaactgaaagacatgcaacaatcaagcaataaaatagatacatcataattagttgaattgtttaagtctctatgagaattttgacagggtgaaatgctataattgatagattgttattaattggcaaagtttaaatagtttgctagtagttgcataatagtttcaaaacaattttgacacttattaagaatttattacataatgaatttcaatagaaatagtttttaaaagccagatataagtttttataagttttataataaggagaaggaaaaagttgcataacagtaagaaattgttatacctgaaattcggctggaggacacgtgtcaaggtaaagggaatgtga

SEQ ID NO: 103866 - DNA, 1169 bp, Cannabis sativa
  modified_base (67)..(67): a, c, t, g, unknown or other
cctacagtgcatacttttgcatattctgatcaattctccatgcttccgtgtccattccattgttccntataaccaagttgttgcatcaatgattagggtgatctcgtagtcgatcactctagtactttcgcatattgtgattaatcatccatgctttgttaaggtgagaatggacaccttatgttgcgctcaacaactatcaacacctaaacgatttttatatctaaaaccagtgggtgttaaggataggtttctttctctagctagtagggccagcgaattcttagagaaccttccatgtcaattccgacaatgaaaacccctacaatgcatacttttgaactaactcatcaaacattctcatacttttagtactagaggtactattcattttttcttcaactcttctagttgtcccgccaagaaatccaaaattttttaccactcaattccttcaatacttctccctcttgttttctcaaaattgtataatctcttaaaaaaatctcttcaaccacatcttcttcttcatcgataaacgatccatcctccctttcaattgatgaaattctgtttcttacctttctcgcattcaacatgtgatgaaaaaaatctcgagttagcatcaccctctttggcccacttgctattagctttcagtcatgcacttctttttcagcaaaagctaaattttgccattccttttttgtctttttactttcctccattaaagcttgattcccgccaacacttccttccaatttatccaattcgaccagccgtctttccaaagcactttttatcatctgattgttaccgaaagtcaacttgctccacgacttgatgttttcttggctttctcaaattcaacatgttatgaaaaaatcttgagttagaatcaccctctatggcccacttgcatttagctttcaaccattcacttctttcttcagcaaaagctaaatttttccattcaatttttgtcttttttctatcctctattaaagcttgatgttttctcggctttctcaaattcaacatggtatgaaaaaatctcgagttagaatcccccctctttggcccacttgcatttagctttcaaccatgcacttctttcttcaacaaaagctaaattttgccattcctttttttgtctttcttctttcctc

SEQ ID NO: 103867 - DNA, 611 bp, Cannabis sativa
ggcccagcttatccttcaaaatgctagaaatgatgacctttagatcccgaaacaaaatacactaaaagaagaggttgacaaactgttgactaataacttcatacgagaagcattttatccctcgtggatatctaaccgtgttcttgttctgaaaccaaatgggacatggagaacttgtttaaatttctctgaattaagtaaagcttgccctaaagactactttctattattgaggatcgaccaattggttgatgcaaaagtaggacatgaactaatgactttcatggatgcatactctagttataaccagataaaaatgcatgtcccagattaagagcatataagcttcgtgacaaatataggactgtattattataaagtcatgccattcagattgaagaacataatgtgtcgattcgggcatccccaaaagattgtgtcaggcaacggtaagcagttcgacagtgacatgttcattgatttctgcaacaggcatgacatcatcaaaagcttctctgtcgtggcccatcctcaagcaaatggacaggtagcaaaaggcaactggcgtaaactgctcccagaggtcgtatggtcgcataggactaccaaga

SEQ ID NO: 103868 - DNA, 553 bp, Cannabis sativa
aaattcaatgttttgccccgatgtcaatcaacaatatcaattgaacatggtaaccacttatttggagattaataatcgtccttataggaccacagatgttgatgacttcctcaatatatatggtggtgacaatagggtgacaaggttcactatatggaacagtttcacttccaaagaagaagcacttttctacatcaacacatgtacttgtattccccacccttattgcaaatccatatgcatcaataaatgttcaatcagattatcatgatcatcatgccccgagatggcgatgacaagttgagggctgaagttggctatgcctgggctgctgagaactagagctctaaagagggctatttctgatggttttagagagtttccagattcgatctgaatgcaagctttggttgaaaatagagaacaaggcttctcaaagggtcttggaaaagcttgggtttcaaaatgatattgtccttagaaattataccattaataaaggtcaactaagagatacggtcctgtacagtcttttgtctagtgatctcatgtc

SEQ ID NO: 103869 - DNA, 675 bp, Cannabis sativa
cattgataagcgatttgatcttgttgttggatttccttgcggaagccttagcatggaaaaattttgtattacggtcacccgaacttagccaatccacccttgaacgttgttgccaataaatttcttcctgctccaataaatcatcaagaatagattcagccctttttaattcattcatattttcgcgattccgatgattgaggttgttgagaacattcacttgagactgtgtttcagcaatgtttttcttcatgctaccaaatttatgtcgatgccactgttgtaaggatgtagcacatgaatccaaattagacaataaaccttgaaccgggtcagtgaaagtggattggttccagcattgaatgattagctctttgcattcggggtctgaaaaagcggctgcgtcttttttcttgttggtccgtgattcccactggtgtaacagtaactgctatagctcggtgatctgagctatagtagtccaaatgatgagccgtgggggtgttgaaagtaatatcccaaaggttgttaacgaaacaccaatctaacctctccttaaccgtgttcacagccgaacgattctttatccaagtgtatggttcaccctcaaaagaagtttcatgaagtgagcaatgatcaaggactttacgaaaagtctccatttgtttctcattt

SEQ ID NO: 103870 - DNA, 710 bp, Cannabis sativa
  modified_base (191)..(191): a, c, t, g, unknown or other
cttgatgaaatcgaagaaagatgagcagctgcaaacttaaagttgatggcccaccaacaaaacgtagctcggtatttcaacaaataagtgaaagctcgagaattcttcgtcggagatatggtcctgagaagggtattcctaaacacaaaagacagtacggcaggtgtactaggacctaactgggaaggacnatatcaagtggtcgaagttctcgactctggagcatacaaattaggtaagtatgacgaaaaaatgcaactcattctagtaccacggtactagaatggagaacatttaagaaaatactaccaataaagtacctggtcgggtgaccactttaagtactaaatgaacatttctttttaagtgaatggccttctgggcggactatgcccaaaggtttcgataaaagaaacaaagtacttaggtcgggtgaccactttaaagtatagtttcttatgtctgcaatttgttttatttcatgttaagcaacaagattagattagataaaatagctctaatgtaagttactacggtaacaaatacacttttcaatcaataaatgaataaagatagtatttcaaaattcaattgagttggaaaagcagcatgttataatttacaataaaatgcatacaaaaggtttggtcaaacccaaaacaccgaacagataagcaatatatgtgtaaaagacaagtgaccaagagtca

SEQ ID NO: 103871 - DNA, 579 bp, Cannabis sativa
aaaatttttggtacaaaatctagtgcgaatcatacgtttcaattagtcaacagtggaactaaggattggaggcatctaagtgctatgttgaagagtcatgaaataaataatgagcatatagttaacatgagtatttggtttgatttagaattgagattatcaaaaaatagaacaattgataaagatgctcaagaaagacttaacaaggagaaagaacattggaggaatgttttagtaagaataattgctattgtcaaaaatctagcaaaaaataatttggcctttcggggaagtaatgaaaaaatttaccaagagaacaatggaaattttttgagtttaattgaaatgattgctgaatttgatccaataatgcaagaacatgttcgacgtattcaaaatagtgaaattcataatcattatttgggacatagaattcaaaatgagttgatacaattgttagcaagtgaagtgaaaaatacaattttgaaaaaaatcaaagaagcaaaatatttttcagttatacttgattgtattcctgatttaagtcatcaagagcaaatgtctcttatactaagattt

SEQ ID NO: 103872 - DNA, 526 bp, Cannabis sativa
aattcatgagttatacctgtagacttacaaaagtcataataaactgagttctcaaactcattaccatgatcactatgaattcaaaaaaatttcccaatattacatcctttttcaactcttaaattctagagcaaccactatcaaaataccacatttgagatgaagcacttttatcagaaaaaccagctagacactttttcttaatccatttttgtttcatacctttatgtttcttttgagatttttctaaattaccaaaataatttgttttaaacatattttgcatagtgaaatattaaggtttgatatgtccttttctaccacaaaaatgacaagtaagaatgaatctttttacctcagatcttactccttttgcaaatcctggagactttgcatcagtagaaacagcttctgcaatgacatgttttaaatctattgcaccagacttcaaatttgcagcatcagaaaaattcgttggaacactagattttacaaatttcgtgattccaaaactttccataccatt

SEQ ID NO: 103873 - DNA, 622 bp, Cannabis sativa
gagaagaatagagaaagtgattccacttcctcagattatccttcacaacagattgaaccagcaataagaacaatccaaaaatggttaagcaatgatgccttaatttttgaatcatgtgttctagagaatgataaatccatctggattcttgattctggatctacaaaccatgtcagttgttcatttcaattgcttgaaaactggaattatttgaaatccatagagttgaaacttaatgttggtaatggcaaaatggtatcggttagagctagaggaaaagccaaactcaagtttcagaacagaatttttgaattagacaatgtcttattcattccaaatttcagtagaaacttgatttctgtttcatgcttacagttgcaacaatacaaattagatttttcaagttctggttctaccatttctcgaaatgacattcaaatttttgttgcatcaatggaacaagggctttatgttctaagaccagaagaaccatttgcgcttcataacaaactgtgtaaggtatctaaacctagaaaccacaaaaagcaaaagatcgataatgaagatgaaacatatctatggcacttacttcttggttatataggctatgatagacttcaca

SEQ ID NO: 103874 - DNA, 527 bp, Cannabis sativa
attagtgtaattaagtatccggttacatataacttaaaaaagaaaattgctaataggcatcactgtgtcataccgttattggtgtaattaagtatcaggtctcatataacttaataagataacttttagaaaatactgctaaccaatcgtggagcgtcacttatagaaggtgttgggcaccactggtgcccaatagcaatgctcgttaagaaaatagtttttagggaatatcgctaattaatcatgggacgccacctataaaaggtgttggactccactagtgtccaataacaatgctcaaaacataaatatctatttgaataaaagactagctagataccaaatcataacttacccttaatttcaatactattaatgaaacatcaaatatagttaatgcctcaaaaaagtttcataacaaatttaaatattttaaaagtgaattgattatgggactaatctatacttatataggaggggtggtacctaagagatatacatacatgtgtccattaattatgttaatt

SEQ ID NO: 103875 - DNA, 715 bp, Cannabis sativa
ttctgtttgtgcaggccggtctgaagttggcctacacttactttcgggataagtctgctgcttccaagaacgcagctctgtccgacaccttgaaggcggaggcggacttggccaagaaggatgctgaagaagccagggcggaagatggagttgttcggttggagttgggtgaagccaacaacaagctatttgccactaagaagaaaatcactgtacttactaaggatctcgaggttgctgaccgttttgaggagaccattgagatcttatctgctgaggtaaacagtcttcaagatgagaggacttttctgtgagcagttcttcatcggatgaaggagtaagaggacgccaaggagggggagctttcggccgaggtggacaggttgaaggagaaggtcaattccttggagacagccggtctcgagctcttctttgatttttggaaggctaatcctcgggcaaacttcgactacttgggcgatgctaaggacatgtaccttgagtactgcgcgtcccaagtggattatggtggaactgaggcggctgcttcaacctccggtcagactgctgatgctcctcccactcaaacaatagatcctcctgttccgattggcccagaagaatcgaaccaagaacttgggactccagctgtttaagcacttctctctttatctcctttttagatatataaatatatatcatattcggcctcagg

SEQ ID NO: 103876 - DNA, 7667 bp, Cannabis sativa
  modified_base (368)..(369): a, c, t, g, unknown or other
  modified_base (3589)..(3607): a, c, t, g, unknown or other
ataattaatttcatttattttgacttagagcatctgctaccacatttgccttgcagggtggtagagaatctcgcagtcataatctttgaccagttctaaccatcgtcgttgcctcatatttaagtccttctgagtgaaaaagtacttgagccttttgtgatcaatataaatctcgcatttctcaccaacagatagtgacgccaaactttcaatgcgaaaacaattgctgccagttcaatatcatgggtgagatactgctgttcatactctttcaattgcctggatgcataagcaatcactttccctgactgcataagaacacaacctaacccatgtttggatgcatcacaataaatcacaaacttttnntcacttaccggtaaggttaacacaggagcggtaatcaatctttgtttcattccctatattttatcgtaacattccttcataaaatattaataattaataataactatataagatatacttttttacactaacaatataaaaatattttaaacttaaataattataattgaattattttattttaaatcaattattataacgaccacgacttatattgcatagttaaaatgacatagagaaaaatataaaaaaattaatgtatagtgtgggaggtaaaataaaaaaaataaaattttagtaaaatattaaaaaaaaatagaataaaactattgggtagaatctgaaatattaaaaaaaaatctactttctcaaagttatattataatacaaattaaattaaatttattacacagaggaagatcgtttcatttactccctgcataaaaaacagataaagaaaaagtgtttcaagtgtcagatttaagaataataagaagaagaagatgaaattgaattggagtagtctgttaatttccccattattccttctcattctcattgtttcagtctcactcgattttaacaatactcgcttaatctcatcaacagaacctcaactcggttagtataaatactgttttcctttgctttctccctcgtttcacatcaaaaatggctcccacgttcatggcggtggtggtcgctggctccatctcggctttgtttctccgattcgattctcactctaattctcacactttcaaactttattctctccttctcaactccttgccttcaacgcactcttattcttcttctttactgttttgattccgactccctttatgttagctcgcagcagcgtgatctcgacgtcctttcgatttatttttgcagatctgtagcttccgagctagttgacggcgtcggtgatgccttcgttcgcaggtactttcgattctggtcattcttggtttgcttttggaatacttgctatattcgttaggtgttgattttaatgttcagttccgtttcaatttcgataaaatgtgaggaaatggaaagaaaatgatattgtgagataacccacggtttgttgttacaaaggaaccgagtacaacgaaatggaagaggaatttgactaggggttaatatatttatgtatcatggaagttggttctattaccgttttgttcgcaaatattttgacttgaccaaaaatttaggacaaattagagctttaattgataatttgactagaatttggacttgcttgagctagggttattaaatttatagtggattgatttcatctttactatttatagaatggttttctagcagtagtttcctttttgatgatatagtgcagtagggaaaggaacaaaatggaaattaactttctatattagtttccttggagatttgagatcgctagagctttcatttctttcagaaatttatacttacattactagatagagaaattgcgagaaatgttactgttagtagcttcattttgaatgatttgggatgcataatttagggatgttgaaagagtcccaatggttgagaaggaaactgctccttttttggttcttgatgtcaatcaccgaagcttatgcacccgataatctactgataacaagttcgggatctccggttggtacccctcaggtggcacctgctatgcctaatcttccccttccagccaatataccagagtctaatgggccatggcgaaagcatttcttgcagcttggttcacctattcatttatcaccatctcatcctcctttgacttcacatttctcaaaacctttgatgaagaggaaagagttggcaccttccttcgtcggcttcaaaaacattgctccaacacaatctgacgttggtgtgttgccttctggtttagctcagccaccactgtctccttctgtctccagtaagttagaacatgtatagttgcttttaaattttaattttattcaatatttagatgttaatattttttttttcttctgtcgtatatgacacatttatcataatgcttcacattcattttgcccttttttgcaatttctttaaattgaatttccatcacatacctgcgttgtcatattttaaactcatcaactctggtgtctttcttttcatctaaatccttgctatgattatatttatgcatgtttacatttcgtttgttcagattgctgcaaaccagatatggtgatgctacgggggagtaaagaatgccactgtgtttatcctataaaaattgaccttctccttctcaatgtctcacaaaatcctaattggactctattcttagacagtttggctttggaacttggtttgaaagtttctcaaattgagttgataaacttttacgtacttagcttgtcaagattaaatatttcaatggatattactccaagcacgggaatcagtttttcttttaccgaagcatctgctataaactcttctcttgccatgcatagagttcatttgaaccctaagttagtgggtgattacaaacttctcaacattacctggtttcaggctccacctccttctcaaggtatgtaataacttggacatgccaataaaaaagctttgaagaatttgatatgcttattagagttatttaattaagagattgatgtacattcaaaaggtgaagaattttttaatgttttgaagtttattttaggctggaattttactgttgattaaacttgacattgagagtaccttttatctatcccatagctttagtaaagaacaactacataagctatgccgactttactgtttctatagaaagaaaaatgctatctagaccaaaacatgctagtttatttaaatatttgagcatggtggaaaatcatacgaaatgatcggaagtgattgaaaacataggggcattttcttattcagtcctcaaatcctagtgaaacattatgataagcatagttttcaaaacttggagcacaaaaagtttctcgtaagaaattagtactgtgtaagtttttcatgagatgggaccatacatattagcgctgattaaaggctgcatgtatcattttgtttaaggatatacatgatgtcaatcttattaataatgcagtataatctgttgagtgttttttttatataccaactaccaagaagctatctagccacatttgagatgcttttatattattattattattannnnnnnnnnnnnnnnnnntattattattattattaaatcttagcatccaaaccaataaccctaatttttttttttaattttctatagcctatagcataagctatatgatatctcataagtagaactgcatcttgctggtatgattgagctttattttcatgccatcatggtttataaatatattacttttaaaccatcaaaaacaactctggtgtagttatgctgcattttaatttacttctccttgcagccagcagttgtccaaaccaatcgattttatgaacattgatatggcttttgtgtttgttacacagctcctcacattgctacagcacctgtaaaacccccacctcatcgtgctcctgcttctgtatctcccaatacttcaaacgaagggaggcatccaaatttgattcttattcttggtattggtgctggtgtgctgattgttgccatcatctctttgtttattgtttgtttatgcatgttcagtcaagataaaacaaaagcgcctcctgtggaactggatacaggtactgttatggaaaataatttttgtccatcttcattttgttaaatcctaaattatgggttcgcagatattcattttcttttgtagtttaatagtttgatggtatatatatatatatttctgttatccccttccccttcgacaactttacatgtacttgactaaattggaaaagaaaaagagttagttagtactttatcagaatcaagtgaattcatattttggagtactgcatttgttgaatttctcatactaaaatctactttaccacaaagatgcatgtagcattaaaacatttttttttgaagtacaccatgttccaaatctaatttgagtttgtactgcacctgtaatgatcttttaatttacttgatgaatcttttattccagaaaaacagaggaccgttaatccagttcctgttgttggatctctaccccatccaagtagcacacgatttctggcatatgaagaacttaaagaagcaacaaacaactttgaatctgcaagcatacttggagagggtgggttcggaaaagtttttaagggtgtcttaagtgatggtacggctgttgcaatcaagaagctcactaatggaggccaacaaggggataaggaatttttagttgaggtggaaatgcttagcaggttgcaccaccgtaatcttgtgaaacttgtaggttactatagcaatcgtgattcctcgcagaacttactttgctatgagcttgttccaaatggtagcctagaagcctggctccacggtacaattcttttccccgataaccttttctaaaaaaaaccctgctttagataaatatatttttttactagattttctttagttagaaagttttcagttgagtatatcatacatgcaatccttttctttttgcattataattatttcttttgattggtattagtgccaatgattctctgttgtcctcaggtcccatgggagtaaattgtcctcttgattgggataccagaatgaaaatagcacttgatgccgccagaggacttgcatacctgcatgaagactcacaaccctgtgttattcacagagactttaaagcgtctaacattttacttgagaacaactttcatgccaaagttgctgattttggtcttgcgaaacaggcacctgaaggaagaacaaattacttgtctactcgtgttatgggcacattcgggttcgcctcatctctaacttttttatttttacaactctatctggtgttgacatgaattataattaacctacaggtatgttgctcctgaatatgccatgactggacatctactagtcaagagtgatgtttacagttatggggtggtcttgcttgaattactcaccggcaggaagcctgtggatatgtctcaaccggctggccaggaaaacctcgtcagttgggttagtacaactcataaatcacttcctcatttcttgtttttgactgtccaaagaatagactgctttcaattttgtgttaactaatttgtatgtcatgaaatgttctctttcacttaacaattaacaaatgtgttataatccttccaggccagacccattcttagagataaggatcggctggatgagcttgctgatccaaaacttggaggtaagtaccccaaggaagattttattagggtgtgcacaattgcagctgcatgtgtcgctcctgaggcaaaccagcgtcccactatgggcgaagttgtacagtcactcaagatggttcaacgggtcactgaataccaggattccatggcctcctccaatgtgcgaccaaacttaagacagtcatcaactacattcgagtccgatgggacatcttcaatattctcttctggtcccttctctggtcttagcgccttcgacaatgacaatatctctcgaacagcagttttctccgaagatcttcatgaaggacgatgaataatatacgtctcattcttcgttctgtttaacgagtcagactttcactcatcaagggttggaactcgttctattttatgtggctcgagacttgcagacagcaaggctggagttctcccccttcgaaacaaggacctgaattggagcacaatcatttgggaaaagggtgtatttttgtagttgtgtgtcattggttgagggaaggaaggataatctcttgtgtccattttattgtttcccccagcattaggcaaatggttggtgaattttgtatatatattccatgtaaggttgttttacgatattggctacttgaagttttttgtttttgttctctttgccaaaatatctttctatatcaaatcacacctgcaccgaaagttcattcattgaaacatgactataacactaacacactgatggaagttattatctgggcagattcgatagaagtgtttacagctctcctgttctgatggatttcaatccaaagtcatcaagggaaagtaactgaaactacctacttgcttgccttttcttgcaccgtttggtagtctcaattaatttgattagtattttttttatttctttttctttagtgaaatttacctttattataatctctctttttttgcaaaggcaaatacattttggatgcttcaacatattatagctctcctgtagtaatgcgtttttttttcttagtcgttttaatatgtatatatatttttaaatgctttctttttaatataacagtattagtaaaatgtttatattggagttgttattatttaattattaatttaaataataataaaataaaatttaatataatttaattatatttttttacatatataaaatttaatttaattttaaatttatttataaaaattatatctaattaattttattaaataataaaataagtaaataagtttagatattttaaataatataattaataaatttgttataaagtataattagttaattaaattaaggtctaattaaaatttaaattaagatttatataaaaaataattatttaattgatatttttaaattaaatttaaatatttaaaattattttttcaataattaattgattgatttaacgatgttaaattcaaactatcaattttaggagaaaaaactattaaactaacatttttttttattaaataaccacatataagagagatatttgttttgtagtgtctttttaattaatatcgaatagttgtaagagacaatttctaaatgtaaattgtgcccattttgaggtctgtagcagttatacattttaactacctttttggtttttaactacctatttttcaaattctttttttccctccctcgttccctgatcaatctaactgcctcctgggttcatgttcattgatttccttctcatcttacaactcactccccagttgttgtccctgtatctttgtacaatggatccactcatgaatgcaattcacaatactttatctttacctaaagaggaaggatcagttttcaccctccctgaagaggctgctgcgtctcatacttctcactctagtcacatgttcattgctcgggttctcactgattcata

SEQ ID NO: 103877 - DNA, 601 bp, Cannabis sativa
atacgaagagcctaccaaactgtaggtcaacaatcgtcgaacgtcattcccctgagagaaacggaagaagacccaacgatgaatacttgccagactactaatggtcaaccgcccaatccccggtcatgagttccgctcgtgggcccaacggtaggcgagcagactttgtccgataattcatcaagaggagtcatacctgacggctccaaccagactaatggtgccattttacccgtcaaccaagcgaatcaatcgctaaggcaaccagactcttctgtgttcgaaaggttgggagcaacccatgacctaaggaacgatctaaatagaagaaggggaacggacgaacataatactacaatgatcgtgcgccctggagcccgtactcaaatccccgcttagaaagacgctgacgtaatccaaatcgaccagaatgtcgagtaggtcagcccagtcgtacaggcccagcttgaagaattgaaaaatatgtttcatggcatagttggacagcgtaataatgatcttgagttagaccgagcacgcagaactcccttctcaccagagatcgatctcctgccactgcctcacaagttcaaaatgccaa

SEQ ID NO: 103878 - DNA, 901 bp, Cannabis sativa
ctctttccaagtcgttcttaggacattgttgctaagtgaacttatcccctttcagaataggaacagaaccagctttacataaatccatgttgaaccttttgagcacacgctcaatgtaagtttcttgagataagccaacaacttttcaattcctgtcacgatggatctcaatctccaaaacataagatgcctctccaagatctttcatatcaaagttggtagacaaaaaacttaataatagtagcttaagttaaaaacaatgataaaacaactaaaaaaaatttaaaaggaaaaagaaatattaccgagtcattgataatcaacacctaatctaaaccccaaggaaattttcttcgcaccatcctcgtaataattgtaaggcctaaatcaaaaaacaaacaacaaaaaaataatattgaattcaaataattggaaaaataaaacgaaaggcaaacaaataaaaaaaataaaaacagaataaagaaaataatcatctagcatttttagcaatcctttgccaatccaagcatcaaacttagccttaattttaggagagacgggatcggaaaacgtatcgttaagagcgtaaaggcccttcacatacgtaaccatcttaaaatccctctcatctcctccagattgagaacctgaggacattacctccattggagtgttgctcacatcagccgacccaaaatcaacaaaaggcgatttcaatgtcgggacacgctttctcttatccaaaagaggagtataagtaatagtgtcatcaacttcttcatcacaagcaatggcatttgtcttttcaacaacaacatttggattggaatctagaacctgaaatagaaaatttgaaaataaaaaaaattaaaagttacaaaacaaacataaaactgtcaag

SEQ ID NO: 103879 - DNA, 667 bp, Cannabis sativa
gtatacttattttaccaaaactaaaccacaaaatcaaatagaccaaacatttcactctctaaaaaaaataaattcaatacatatttaaaaattatagttgaatcgaatgtgaaaacttatgaaaatgctaaaaatttaaaacactaattaaataattttgcttttgcaaaatgggaaaattaaacttataaagtgaatacaccaacacagatttaacccatttataaaaattgtcttatctcatcttgtatttaactcatttactagtgtcaatgtgtactgtctactattagattaggaatcccgagagacctcacaccactacctatcaatcactatacaattaagctttatcccaaatatataaacaaacaacaatatatatccctagaaaagcctaacacaaacaaaatcaacaaaaataaaaaataaaacacatgcaaatagattatatacattttaaataaaaatcttaacccataaatccatcaaaacaaaaattaaattaaatcaaaaaaaaataaaataaaccaaaaaaattacaataaaataaaaattatatatgcaaattgaaaaccaaaaataaacaaactaaataaccgaaaacataacaattacaaaaacaaattaatatttgaaatgtatatactaaaatttattgaaaaat

SEQ ID NO: 103880 - DNA, 1067 bp, Cannabis sativa
cactggaaccaaaaaaaaattcgttgtttctgtaatgtccaagtcgcgaccagggtcgcgaccacaaaaaagggtcgcgacacaggaacctagtggtcgcgaccacttggtttcgagtcccgaaaaaaattattttttcattttttcacgtttttcacgattcaactggaaaaatataatgtctggtacttaactaaaaatttaaaatactaaaaacactaaaacataaactaaaaacataacaaaaagtctgaaaaattaaagaaaacacttgggttgcctcccaagagcgctgtctttatcgtcatctagccgaacgttgatttgttcgtttagagaggcgccagaataatggcggacttggtttggtcaatttgacctcccaagtagagctttaaacgctgtccattaaccttgaaggttgttgaaccttctcctttcaattccacaactccatagggaaacaccttgaccacggtgaacggaccagaccatcttgactttaacttgccaggaaacaatttcaaccttgaattgaaaagtagcacttgctgcccaagttgaaactcctttttgactaagccttggtcatgccacttcttggttcgttccttgtaaatttttgcattctcatgagcttcatttctggactcctccaactcattcaattgcagtaatcttttctcccctgcaactttcaagtccatgttaagagtcttcatagcccaaaaagccttatgttctagttccaccagcagatggcaagcttttccaaacaccaactgatatggtgacatcccaattggtgttttaaatgttgttcgataagcccatagtgcatcatctagctttcgtgaccagtcctttcttgatctatgcactgttttctccaaaatcatcttgatctcccggttagaaatttcagcttggccattactttgtggatgatacgatagagtagttcggtggcggacaccatatctcgagaggagtgcttcgaattgtttgttgcagaagtgactcccttcatcgcttataattgctcgaggagtaccaaaccgagtgaa

SEQ ID NO: 103881 - DNA, 587 bp, Cannabis sativa
aatgactaaattaaaaattaagcatatattaagagaaatgcatgcatggcttatacaaaatcagaggtagcatatcacagtagaatgaaacgtatataataaccaactcaaaatttatattggatatatatggctaattgagtaatttttaaacaatatttaaaatctctggttttacaagaaattgaaaagcgacataatggggggaccaacctaaaatcaaatgaaagaaaaaaaaaaatgaaataatgatcttttgtgaagtattatatgtgtcttgtctaagacaataacagagtctgtactgacgaaaatagagaaaaattacagtttttcaaacattgggtacttatgccactaaaaaaaatcaatgggtttatgccgcttacaaactcaaaacttttggtacttatgccgctatttaccctaataaaaattatatatatatgttacctcataaggtaatgctttaatttcataatcatgtattacattacctaatcagacaagcccgtactatagcctggtacccatatattacataactgcatcacctaaacaggtgagcccgtgccaaaaattggcac

SEQ ID NO: 103882 - DNA, 629 bp, Cannabis sativa
tattaacaaagtatgattcatagaagctcaacttatcacggtggaaagactagcaccagtctcagtctagatcaaacaaactcccacaaaaatctaaaatgttatcaccctttttaatccagtcacggcaacaataggcagcttcttctaaatggcctactaccccatgctaaaaacacgctctcatgtggcattcactttgctagtgtctcttacatctcgaccttacactcttagcaaaagaggttaaatcaaccacctgagcataactaagaaaacaccctagttctaaacaaaactatatatccccacattccgagcgatatacttttcccactcaactaaattagactccctagcagccttaacagtcgcttcctcaaaacagaaaacttggccaatcaatcggtcgtccggtttagtatcattctccaaccccatgctgtccggaatcaactatgcaagttctactacctttccactttgataatttctcacttaataacatgcatttactcccagtcttatgatagtggatgattcatactcacactaccaactccgagcctggtaagctcgcaattattcttactagatcacctcagatacaccttctagtatacttgtga

SEQ ID NO: 103883 - DNA, 640 bp, Cannabis sativa
  modified_base (177)..(181): a, c, t, g, unknown or other
  modified_base (605)..(609): a, c, t, g, unknown or other
ctcacctacaagtatcaaaactagcttaaatctactcaatcatgcatataaaaactgcagaaaatgaactcaagcacaaacaatctctacagcaactaatttcatattttcactttgaaaaaactatagcttttgaaccaaaactctaaactagtttaaaaccaaccaaacatgcannnnnaacagtttcattccactcaatcaagcatgctttaaacctctgaaacaacataaaatcacagcaacaacaacaacacaaactaagcatgcaaccaacaattttccttaaaaaaatcttcaagaacaaaagcaagagacttaccaagagttgagaccacaagaaccttgtcaaattcagctagaaaacacacaaagaattccccccaaccccagttgctcaaagctgaaagagagaaagaaagagagaaaaagagatttttgctttttcttgatttttcttcaaatttctaattttgagtaaaatgaacaaataaatgatattttctctacttaactcaggcaacataccacaataaaatcacataatcaaattacacttagtccactaaaggacaaaatattattggggcaaaatgaccattttnnnnntccacactaaaataacataaaggggtactaa

SEQ ID NO: 103884 - DNA, 1231 bp, Cannabis sativa
  modified_base (426)..(434): a, c, t, g, unknown or other
aaagtacttgaacctagaaaatggatagataacctaactatttatacaaaaaaatctgaaatatacaaagtgataaaatcattaaaagtatatattcatgtttatttaaggcagattataattgtcatagcgaggcagaattgacaactgttcgaaattcaaaaagtttggtagatgactaactacttaaacagaaagattacgagcaatggaaaaatccaaaagtactttacatttgatcaaaatatagttgtttacattgtgaataaaaacacaagcaaacacaattgtattaagttcgaatgaaaagagtacaaggtatttaagataaaagaaaacccaagttgggttacaaacttgtctttacaaaaatgtcattaggggcaaaccattaagtcatcttcctaaacaaagaatgtaaggggnnnnnnnnnactcgagaaagaccgtcttcatatagctcggagaaagaccgtctacacatagcttggagaaagaccggctacacgtagctcgagaaagaccgtctacatgtagaatgtctcgacctctgcatagacctcattctcatcatcaaaagatcccatttcctacagccgagacctcaatcccagcctcaggaaatttctcgataccagagagaggttggcataaaggtcttctggtgcaggtttgggtcttgggttagttggattctttgatagaaaccacgccaactttcctcctggattcatccgaaaccacgtgcctgaggaggacctgttagatcgctcacaagatctatgtctattcctgtggagacagagaaaaaaggtcaatggagcaacaaaaaacaataatatgtataatccgactcaaaccaccattcacaagggacaatacttaccctcaagaatcacttgtgaagatcgcacataacgatctacggggttctcttggtttggatcggtcgaaagctcctcagccttggaatccatcgtttccggttccaattgaggtttgaagtccttgggaacatatggagaagaagaatggttggtgcatcctagtgttatgagtttgggggggcaaacttctgaactcagatgggacattttagcaagaaagagacaatccaatctcaagatggatctcacaaaaaaaaccaaaagtttgtgaaatatggcaagcttaagccgcccttttatacacaaagtccagtgacaagaaggccaaagattgggaaatctaa

SEQ ID NO: 103885 - DNA, 790 bp, Cannabis sativa
tgcattgaaaaggtttggtagagagatgagtttgttcttaacctaaaagacattgaacataataataatattatgcaaaccattaattaatttgaaaaaattaaaattaattaatcgttgatcaaatattgattaattcataatatatttattgatagttattatatatatttttatatgcgtaaaaaatatatatacataattaatttaagtgtgtacaaaacagttcaacccttttagtaaacacttaactttgttatttagaaggaggtagtcttatatattgagaaattaccaactaagcatgctaataatgtaataagaatattataattgtccaacattaaaaaatacatatatatatattatttttagtatgatttagttagtattgagtattacatatatttcaatttaaaattaattttaagttaattatatatattttaatgaaattcatttactttaaattaagtagaagaaatcgctcaaaaggataacataaaatttaaaagggacatcattctttttaaatatacaatcaacgttatatccagactattatatcacaaaacgtacaactcgattaacaatcacgaaataacttcacggttacgcgtgcttgacctgggataatttcaggatggatgacatcttgaaaagttttttcaagaagtgtgcgagtgaggacgaagcaaactgaaaacactcatgttggtttgtaaagtcagtcgtcaatctaggaagcaatcagagtgacgtactcgtgtataagcagggccggccctag

SEQ ID NO: 103886 - DNA, 620 bp, Cannabis sativa
accagaactagaaataaaataccacaaattaaactaccagcaaaaaataaaatcatttggcacaagaaaattgtatatggtatcagtttctttcgaacactcctagtccacggggtcatgcccagaaaaagaaatcaattagtaaagtctcaaaaaattacaaagacaattgacttatacaagtttagactccctctaaatctttgccataatcctttgtaatacactttatgaatctgattttggaaccaccatcaaacagcgaactcccttcgtctttgatgtgtgaatgcttacttcctctcgaagtaaggcttgaacaagtcttctctcaaagacctttctcttgttcaaacaagttgttctaaccgaccctaagactagtataagaacaaatatataaacactaaaacctagatgaacaactaggttctcacaagaagaactctctcttcacaaaaaaaaatatatgcaaaaaatgaaagctagaagagttgaaccgatttggtactctctagggtctatttattaaacatagcaaccctagagacagccacaaaattgattccacagctgtacaaactttcctaaaaaagatcttgatttgcagcatcagaatc

SEQ ID NO: 103887 - DNA, 686 bp, Cannabis sativa
tttttaattttataaattaataaatttattattattcactactaaataataaacttcttaatgtatttatatattacattaatcaattaaaaaatagttacatacgttacacaatttaaaataaatcaactttaagaattaactttgtgtaacttatatatctcttataaatatcagttctataactcacttactaaacaactcaacatatttgctttaatttaaaaattatactgtatttaataaaatacaacaacagttggcataacatatttactttaaagtgggaaaaataatatttttttttaaaaaaaaaatgaagtttgaagaaataataatatacacatgtcttcttatagaagataattaagtcggaaaaatcaataaaaagttcactaattaatcagaaaaaataagaggagaattaggagaaaaaagtttatatagtaataccgcaacacatctactacaatatgtattttataggaaaaattcttagcaattgtcatacacaacacaaacttaacaaatatgcacaaattttaaaaaataaataaaaataaaaaaattctattgaacacttgtaaaatcaacaaaattaaggaaaatattaagactcacctaaaaagtaattgtagcaagaatgatgattatgctcatcaaattaatgaatatttgtgtttctt

SEQ ID NO: 103888 - DNA, 519 bp, Cannabis sativa
tccaagtctgtgtttgggatcgggtcccacaattaggtctaggttcgaatctcagttccagtctgggacacgaccgtgtctatgcacgagttcctatcttagtttaggtctgaggctaggtctgtgttcggttataggtctgggtctgggtcctggtcacggtcctactcttgttctaggttcctagttcggcaattcttgtccaggttctaattttgggtcccatgactaagtctgggttcgggtttggttctacgtctgggttctggtcctagtctgagtcccatatctagacaccgactactggtctgttccaatccctgttacccgaatcccgagtcaagatctagatcactgtcacgggtctcggttctgttctggttcaggtcccaggtcccattttgtgagtttgtggtcaggatcaagactggggtgttgttctatgtcctgaccctggtttcgtgtccctagtctggttccatgtttttgtctgagttcaggttcgggttctggtcccga

SEQ ID NO: 103889 - DNA, 677 bp, Cannabis sativa
attgtatcactttttaataacgtagaaaaaaaactagcataaaatttggtatacgtgtctcgcacataaatttttactagtatatataaatatatgtatacactcacttacaaccttgagtgtagaatagtgggaatcaccatgacttgaacaatgtattacacctttgtccaaaagcttatttcttcctatctctaagcactaagggaactctcatggaaatagcttcaggaattatcaagccttttagggttttctagcaaagtgctttattgatagaaaacttgatctctctcaaatgagcaccaaagacctgcttttataatgtttcgtgatcacacttagaattcaaacaccccatctcatttcataccttttgaatcctatcatcaaattgtgtaacaactcttttattacactaataatgggtgatcatcaacacaagagttacaagtgacaacaaattgtaactcctctccaagttacaacatgtaaattacaaagtgtatattaaaatcataggttacacatttatttaccatacaaattaaatatattatttagataataatatatttatcatattttaatctatacattatattaaatagtataacatcccctctaccaaacatagtgttagagccaaacaaaaaaacttctttgagacttttaag

SEQ ID NO: 103890 - DNA, 539 bp, Cannabis sativa
tatcctacccatgatattgaattggcaacagttgtttttgcattgaaagtttggcgtcactatctgtatggtgagaagtgtgagacttataatgatcacaaaagcctcaagtactttttcactcagaaggatttaaatatgatgcaacgacgaaggttagaactgatcaaagattatgactgcgagattctctaccaccctggtaaagcaaatgtggtagcggatgctctaagttgaaaaggaccaaaccaagtttgtgaactaaagaagatttcagcagagttggcggtggatatggctagagcaggaattgaatttgtaattggaaaacttgccaacattaccctgcaatttaatttattggaaagaattagagtagctcaacaaagggctcctgagttataggggcataagaagaagttagaggctgagtcggcaaaagacttctcattttcacctgatgggttgttgcgatacaagaatagaatttgtgtatcaaatgataaggatatcaaacaagagactcttgatgaatctca

SEQ ID NO: 103891 - DNA, 711 bp, Cannabis sativa
ccctctcgaagatccctctgatccgtactatcttcatcatggagataaccccgggaacgttcttgtttcacagccacttacaggtcaggacaattacatctcatggagccgtgcaatgcagcttgcgatttcagtcaagaacaaacttggattcttagacggttctatttctaaaccccctactacaaatttcaatctttataatgcttggataagaaacaataacatagttatctcttggatccttaactctgtctctaaagaaatatcatctagcttgctgtatgatgaatctgctgcagcaatttggactgttctcaagatcagatttcatcagagaaatgggccacatatctacaatctaagaaaaggtttaatgaaccttagacgggaaaatcaatccattagcatgtactacacaaagttgaaaactatatgggaagagctgtctaattatagacctagctgtacttgcaacggttgtacttgtggtggtgtgaagaaactccaagaacaccatcacatggagtacataatgtctttcttgatgggattgtcggatcatttttctcaaataaggagtagcattctactaatggatcctttacctgaggccaatcgggttttccacttagttactcaagaagaaaatcaaaagggtactcaaaatcttggaaatgattcgaacactaaccttgcttttgcttttca

SEQ ID NO: 103892 - DNA, 1220 bp, Cannabis sativa
attattttgaactcctcgtactaaatattaccataatattctctctttctttgttttttttacttatcctgcaaaagatatttcctatctagtcattttagacagctaagagtagaaaattatataaattattttcaaaaaggaaaaaaaaaatgtatataatatagtgatgttgagaaatgagaatggagaaagaaaaataaatggtaactttgaggtattgggagtagaatcttaggttaacttgatagaatctaaaggtgggggtagggagaatgtttgaatgaataaaagcatctttaaataaaaataataaataaataaatgtaaatataaaaaattatgcataacagctctttgaagcaatgttaattcctttggacaaaacatgcatgattaagcttaatttgactaatagaatgattgatttaacctcacataagatccttttacttgaagttgaaaccattccaaattaatccaatagggtgtaaagatatgctaaaaccaagcttttttgtttttgttttttttccaaaaggaaaaaaggtgacacatttttggactagcaatattggacaagttgaattcttgatttggaaaagagaacagaagagggaagatagatagatccaaaggaataataatgtgaaagaaaataacaagatccaaattttattaggagagaaagaagataaggcttttttttctttctcttttcttttcttttcttttatgttgtttattttgtgtaccatatatgtacctcattccttcattacattccttcaaaagtttggttattaactctcaactttatgaccaaattaggaaatttgcctataattcaatcaagacaaaagtgtatcattatgctgcatgaagacctatttgttgtcttcattgaacatatatatatatatatataatttttttctacctcaaatttctctttaattaatatataaaaaagctcatcttttttcttcttttcttctaaggtggcttggaaagtcataaagatttgtactttataataagaaaattagtaatatatgatgataataatgatgttttgggttatgcttgttcatgtatctggaaactctagcttgtgaatatagaacaaacttagattaaatatgattagtgaaaaacatataaaaagtgcatattatgttaccctttaaggtcaatgagaataaatatgtataattttt

SEQ ID NO: 103893 - DNA, 837 bp, Cannabis sativa
ttgaagatgttatagctttattgtctaaattttcgggggcagttttgtcccatggggcttgctctaagattttagcagcccatggttggcaaagcatgctctgcggtttagacgatgagctatcatgtttcgaggaggttccagcgccggtggcggacgtggacgtcgtaaattcatgagtgattttaatcactttgtcaaaaaaaaaatatgaacaattcactacaacaaaaaataatttaatgattcatttaagagtataggttttgaacatgtctcccacataaaagatatcacgctgtgtagatatctatagtgttaacatgtttctttttaataaaataataatacattaagtgtttacgtattattatttgacatccagacacatcacgtcgaagaagacatcattttggtggtgacaagaggagaaaggaggacggggaattagaaagatcacaagagttaaatatgtgaggatagaaataagagttgggaaatttaagaggaaattttagttttggccgaagaatgatgataagacgccatctccgccgtgtgtaaggacagcgttttgaccgttaatgttcgaaaaattccgccccggtgacgaaaaggccacagacaatttgaggtgaatgtgccaaagtccatttgaggtcaatgttgcctatagattgctaaaatatagtgtatgtgtagggaatctttatcacatgtttactagtttaaaaaagggtaaatggcggcaaaaccccaatactttggttttggttttgcaaacccccacaacccaaatttctacgggtaaatccccagaaccactattctattatc

SEQ ID NO: 103894 - DNA, 1884 bp, Cannabis sativa
cacttcaattcgattatcatgtttcatatactacaccggttcactcaactatggtaatttagtattgcatctctcttattttttttaaaaaaaaaacaagaaatatttaatttttatattaagaatatcaaattttaaaataaaataaataaatgtaatgtatttggcccctccacgtgtctatatttatgagttaataacggaagtggtagtaacgatgtaagagaattgtaacattaggtatttttgccaccaaaaataaatattaggtatttaagtgtataaaatcgaaaacattaagtatttataccgcaatttacccaaaaattattagtagcatattctttcattgtgttaaacaagtggtgtattaaaagatcatgcacactatttaagcatggtatatcaaatttttctttcgaaacaagcatatatttaaattaaaatttgtgtgtagctaaagttggtgaaattctttattggtctctttttgattgagtgttgaatatacaataaaatgttggatgagaataaaaaaatacatgaagaaaaataataaaaaaaaagttgcttatttgataacttattaatatataattgggtttttcttttattaatagtaatgacactaataaaaacaataataggattattaacatattatatttttttgtggtgggatgaagctatattccatatttgtaagttttagtgaggttcatgcacaacaaaaagctcgtattattcatatcatcattgggtttatatatattatttataataaaataatattttgtatgagttttctatttttattttgttgctaggaaaattatatgtaatgtgtaattagtttaggtacagaaaatttttagtgtacgtttaatagttttggaaaaaaattagtatagttcaggtaagtttaattttaaattttaatattataaattttatttgatattagaataattaaaaactttaaattttttgtattgatgtgtttggaatatggtaggttttgaagagaccattcaacaccttttctttggttgtagagacaataataaaattctggaagatctcaagaaatggttgaattggaacacttcagcttttactgttcaagaccttttgaagtagatttgtaagagcgaaatgtcaaagtgtaaacgctaagtatatgcaacaatagtagctgctgcagcatatcatatttaaaaagtagaaatcaacttttttggaaccacagtgtgcaatgttctcatgtaattgtcaagcaagttaagtatgaggttagaagtagaatacaacttcaatcgccaaatcaaagttctgctatagatagagaagggactactcagctgtaaatatgcactactaaaaactcaaaattctcgatagttttatagtatcgggtaaagaattctcgacaatttataaaattgtcgcctatacgagcgttacgaatactggatagaataggcgacggtagaaaaatgttagtataaagaattttcaacagtttaaaactgttagctatagtcgagactataggccatggtttaaaaccgtctcctatagtctcctatactataggtgacggttttaaaccatggcctatagtatagcctacggttttaaactgtcgctatagcagatttttcaaaaaaaaaaaaaatcatcgccttcatcctcctcgaaacaaagatgggagtttcgtttggccttaagatccccgaagagttgagatctccgatgatttgtgaaataaaaaataacaaaaatacatagatcccaaaataaaaaaaaataataaagaagttacgagaaagagtggacgagagagagaagactaatcactgctcatggtggcttgtggttgaa

SEQ ID NO: 103895 - DNA, 1470 bp, Cannabis sativa
ctttccaaggtggaattgaactttattcaacttttctaacacttgttcccctagcaaaggtggcggtggcaatccaaattcttgcttaccgtcaaatgctttcttccaagtgcgaaacacatgttcttttggcaaaaaccttcggtgtcccatgtaacacatcttcttcgagtgttttaaatacatagaacatgttctctcctcacaaataggacatgctttgtaccctttcacactgtatccagaaagatttccgaaagctggaaaatcattaatggtccacagtaatatggctttaagattgaactcttctttcctaaaggcatcgtaagcagaaacaccctcatgccacaatcgactcaagtcatcaactagaggggctaagtacacatcaatgtcattaccaggctgtgaagggcctgatatcaacagtgtaagcatagtgaacttcctcttcattaccaaccaaggcggcaagttatacatcacaagcaaaactggccagcaactatacttactgctaaggctggtatgtggattgattccgtcggcagaaagaccaagacggatattcctaggttcattgccaaattcaggccacctagcatcgattgatttccaagcgggtgagtcagctggatgtctcatcttaccatctacctttctatcgctggcatgccaaattaaattttttgcatgattggcattttgaaaaaaccgaaccaaacgaggtattgggggtaagtaccataatacttttgcagggacaccaacctttacctcgtcagaattcttttttttttgccacctagactcaccacaagtgggacaccatattgcatccacaaacatcttacggtataggatgcaatcgttaggacatgcatgtattttttcatattgcatgcctaacgaagaaagtgtcttcttcgcctcataaaaagatgaaggcaccacattaccttccggtaataactctactaggaaagctagtaaatccgaaaagctcttatcactccacccgtgtttggcttttatgttgtataatctaataagtgtcgacaacttagtaaacctattacaattagggtaaataggcttctcggcatcctctacaaaactttgaaatttcaaaggatcgacatttaattcatattgtgcatctccaatcatttctggaatgtgatcatcctcatactccaaattaacacccttaaccttgttagacttagacgttccctcgcccggaactctattcttttccccatggtaaacccaaaccttataactcttgtctattccgttcctaaataaatgctcctttatactagcaatgtccacacgctccatgttaccacatttaagacaaggacaaagaaccaatttagtatttttagcattcttctgacaaaagtccaagaaatggtcaactccttcactatactccgctgataatctattcgcactcat

SEQ ID NO: 103896 - DNA, 638 bp, Cannabis sativa
taagttaatagtttcttataaaataacaagttatattttaaatggacaattatttaacaaaattagtgaaatgaatcctaaaattaagtaatttaagtaaaaaaaaattgtatattttattgaaaaaaataataaataattaaataattataaataactttaattagttgaatataaataattaataattgaataagtaataaattttataactaataaatccttgtaataaaaaaaaaactaacaaataattaaataaataatataatatttaattaaacaaaaataatttattatacttacaaaaaaatattattgtaagtatagtttaaaataaaagttaaaaaagcttcataaaatgacataagattagcattagttcaattacacagtcgaaattataaaatttatttcacactagtcaatttgattataattcagtcaatgtaaatcttttggtagatgacaatcgataagacttgagtgaccatgagaaatcataaggatccagcttactgggaatgtctccaagtctttatggcacttgcgtctaaacataaggattgtggtggaagaattttctatccttgtgttaaatggaagaataccagatcgcgtccttcgaatactgtggaggc

SEQ ID NO: 103897 - DNA, 513 bp, Cannabis sativa
tcggaggtggaggtggtggtgatgatggagaatcgatcatcggaggtggaggtggaggtggtggtgatggagaatcgtgtggtccgagtctgaaaaaactatctgaaaacagcagaggcaaaaacgatgataatggctataattcttctttccattttgaataatgttatcctcattttgaaacatggtgtatataggcgagatcgagagggagggaaaagaagaaaatgcaaatacagtgaagtgaatcgtgaggaggactgagagaaaatggttataccgcctttcctttcagtcttggtttatttttgaaaaatattgctttttattattatttatgtccttagtactttcttttttttttcaaaaaaaaagaaataaataaattaatatatatatgtgtaactataaacagtataatttcccaaacatatatattgttagaaaagtaatatatcatattttaaaataccctacaaatataatatcttttttcttacatatattataatt

SEQ ID NO: 103898 - DNA, 808 bp, Cannabis sativa
  modified_base (676)..(683): a, c, t, g, unknown or other
  modified_base (758)..(767): a, c, t, g, unknown or other
aatcatcaactaacttcagaaaatagaattaagcactatcaacaagaacaacaactaaaacaaagaaaagtcgtgaataacaaacttgaactctaaaaacacaacatgaacaagcttagaatcaataccttgacttgaaaccactacaaccttgttaagtttcccttaattgagcagtaaaaacaagcaaaccctagctggtctagggagtttcggaaagagagagagcatggaaagagagagaaaacccttttctttctaattttgattttttttaaaaaagaaaatgaaatgaaaaaatgatttatctaataacatttgtttaatattcaaattaaaaacctaatttaaaatccagtaaaggacaaaatacaaataggcaaaaagaccatttttcccttcccataactaaaaatcataaaaatcacttaggggtatttttatcaattctaaaatcttgactattcccgacattcttaatgtctaactatattgccccgctatactaaaaaaactaagatgtgattcttatagccatacaccgcgttctaatattgttgggcacaaaacatggaaaataatgaaattccatatatgacatataaaatccactctgaatttaaataaatcttcgtaaacaataattcataactaatatgcaagtttcataattaannnnnnnntatctgctaattttcaaattaaagttaagcggtctttaccaacctgtaaggtctgttgggttttatgtcctaaannnnnnnnnnttcaatataatcagatttaattattaatatagatcagaaat

SEQ ID NO: 103899 - DNA, 520 bp, Cannabis sativa
ttcttcttctttctctacagaaacactcccagcaaaagaagagcgcaaaaccagagaagcttaaaaaccacttatcgtctcctactccatctccaaatctattattgtaattgtaacttggatcttatatattgctcaatcaatggagttactttacattaaaaaaatctcacgccaatctctctatgtctatcaacctctctccattttgtaaccctaaaaatacatcattctcttcttctctctcaactcactgcctccctcaactcaaaagcctaactcaaattcaggtttagagatgacggattcgagtaattgagtaagaacctcatagatggacggaattcgaattcaggtttaggagaggtcagagcgaagagcatcgaccacatcttgttcgtgatcgttaacaaattttaaaatactcttcaactgcgaaactctccattcatagctccgagttttaccagaggcgaaactctgtttcaactctttgagcaaaaacgacgccgttgttgaa

SEQ ID NO: 103900 - DNA, 3708 bp, Cannabis sativa
tattattatttcttttgatcaatagtattgttattattattgctatgttgttcaatttttcttactatgcaatggcccattaattttcttgcaggggcagtactgttggtgtggttattagtttgggtcttgtggacatgaaactacgttcatcgtccttcttttgggctgattcttatagctatcattgtgttgtgaaaggaatgtgtttggttaattattaataaggaagaaagggtaattatcattttgcattcttggggtaagctcaatcgccatcgtcatattgtcagctcatttttatattatgttgaaatttcaaatgtaatttattattattattattattattattattaagaaaaatttaagatttactacatgtacaatcaaattatgaataaaaccatttctatatatattatttatagaggtgatttgcgtgccaactgttaaactaatttataaagcatgacatgtaagtgaaaaatatgttaatggtgacaaaataagaatctggaattgggtcctactttttcgcttcctgtaagcactagatcaaatgagaatcacttttattacgattgttccttctttatcgtcgtcactttattcgcctgcactacaaagtgatatacaatgtacatggacagagaacatataaaataagaattagctttagtggaagaaaaagaagcctagtaagttattttattaataataataatgataccccatcagcctaataatgaggttaaagagccacttcaagaagaatgtggaataatttgctcactttgaaaatataaaattattggccgcgcagaaatggtgatgagcgtattcctatttggttttaatgtttttttcttctacttttcttccgataacatttatcattaaaaggaagaaagaaagtgggggccaaacttttatcataaagcagagttgggaaacatcttcactttttcaatcagtgcgagaaacaattcttcggcaaagttgacactagagatgcatttgatatcgttcattgaccataagtgaatgtgaactgttccactaatcgcagtacaagtttaatatgtctatgcgtataatatgcttataggaaagaatatataagttgaattgcctgccaccgggatcaggaaaactatattaggtgtataaataaatgaatttggaatggggcacaggctgcccctactgtgacttagaatctaatcctttcgaatatctacatacatgtaataatcttaccgtgtggtttcgtctaagtttgttaggtaatactatcttagattattgttttatcttttgtcatctcatgttacagcattggggttttccactttgctgcaatttggtccacatgcaaatcatctgtctaggagattggtagtgtgcagtgtaataatcatcaatgcaaccaaactggcagaatttcaagctatgcagataatttactggccttgaactgttgaattgctcaacccacatgcccatgctcacgtcttccatcttgaacaactgaacgtaaaaaaacactcatgtaaattgtcaaaccattgaccttaccaaaaaaaaaaaatcaacaaagaagaagattacaggtaagattgatcggacttactctcaacttctgcttttcgaactcggatatgataaactctgcaatgtcaagggatatgatatagcctggaccatttgcataaggtggataatcttcttctggccattcctggatttcagggaaaataatgtatatgtgatgagatcatgtacatacaagttcaacgtatttacagcagatgaagtttgcaaaataaataattgaaaatattaaattaagaagtagaaaatggttttcgatttcttcaggaatgatgtctttgaacacacaaaaaagtaccatatgaactaatcatgcctcacttgttttaaacacaaaaattgactagtccgcaaacaatgtcatcagatgtaggagacctatctaaaattatatcaaaaaatagtctagcatagtagtttattatcttacagttcgttatttattatctttgttagttttactaggactatataagcctaaggaagcaaatgtattagcaggttaacatatattgaaatagaatcttgtaaaagagtttctcttgtttcaggttttccccttttctcattatttccaacccgctgcatcacaatgtaaatatatcatcagacatgaatagagctagacaataggcaggcaataaaagcatgcggtcattcaatctctacaaaattagcggactacttccagcagaaataacgagcccatcaaagttctttcctgagcagagggtttcatataagccactaactttcaagaggataagtagaataaagaattgaaatgtaatcaattttcaagcacatttagaacaagcaaagaaagcagctatcggttaagagaatggagaaccaagcagaattcatacctcatatgtcactgcccatttgccatgacgaaagggtttgtgatggtagttgacgtttccaatatagagacttctatctccatgaactttgtgtgcctccttaagcacggcatccaccctaacaaaagtgtcgtcatcacacttcatcacatactttgcagcaacagtacgaacctgacaagaccgataaccaaagacatttcaaatttatgtgtagaaatgaaagacacaaatgtaggaaaatcttattcaaacaccactcaccccatattcacatattgctatagtcttcaacacaacaaggtcatagttatcaatataagggactataacaatgtcaccaaaataatctgcttccttttttaactcaaagtttacctcctttcttccattctgcaaaaatgaaattcttagaccttcaatactgacctgaaaaggaaaactaatacacaaatgatgtttcaaaactgaagaaatgcgatccacttatgaatgcacatctgaacttacaagtgctacgaaaaaacgagctacaacatctgaagatttaattaagtcgtgctgcatccacgacttccttacagccatccgttcagcaaaatggttaccggccgaaaggatgccaatgaaaagtcccacctgaccattgggaagattcggagctttccatctagtagacatctcaagatgcatttggggtgaaaaactaggatgtgatgtgggtaaggaagccgcaaatacagaatgcacatccacatccccattcacaaaaagtccagtggcatcatcaagaacaaaaccctaaagaaaaaacagaattagtatgtcctggattttaggatggtttcaagaagtgccaaaacaatattgcttaccgtacgatatgggaaagaagttacatgacgaccatcaacattgatatggtacccttccaagccagcactcacagtaagcacaaatagcctgccctctgcgaaaggatacggccaatctatggtcaccttctttgtacggccaatcagcctgttcaaccaccacaaagcttttgattcttctgagtgattatcatcatcacgaatccacttctcgcatttcacctgtccatcaactatatcaaaaaataaaaataaaaaataataataattaaaacgaaaactgtagatgtaaaaataaattaatatgatcgaatctactcaaagcttgttttggaaaaaaaaaaaaa

SEQ ID NO: 103901 - DNA, 509 bp, Cannabis sativa
gtgtcaacacaagctgcccaatcaacatctgtgtaaccttggagctgaacttcagactttgtttgataaaacaacccatgtctaggtgttccctgcacatatttcaaggctttttgggtagcattcatgtgtggggctctcggggcaacaagaaattggctcaacttgttgacggtgtaagccaaatctggtctagtaatagtgagatactgcagcttccctattatttgtctatactacttgggatcagcaagagcatcctcactatcttggctgagttttaggtttacctccataagtgtgttggctgctttacatccgagttgtccaaggtcctctaagagttgtagagcatagtgtctttgagacaagaaaatgccctcatcacttctagcactttcgagtcccaaaaaatacttgagctcacaaaggtctttcaacctaaacttatcattcaatctggttttcaaactctgaacagcagccatgttgttgctagcaatgatcac

SEQ ID NO: 103902 - DNA, 536 bp, Cannabis sativa
gactcttgtgaatcgtttgtatgacactgctccgcttttaccttggctagtcataggtgactttaacgattatctttctgttagtgataagaattctcctaaccctccccctgctcatagcatgcattactttctctcttttttgtttaaatgtaatcttctccccctttcttattcgggtaacaaattcacttggagacacggacgtactttagaatgccttgactggtgtaccaccactcaatcttggcagaatcttttcctcaggcttctctcttccacttggggttctatggatttgatcatagagttctcaaagttcagcttgaagacactgctatgtcatctcataggtcctctcatttccatatggaagatttttggctcaatgatccttctttcaatgatactgtccattcttcttagcgcactcctgttactcccatttcctctcctcttcaaaccttcctgagcaagcaatcgaattgtcccactgatataagacttggagtaattctcaatatccccttaaaatt

SEQ ID NO: 103903 - DNA, 519 bp, Cannabis sativa
atggagcgacgattgactataaacgaaagatggtagtgtttgagcccgatagtgctaacccagcagtgttcgtgggtaaggttcaggggcacgcataccgagaatatccctgttgaaagctatagacctgatgggtagatgttgtcagcggttcatagtcactgcagtggataccagccaacctgtgacatcagggccttaaaatatgagattggtatgcgagttccttgatgtctttccagaagatttgccgggattgccacctatccgggaaattgaatttgttattgaattggttttgggagtggatccagtatctaaggcactgtagcgaatggctccagctgagttgaaggaattgaagatacaattgcaagagttgctgaatctgggattcatccgaccgagctgctcaccttgggctgctccggttttgtttgtgaagaagaaagacaaaaccctgcgaatgtgtattgattaccgggagttgaacacgcttactattaagaacaagtatcc

SEQ ID NO: 103904 - DNA, 706 bp, Cannabis sativa
  modified_base (53)..(57): a, c, t, g, unknown or other
tagaaagttcttatttaggatgttaataaacataattgtgagtagatctaagnnnnnggtaaaataaattccaacagtctgcccattttattccaatccgaaaggattacaagcttaccaggctagctcgattttatgtagacaatatagtttgactacatggagtgccttcaagcattatttctaatagagatcctcgatttacatcaaggttttggaaggccttacaacaagccttaggagctgaacttcacttgagtactgcccatcatccatagacagatggacagtctgagaggaccatacagactttggaagacatgcttcgctcttttgttttggaatttggaggtagttggggagaacacttgtcactagtggaattcacatacaacaatagctaccaagctagtataggcatggctcctaatgaggccttatatgggagaccatgcagatttccattgtgttgggcagaaccagatgagcatgtcactattggaccccagattatcaccggtaccactgaaaagattaagggaatccaagaaagacttaaggttgttcagagttgtcagaaaagctatgccaatctccatcgatagaaagttgagtttaatgttggtgattatgtcttattgaaagttacttctatgcgtggcgtaacgagatttggagtgaagggtaagctagccccaaggtatat

SEQ ID NO: 103905 - DNA, 583 bp, Cannabis sativa
tagaaaatataaccgtcttttacttatttgtatagtattagaaacttctttttatttctctaaaattaattcttaaatttgttctagctcttcttatttttcttatcattttaatatgtgaaagcattgaatgaaaatacattatttacataatgcattcacataaagagtatgttatacacataacactaatcgtattgcccaaacctacatcaatccctcaaaaaaagttatacaaactaatcatggtagcttaaaaaaagtatcaagttttgttcaacgacttattggtcaaatttttattcttgaacaaattatcattaaatagtatttatttagcactataaaatctattaacaatatatatattttaatggcaagcatagagcctaaatctttcattaatttatccttattttttgtgctaattagaacctagctccattcaattattaatatatatatacatactgactgaaacaaatcttcaaaaaaaataatatatatatatatatgaagaatttttattttttaaattaaaaatatatatggagaataaagtgattaatatatatatttatat

SEQ ID NO: 103906 - DNA, 2537 bp, Cannabis sativa
tttctaaaatagtaaaaatagaaccctgagcttaatttttgacaactattttttttaatacaaccaacttgaagacaatgcttaatacaagcaaaaaatgtaatcgacctcacataaacgcctgtgatgatgacacttttgtgggaattcaaatttagtcctttcattaatgttatattattttgagaaaagcaaactatatattttgagactgttgcttcaacaaataagaaagaactgaattataaactgtcactttgagtttcattacaggctttatgctcttttgtctaaagttttctacttctttatatatttacttctttagtttagtacaatgatttctttctaaggcttagccactttctgattactttttgcaggaaaaagggattggctcctcaagggtggcataggtaatttaccaattctctctgttttagttcactgtgccttctcattgtgtccatttttttctactctccaggtagaatatggctttttacactaaatcatcatttaaaatcttttttttttgtgtgtgtgtgcgcgtgcagctgttggtgctatttttgctgggataatactgatgggatttgtggtcttttgctatcaacgtcgaaataaaaaaacaaatgcaccgccatattttctgtctcgcagcatttcctctaatatctcttccgtaaaggatattgaaaaaggtagcacttactttggagtacatctcttctcctatgaggagcttgtggaagccacaaataattttgattcatccaaagaacttggagatggaggctttggcactgtatattatggtaaggacactcctttattttaaatgttgattcttcttgaaagctagttttgtaacactagaaaagaacaagcaattgacttgtttagatgaatctctacacaggaaaactacacgatggcagagaagttgcagtcaagcgtctctacgaaagcaattgcaggagagtagagcagtttatgaatgaagttactattttagctagcctacgccatccaaatcttgtttccctattcggctgcacctcccgccacagccatggactccttctagtatatgagtacattcaaaatggaactgttgctgatcatcttcacggtcaaagagctaagcctggtgcactggcatggcctatgcgactaaagatcgccatagagacggcatgtgcattggcatatctccacgcctctgatattgtacaccgtgatgtgaaaacaaccaatatactcctggacagtagtttttcagtcaaagtagcagattttggattgtctcggctctttccaacacatgtcactcatgtctcaactgctccacaagggactcccggttatgttgatccagagtatcatcaatgttaccagctgaccagtaagagtgatgtctacagctttggggtagttttaatggagcttgtatcatccatgcctgctgttgacatagcaaggcatcgacacgacattaatttgtctactatggctatcaatcggattcaaaatcacacattacatgagattgttgacccatgtctcaagtttgatacagacattagagtgaagcaaactataacaggcgtagctgaattagcatttcaatgtcttcaaaatgagaaggatttgagaccatctatggttgatgtactggaagaactaaaggccatacagagtagaggttataaaaccaagaatgccaaaaatgattccacagaagatgatgttgggttgctaaaatgtggtccattaacactttcccctgacactgttacaataagctggagtagtagcaggaatacaacgccaaatgcaagtggttaagtttcttgtacatttcacttggtattattcagtcagtatagtgcaactactatctacaatatgtcttcaagtgggtgacttttcatttcgatttttcatctactaaatgttttttttttctcttgaatgagatgtacataatgtgtcattccatatgaaggacgaggctcatctacaatgagactgattttaactaatgtttctgacttgtaattccctgtggctgttttatttatattagctgtaaatgcgcaacggttttagtaatcacaactttcagctttgtatagtgtgtaaagctgctagattttttgtccttccgctcatttttaggaatgacatccctcacttcttaatgaccatagggttataggaaaacatagcaatatgatccaatagcttccaatattattttttctcatccgatctaatctaatgagtaattagatttaaaaaatcaccaatccgatccaatccaattagaccttaaaatccaatcaaatcgaattttcaattagagatccgattgcacacctaatttttaatattaacttaaaaaaaataaagaaatatatgtaaaatataaatattgttataaatattaataattatgtagatatccaaatcttttatttattaccattaattgtaatcaacattcatctttttcttagtttctatttttc

SEQ ID NO: 103907 - DNA, 639 bp, Cannabis sativa
aggatgtcgtcgataaatacaataacacaaatattgaggaaatccttcaataccctattcatcggttccatgaaagctacacgagcattggtcattccaaaggacataaccataaattcataatgtccatacctagtatggaaagctatctttggaatgtcctcctctcggattctcaactgatgatagcccgatctgagatcaatctttgaaaagaccgtcttcccctgaagttgattaaaaagatcgtcgatcctaggtaaaggatatttattgttgcttgttagcttattcaattcccagtagtcaatgcacatccacaaagagccatccttcttctaaacaaataatactggagctccccagggtgacacactgggccgagaaaaccctatgtcaagcaacccctcaagttgaattttcagctccttaagttctggtggagccattctgtaagaggccttagaaaccagttctgctccaggtgccaagtcaataacaaaatcaatttttggctgaggtcgtaaacccggaagttgatcaggaaaaacatctacaaattcctgaaccacctcgatgttttctggccgaacagagtcaggtcaagtggtatccaataccacagccaaaaaccctaga

SEQ ID NO: 103908 - DNA, 761 bp, Cannabis sativa
tttagtattaattttagattaagtttagtatatttttaattgagttttaatcgtgtttggagcatttttacagttgttatcttgtatttttgcagatttaaaataaaagaaaattagaaaaatatcagagaaaaaagataaaaatatctcacaaaaaaatgatatttaaaatagagaaaattgtgcaagaagataaagttgaaacttcaagcgtgaattcgattatgttctgattagattttagaaaaagtcaaaacatgaaagttctagatctctcttttatgtttccagaacatcttgaatcgtccgattccgtataatatcgagagatttatggccaaaataccatcagtcaatgcaacagaatactcacatcctcttctaatcctaagcaaaataggtaatctaatcctaaagagaatatattttttttattcagcgatttttatcttattttatcattttttggctataaaagaagtggagttcaatagttttggccacacaattgagagggaaaaatgagtacgaatttcagagaccaaaatcaatactggaggcattttatagagggttttcagcattattttattctctatcttcttctctttcttaaagttcatatgtatgattttgtttccatgaacatgtgtagctaaatacttaattagggttatatggatgttgtttgacattgctttatggttttaatatgatttattttcccccagtttctatgtattttatttcattcgtactta

SEQ ID NO: 103909 - DNA, 740 bp, Cannabis sativa
aaataccaaaacacaaagaaagtcagattgacatacccttttctcgaatagggtagcgacatcaggttgcttgacatcatgtttcgtaactgtgttgggggtgctccaattcaacattcgagggaatctagtccctctgcactgcccgtacttcttccccaaatcctgcatcacctcaaaggcccagtattgtagcgccggtgcatatccgtagacattgtacttcgcctctggttgagtaatttttttctccttcttccctttcttcttatccttagtagatttatcaaggtagttcttcctcaggtcagtcatacttttggctgtggatgacaacaacttctgatatgaaagaaggccccacggatattcgaagaacttctcctcgttttctaccaacttcagcatatccgaccatatgtaaacaccctcagccctagatagaagcactccttcaacaaatgcacacagccccagcttgtacacgtcgtcggccacatcgcacgcctcaaaagctagccaaagggttttgaaagtgacccgtttggcattattgaggtagtcccgcaatatttgatcacactcacatagtgtagtcaattcttcagtcgaggggccaccgctcatcttcaggcacgtgatcaatcgaaactcagaccttccaaatctggcctcggttttacccacgtaaaaccacacttcatcattctttacctcagtcactttcattttcctcaaca

SEQ ID NO: 103910 - DNA, 682 bp, Cannabis sativa
taaaaattgaataattattaggataaaaaattaaaccaattaatataataaatagttagtctagtttgatgaagactaaaaatttagtatttaatttaactgtgatgagaaaaactatgtaatatattttgtctttctctgcaaaagtagacaagtgcagataatagaaaagaaagatgaacaaattacattaaattagaaaagtcttttcttttcatcttgatctctaaagccctaattaataatttggagtagacaaaaaatatcagaggaaagtggaatgaaaagttagcctaaattaaaaaagaaaaacgtttacacattttcatctaataaagtgatataattatataaattgattttaaataaaattacttttaaaattaactaacaagtacatatctatataattgtgatatatatatgtatccattaatttatataaaatagttaaaatattttgtagttaaaactactattttaaagattcacaaaaatatgtgatacacataataattaattgacagtgttattaagaaatacacaacaaatttctattcaataagccttagttatatttatatatatattaccgcttcaccatcaatagtactggaaggagtatgaaaagtctgttttgatgatttagaacgatcattatttgtttgacgtgctgttattg

SEQ ID NO: 103911 - DNA, 2899 bp, Cannabis sativa
taaatatgttttcaaatatgtgcatttttaaaattgtgtttttttgcacattttttgtaattatttaaaaaaatgtatacatttatgtaaaatgctctattataattcccccaaaaataaataataaaataaaataaaaagacatccattttttttttgtgtctccctcttcttccttatttatttttggtgttaaatgtttaatttgtactaaaaaggattgggacgaatcccaaaaaccaaaataaaaatgagaatgtgaaattgggtctgttcccgcattcccgatcaggattcagccactctcttctccgttcttcgatccggtacttccatccccccttcttcactcacccatttttgtttctttatgcaaaaataattcatatttatattttcattactaatttggttacaatttatttatttatttatttttttttttttttgggggggggggtcaataaatgatgatcgcactctatgttgtatcgctggatttgaatttgttgtatatcaattctcgcttgtttcgaaaaatgaacgattctgttggtgtttgttgctcttgcattactgtcttttcaatttcttttcttctttgaatttggtatggtaaaaacaagggaatccaattacgctgtgtattttttactagtaataatggtttgaactttaaagattgtcaagacccgtactattatttgtcaattatataaaattggagaccttaaacgtgatagttcagcttaaaagggttgctataattctgttcatatgttagttttgctacatgtagatttaattttgttggcccgtgtccaagccacacgtctcttctaagaggatcaaatgtctggaattggacaaagtaatttgtatttgttgtgatttataccattttcgacttttttggtatattgtctttctcttagttgttcttattccttcttttgcatatgttctccgctactgtggcccttaaaggtgtacatttctcaacctattctaactcttgtggttctgtttgtgcttttttggtttattttaagttccttttgtatggaagatttatgttatgtttggtctatgtatagacagtggtagtgctgagtttgactgtcctagaactagaaggcttttggacttctgttgatgggtgctcctaaacagaagtggacagcagaagaagaagcagcccttaaagctggggtaatcaaacatggggcaggaaaatggcgcacgatactcacagatccagagttcagttctatattgcatttgcgttcaaatgttgatctcaaggtatccatctgtaaatttcttgcggtgacagtaagtaagtttcagaatatcatcagtctggatggatggttttatgtttcttgggcctttaactcttttccaattatattatgcattttgcatctttcaagatcacattttatttggttcggacaggataaatggagaaatattaatgtgactgcaatatgggggtcaaggcagaaagctaagcttgcgcttaaaaagaacctaccaacacctaaacttgataacaaccctttggctttggttactgtagttcagaatgttgaagaagttgttgatgctaagcctcttgcaattgctagtggaacaatgcgaaataccaattcaaaagaaccaaatgccaggtagattaagttgacttaacaattttgcttttttcactaatgattgtagcttttcttttcctagtatagacaactcattctgaagaaaagctattcttacttggtccttctcattctttgatatcattctagaaacagccttgcttttggttggatgcttggatttttcagctatagacatttgattagcttatccctgttgagttgttagaagtgcttaagtggtgatttgcatttgtttatggccaaaatttgtctgcttatactagtgtgtgtggccaatttggtaatttgcataaacttctaaaaattacttaaatcctagaagattctagattgcactcttctttgttgaggtggaaatttgagggttctaatggacagaattttatattggaggctgtactgtttcattttgcttgaagcgtaatgactagctttgtttgggttttctttggttggttgcaggttggataagcttatattagatgctattaccaatttgagggagctgaggggttctgacagggctgcaattgcaatgtacatagaggtatctgtgcttatattttctaatttggtctcagaagcctctggtaagaattaataacaatttgagaagcttttcataatcttaatatttgaaaaactatccggaatatatcatacttattaaacaaatactcatggagtcaaactgcataatcgtttcaaagattctttttttactttgttttttgtgatgtactagagtaattgtaagctgatttgtactatagcctagttgtctcctttctaagagcagaggacacagatagtaacatgtagtggctgagtcacctgtgtcaccgataatattgccaatttcaaattaattggattcactactgctaagccactgaggctatatctcagtggtgagggtcctgagggatggtggggaaaagggtggtgctctcaggttcgttcctgggacctcttggttctttaaggtgttgtgcagtgcaccaactgggctacacagcaataaataaataaataaataaataaagggattcacaaccattaaaatttggcgacagtttcaagatgcttattgtgaactttgtgatgtagccacttaccaattctattgaatgcttctgcattctgctaagtaaacaatgtcatctcaactaataaggacaaactgtgtaatccagaatatgaaaataatttcacat

SEQ ID NO: 103912 - DNA, 539 bp, Cannabis sativa
  modified_base (180)..(181): a, c, t, g, unknown or other
caaccagagtcccacgagactctaaagtgcactccactgcgccctcagcccgcagtgccttatccaccatttcagcataggtggtattgtcttctgtagtgatcatcaagtcgtgtctgaccttcgcatttaacccatccagatacttctctttctttctgaaatcggttggcacaattnncgaggccaaccttgccaaacgatcaaattgggtcgtgtattcagtaacactcatgttttctttctgggttggttgggtgaattcttttcttttagcacttctgactgcatcattgtaatatttagcattaaatagttcttggaacttttccttggtcatagttgtcacatcatgtatcatggacaccatgtcccaccagaccagagaatcttcttgaaattgaaaagtggcacaggccaccctatcattacctgtgacgaccataaaattcaagattctgctaatcactgttagccattgctcggctttcatgacatcaacatctcccagaaaaactggaggtgcttgcttgcagaac

SEQ ID NO: 103913 - DNA, 664 bp, Cannabis sativa
ttgttattagtctgaaaactaaaagtaggagattgattcaaggacaatacctgattggaggacacctttggtgagtttgacaaggcagggaaatgtccctctttgaaaatgacattgcgtgagatgtagaccttgccatttgggtgttcacacaaatatcctttgtggtgagaagaataacccaaaaatatacactcctgagatctcaattcaagcttgtgactattgtatggcctcagatggggaaagcagctacacccaaaggtttttaaaatattgtagtctggcttagtgccaaagagacactcataaggactcatattaccaataactggtgttggaagtctatttattatgaaaacagcacaagacatagcataccaccaataatccatgctcaaaccagcatgagttaataatgtgagaccagtttcagtgatgtgtctgtgtttgcgttccacacgaccattttgttcacttgttctaggacaaggatgttgaaaatgaatcccttggtcatataaaaaaatgagcaaatggtctatattcaccccccagtcagctggacacttttaataggcagattaaattgtttttccacaagacttttaaactttatgaaaacatcaaaagcatggtttttttgagttaatggaaaaatcca

SEQ ID NO: 103914 - DNA, 548 bp, Cannabis sativa
ccctggttggaatggagctatgagtaatgaagttggtgctctcaaagcaaagaaaacatatactttggtaccatattcagatgcatacaatgtgattggatgtttataaaataaaaagaaatgcagagggttcactccaaagactcaaagcgagactcgttgccaaaggatttcatcaaaggccgggacttgactatagtgaaactttcagtcccgttgtcaaggcctccaccattcgaattgtactcaccattgctgtctcaaacaactaggaaattcatcaattggatatcaacaatgccttcttgaatgggcaccttgaaaaggatgtttatatgtatcaacccgaggggttcgaggacccttcaaaaccaaaccatgtgtgcaaattgcacaagtccctctatggtttgaaacaagctcctcgagcttggttcgacaagctgaaaaacaccttgctgaactggaacttcaagaactccagagccgacacttccctattttactataaggatgaaaagttaattatctttgtgcttatttatgtc

SEQ ID NO: 103915 - DNA, 694 bp, Cannabis sativa
  modified_base (498)..(529): a, c, t, g, unknown or other
tttctttattgatatttgaataataaagattacattgaaatgtagttttatttagggcataaaacccaataataagaacaatctgaaaacggttaagcaatgatgctttagtttttcaatcatgtgtgttagagaatgataaatccatctggattcttgattctagatctacaaaccatgtcagttgttcattgcaattgcatgaaaactggaattattataaatccaaaaagttgaaactcaaagttggtaatggcaaaatggtatcggttagagctagaggaaaaggcaaactcaagtttcagaacaaaattttagaattagacaatgtcttattcattccaaatttcagtagaaacttgatttctgtttcatgcttacaattgtaacaatacaaattagatttttcaagttctcattctaccatttctcgaaattacattcaaatttgtgttgcatctatggaatatgggctttattgttgggttttgtgccctnnnnnnnnnnnnnnnnnnnnnnnnnnnnnnnnctaattaataaagattagaaattattttatgcatcaaggttcacatgatttatttcatgattatatttaattttattaagtccagaacatatgtatttgttaatgattgtagtgttgtcaacacagtggaatataattatgattatatcttcaaaagtttaattc

SEQ ID NO: 103916 - DNA, 860 bp, Cannabis sativa
  modified_base (50)..(57): a, c, t, g, unknown or other
gctgctatttcctcttcgttttttaagcacagaagaagaagaagaagaannnnnnnnagaagaagaagaaggaggaggaagaggaggaggaggaggaggagggggcagcgggtagggctaagagagaatgagaagagaaagaggaattagggttttgttaatttttatttttttttaaattgttttttaattttaaagaaaaataattttttttttatgttttatttttatttttaaaataattatttttttaattttaattttaaatatttattacgtggaccgataaaattgtgctacgtgtacactgtgtacacatgaacattccaccatggcagttaacagccaaaaatggacggaaagggctaagtgctaacagaatttgggtttaggaggttttaccaccaaaattttagaattggggtttagttgcaaaaacttgcccactttaggaggttatgccgtaaataactcttttttttaaagagctattcagtgtgggtttgttgttatatttgagggtttgcaatggagtacgggctttcagatagctagcatcagtggtctaaatattagagagagagtcactgaaggaaaaaagaatagagatcgagaaaaaaaaataataaaaaaaaacatttttttatttttagatatttttttttttgtgaattaataaaattatgtcacactgtataaacattatgttatattaacatggacaatttaatttagatgttaacatctaaataacaaactgtttagttttttgaaatttaattgtcaaaaaaataagtttgagaagttaattgctagtaagataatacttctgaggattttgctgcaattcactcaatttt

SEQ ID NO: 103917 - DNA, 900 bp, Cannabis sativa
cgaatactatagttatttattttaaagaaagactaaactggaagtctctgaaaccagatcggaccgtaggattgttccaaaacacgccgtaattaggtttagtatgcacgatttaccacttattgcgacgatcgacctacatccgccactatgtaacttgtttcattgaatagtcttaccgaatactataattatttattttagcgaaaaactaaatcggaagtctccaaaacacaattggaccgtagcatcgttccaaaacacgtcgtaattaggttcggtacgcatgatttaccacttattgcgacgatcgaccaacatccgccgctatgtagcttgttttaccgaatagtcttaccgaatactatagttatttattttagcgaaagactttgccggtagtctccgaaacccgatcggaccgtaggatcgttccaaaaacacgccgtaattaggtttggtacgcatgatttaccactaattgcgatgatcaacctacatccacctttatctagcttgttttaccgaatagtcttaccgaatactatagttatttattttagcaaaagactaagccgaaagtctccgaaacccaatcagaccgtaggatcattctaaaacacgctgtaattaggttcggtacgcacgatttaccacttattgcgacgattgacctagatttgccgctatgtattttattttactgaatagtcttaccgaatactatagttatttattttagcgaaagactaagctggaagtctccgaaacctgatcggactgtaggatcgtttcaatacacggtgtaattagatttggtacgtacgatttatcacttgttgcgacgatctacctagatccgccactatgtagcttgttttaccgaatagtcttaccgaa

SEQ ID NO: 103918 - DNA, 575 bp, Cannabis sativa
ataagttcaaatctgatgatcgcgtggtggaatcgatgatgactcgtaaattgaggaacgagcaaataagctactcacacgtaaagtaggaaattaactacttaatgtcggaggaaaggacaagcaatggaaacccctaataaactttatgcatgtgatagtttatattgtgaataaaacacaagcaaacatccgcatagtaaagtttaaacttaaatgtgtgaggcattaaaaagcaaacttggccatccaaccttacaaatctgtctttacaaaacaagttctgctaggggcaaaaccattggctcagccaaagggccatttcctaaaagagaaaaagggagataaataaaccaagtctacatgctgggagacttggaaaaatcttcttcttcttccttcatcttggtcttcttgcaaagagctaaagtttcctcttcatgctcctcctagaagcttgtatccatgttagtgttccaaagctaggcctgatatacagtgcaaaaaccaactttatcacaccgttctacggtctcgacttctttcacagtaagtttttcagcaagcttctcctc

SEQ ID NO: 103919 - DNA, 660 bp, Cannabis sativa
aaaatattgattccgactccgatgatggtgatgagttggttaaagatggtggtgatgatgatggagatgataaggtttttaatgatgttcctgctgctgatgtgaatcaatctgaggatgttgcaggcagtgatgagagggctaaggatgttgagaaccttaaggccaaatagtccagcttaaagggagatgattttttttttatggtttaagccagcttgaaattgatgatgataaagttgtgttggctggtttcgaggttgttcgtaaaatcaatgttagtgtatcttaatttgtttgcaagaaaattatgttttattttagttgcttgacagtttaatgtttgttttgcaactatttattttctgactttatttttttttaggtcccagaaccaaatccaggtgttgttggtgaaaaggcagctgccattcctactgatgaagaagctgaggacactgtttcagatactcctcttttggataagagaaagcgggtaccggcattgaaatcacctttcgttgattttgggtcggctgatgtgaggagcactccaatggaagggatgcgagggattttaagatggttacttatgtgaagggcctttatgctcttaacgattcatttgctgatcccgtctctcttgaaattgaggcaaag

SEQ ID NO: 103920 - DNA, 759 bp, Cannabis sativa
aataaatttgttatacataatcttcaaaataacataacttgttttaccttggtattcagttcagtacaatatagttcttaataaattgtaaatgtgttgttgactcaccaaaaaagaagaccaatacgtctcaaaacaatatctttttttttttaaaaaaaaaaaaaaaagaagaagaggacaacaatagcacaaaaaaaatgagtagaggtataataataaggtggatctatctataccccccaaaattattattatgttggaaaatttacaaaaatactaaaatttaaattaacttttacagaaatactagaacacggaaattttttcaaaaatattgtatttttataaaataatagtagaacacaaaacagaacaactaaaaacaacagtagaacaactaaaaaacaaccatagaacaacacttaaaatttaacacagtacatagtataaaacttgcacggtatttttttaaaaaaacttctggcccacaataaaaaagtaaacaaatgaaaatttcagtagtatatgtgtaatgttaaggacattgggatttgatgagcatgtggtgaagttgttaatacagtgttagttctgtctcctacacgatcacatcggggggtcatgaaattggacctataattcctacaagaggtcttcgacggggtcatcccctttcacccaatcttttcattctgtgtgcagaaggattctcggctttgataagagactatgaacgattggggaagattcgggggt

SEQ ID NO: 103921 - DNA, 2989 bp, Cannabis sativa
  modified_base (708)..(708): a, c, t, g, unknown or other
cttgagaattatcaagcttttagaattttctagcaaagtgtattcttgatagaaaacttgatcattctcaaatgagcaccaaagacctccttttataatgtttaggtgatcacacttagaattcaaacaccccatctcatttctctcatataatgagcattaatataattgtaacaactatattttatacattttgaatcctattatcaaattgtttaacaactcttttattacactaataatgtgtgatcaacacaagagttacatgtgacaacaaattgtaactcctctccaagttacaacatgtaggttacaaagtgtatattaaaatcataggttacacatttatttaccatacacttaaaatatattatttagataataatatatttatcacattttaatctatacattattatattaaaaactaatataacagatagaatacacaacaaataatcctatataccctaaactacaaagcataattctatgttgcatgtacaaaatacaaaacgaaagaaactaaaaaacttttatgagagcgtatgagaataaataaataaataaatatataagaaaaattaattaattactttaccaccttttaaatttattggcatcttgtttttattgttagtgtgatctcaatgaaataccaaaatatataggttaactctctctatctataaatatatatataaatanatatatatatatatattcaatctgttataaaaacaaaaacgaaaatctacattaagaaaaatagacttctaaaaatatgagaatgggatgaaattcaaaacattgaagaaataaagaaaaaaaaatagtgctgagaatgtaaagtaagaacatattagttagatgtaaagtaagaacgtattagttagggttaggtttagaaaattcaaagtattttctaatcatattgagaataaatactttaaaacaaatgtttagccttattgtttttttaaggttttaagagtgatttttttagtcaaaattttttaaaatatagaaaattagaataattgttgtatacttatatgaatattttaaattaaaaaaatataaaaattaaggtgagaatacatagactaatttaaactaattttagtgatttttttagtaattttttttaaaaaaaaatagaaaattagagtaatttttgtataattttatattaaaaaaatataaaaaaatgagagaattaaggaaagaatcattacaagaaatgtcacttttgccagcacatttttgtgctggcacaagttagtattgcgctggtaaaatagaatttacttgtgctgtgttggcaaaagggggttggcaaatcaatattggtattagaatttttgctagtataaaataaaaagcgctggcaaagatgacttttcccagcacgtaaatgcgctggtaaaagttagattttagctactacaaatatacgctagtaaaactttgacctctttgccggcgcagtttgcgaaatgtaatttttaccagcgcagtaacgaactgtgctgataaaagtgacatttcttgtagtgaatacatatatctatttaaactaattttagactgccatgacactgtcttattcttctgttttatattaaaaaatataaaaaataagagaattaaggagaaaatacataaacttatttaaactaattttagactgttatgttaccgtcttaattttctcctttatatatattgatttgttattttataaataatttcaaccaattatccttacttaagtcttgttattgctacataagtaactgttaaattaatttgagtatatataatctatgtttgtatatatatatatattattattcgttactcatacatatatatatatatatataaatatattatatatagtttaaaaatgagaatttttttaatacacagggagaagagaagggtagatagtgtattatatatggagaagaaaggggcgagacgtggacattccaccatggcagttaacaatcaaaaatggatggaaatggttaagtgctaacagaacttgggtttagaaggttttaccaccaaaattttagaattgggggttagttgcaaacacctaactacttaaggaggttatgccacaaattacccaaagataaaatgtcattctatatttctatgtctactaaacaacatatggatgatatagcttatgcatggcatccatcttattttcttcctacttaacataacacaggaaaaaaaaaggcttcagagataaaaggaaagaactttaaaagtgtccatttctatgatctatttattggataattagcttctctcatgatgtttgtagaatctataatttttggtatacttgtatgggtaaatgcgacataagtactcaaaattttaagtttgtaagctgtataaatttatatttatttttagcagcataaataccttatgtttgtaaaatagtaattattctctagtttcgtcagttcagacttcgttttgaatttattaaaagaaaatttaaaagtaattaatacttgtttccatgatctagatgtaaaatttaaggtttatatgtgtcatgtttaagataataaaaaatgttgtactgacgaaattagagaaaaattacagctttacaaacttttaatacttatgcggttaaaaataaatattagatttatacttcttaaaaaattaaaactttaagtggtgatgccattattcatcctactttcattaaaataataatatcaataaataagtaaagtgaatcccaattttgatcatattgaaaattatcaagggaaccaaactgtgcaaatattaaaatttcaaaattcgctcttatatataagctgatatttttcatttttgaaaaagaagacaagatttttttttttttgaaaaaaaaaagacagactttttgtttaaaaaaaaatgtatatccattgataaagagttatttttttttttt

SEQ ID NO: 103922 - DNA, 966 bp, Cannabis sativa
tttttaattttttataattttacttaattttaaaataaattttgaaataataatatgaagtgtaccaatataaatgtgttacgtgtacaagagtatatacataagcatttcatggtcgcagttaagcgaatgacaccttaaatttgttaatagtttagtagtttagaaggttttaccgctaaaatttgaacttggagggttgagtgcaagtgaagcaatagttgagagagtttagcagcaaaaaattcataaatatatactattctgccgaatactacataaaactcatttaccatattttaaagatcctatgattgacaagacggttggtgggcagagagtaaactctatttttcgaactttaagcgaattgatctcctatttaaaaccgagattcttttaatggttcaaagtgtaaattattatagtatgtataaaaaagattatttagaaaatgcttatttatgtgaaataactttttgcacgagtgagtaaatttgtgctttaattcaaaagatatgcatgcaaatcactttacaagagtaagaactatatttaagccttgaatattatagacatatggcagggaaaaggaaagaagaactgatatgattttttattattttcttatgatctactatacagccctagcactgctagcagtcaattacaacttttcttattatattttagggcgtagaacaatgataggaaacttatattataccaatatcatctatataacgacaagacaaatctttttattaaataacaaaatagttattaattcttcagtaagtatactttggtcttgagttgtttgaggtcttgatgtcttcttgcagtccagttggtgatcttgaaattttggcttcatatcctttatccttgatataatatttagcttttaagtatattacttaaaaatctgctacaatatataaattaattagtaacaaataatta

SEQ ID NO: 103923 - DNA, 694 bp, Cannabis sativa
aaaagaagttgctctttactacttaagtagaactttagtaggggcagaacaaaactaccctccaatcgagaaagtgtgtctggctttaatttttgccgtcacaaaactacggcattatttgctctcccaccctgtgaatttagtgtcaaaagctgatcctctatgatatatcttatccaagtccgtgttttctggatgactttccaaatggtccatgattttgtcagaattttaaatcaactttgtccctcaaaaagcaataaaaggacaagctttggcagaatttttcgcagcacgcccaattccagatgatatggagttgtgagaagatcttccagacgaagaagttttcacagttgatacttcatcgtggcaattatattttgatgggtcagcgagaagtagtgggacaggtgctggaattgtctttgtgacaccgtcgggaggcttgataccttactctttccatattctagctatatgcacaaataatgtagcagaatatgaagcattaattatcggtcttgaagttgccactacaagaaaaacaggcaaactcggcataccaatctcggcgggcccgcgtgtgcccgtcaagattggtctctataccggtaggctcattgtaaaccgtcaagaatggtaaccaaagtatttttttaaaaaaaaataaaaagttggacccaatctcgac

SEQ ID NO: 103924 - DNA, 1041 bp, Cannabis sativa
ttcatgtgaaagatcaatctcactggattttgatccattttagcatcaaggacaggatgcttaatgtttacaactctttatctgggttacgcaatcagaacaaggccttgccccatgttaaggcatattctgtgatgttgccttatttcttggaattcctcaacttttatgcatcgaggccagatcttagcatggaagttggtccatattctgtgggaattagggagcctattaattataccttcattaaggggctgcctactcaaaagaagaggtaaattttctaactctataatagaaactagttttattaatactgtttattaatattcctttaattttcttattataaccagttttataatatatattttatgtttgatatttttatatttttgtttgttaaaacttttattaaatacagtgattgtggagtttttgtgattaagtttgctgatttgttcatcaatgggaagataaatgagataccacaaaatatggctgataggattgcaacttacagagatgatttggctgttagtttatttactcatgcttggaggaaacagattggtgggtatcagactgaagatgatgttcaagtcagaaaggagaagtcaaagaaactaaaggagaagaaaaatgctaaaggcaaagggaaagaagtttgagaagaggatgttgatgttctagagcagtctttttgttaatttttttatttcatttagataactggttttagtaatgacaatgatacttaacggtttaaatgtttttgtttctcttttgttatcttggatatatgttaaacacactgtgttatggttattaatggaaatagatgttatatccaaaaagtggtttttataagtagttttgcgttaattttttcaatttttaaaaatctatttttgtagctaatttgtatttcaggtaaaactggttttataatgttgtttattattttattagaaatttgtgaaggtaattttttcactggttatgtattgtgggtgttttttttttttttgtttattaatt

SEQ ID NO: 103925 - DNA, 1286 bp, Cannabis sativa
aatataaatgtttatttttgcttgaaacattataaatgtttatttaaagtaatattaacccaaaatagaaaaaatccctatttaaaatttgagattattgaattatttattatttttttttagtgttacaaataaaataggatataaaattacaaatttaaaaatttaatttatgtaatcacttttaacttaatttttaatattagtatataaattatttttgagtaatcatattcttttgaatcacatttaattttattatatatagatagttttttaaattgtagcttttaatttttttttatataagttagttactaagttagttacaaaataaatttaaatgatattttttttctttaaaaaaacctatgagaattgacctctccaacctacatatcctcatacatattagatatggagaataatattattttaatctcaataaaattgcacatgtatagcatcagcaatttatctgtgaataaaacttccactaatatacaaaaaataattagcaattttcaacggtgtaaagatttggtacatatatctaattatttatattattattgagaactcgttggtacataaaaaaaaattataagataaaataacatagcataaagataatgtaaaagaataaaagagagtgatattaaaaggaatgccaaaccaactctttccttttgttgatcattctttctctgagtagatgtatgtgtattcttggtagatttgcattatatacaattgctaaccataatctcaaaagatgaaaaataaagaaatagaagaagaaggagataggccgagatagtgaaaaaaataagattgataaaaatatagttttaagttatttataattatgtttagcgtattttgtttttaatatatatagctagcaaaaatttataaattaaaaaatagttatatacacatccatgccaaatatcttagctatatattttttaatgttaattaattttttaattaataaaatattaaaaaaaataaataaaaataatgtcaaaaagctaagaacgtgtgataatagatttataaaattaataaaaattaaaaaatgagataattaaggagagaacaaataagattgaatagagagattttagagtaccacgttaccgcctcatgtctctcctttatatgtatactattagaattataacaggattagtctactgacagtttgttactgacagtttgttagttatagtttttaccgttatttcagttagtctattctgttacattagctatctttt

SEQ ID NO: 103926 - DNA, 551 bp, Cannabis sativa
gaaaaagaaggacaaagaagatgaggacagcaacaatgactctaatgcagtaattgatgattcagatggggatgttcttacaatctctaacactgaaactaatgttgaaagttcaacagatggtgatgtatgcaccagttcttgtcacaaggatcaagattggatcatggatagtggatgtacatatcacatgagtccaaatagggactggttcatggattacaaaagcatagatggtggtagtgttgtaatggggaatgatcacaaatgtagtgtaattggaattggatctattgtcattaaaagttttgatgggactttcaaaactttacacaaagttaggcatattccagatctgaaaagaaatcttatttctttgggaacattagatgatgaaggatatgattacaagacaagcaaaggtgtaatcaagatcactaaaggttcattgctcatgcttaagggcattaagagacatggtctctattatcttgatggaaaaactgtcacaccagctcatgctgctgctgttgacaaatgtaattcagaat

SEQ ID NO: 103927 - DNA, 975 bp, Cannabis sativa
  modified_base (46)..(48): a, c, t, g, unknown or other
gttattttttgttgttacttttatgtagttttcttgttgattttannntgttttcgtgttattttttggaaaaccgtaaaaatgtaaaaaaaatattctttaaaaataaagatgtaaatattttacaaaaaatggtgccttatgtaattattcctattatatatacatagggtttatctacggtaagaccactcatttttacctcatgctatggggaagttttgtggcccaattacaataaatttacttgatgtcacatgtcatgattgtgcatatgtatgcatgtgattttttatttttttttaaaaaataaaaatttatagctgttggtataagtgggctgttttttttttctttggtctttgttttcctttttattttatcatttgttttgctttggatttttttttttagagtttttacaaaaataacagtagaataactaaaaaataaccgtagaacaacagtgaaaacttaacacagtacacagtatgaaacttacataatatttttggaaaaaaatatgctaaaaatataaaaagaaaaaagttagaaatttcaatatgtggtgtaaaaagtctttttttcttaaaaaaaaatgagaaatatatatccaagtatgtcgtaaaaattatatttttttccaataaaattagtttaataataaaatatttttaaataaaatcttttataacaatatgagagtaaattaatctaaaatataataatggcaagaacacactactttaatatcgagtgagaaaaaaaattagagcaacaataatattaatggaaaaaactgtgaagatttacatatgagagaatttaaaaaaataataataatttaaattaaaaatgaatatttttttaattattaatattattttgtttttaaaataaatatataattaaatattattataatatgtataaagttttaattgtgtgtaagcagtcctattgtaaaagtataca

SEQ ID NO: 103928 - DNA, 1030 bp, Cannabis sativa
aaaattgaaacttaaaactcaaattattgaacacaacaataaaaaaaatcagttatgaaaattagttacttaataaaaaccagttataaaaaataataaaataatatgtgtgtcagaaactgattatttaaaataaaacaaaaattgatgttcaaatatcatacaataataaaactaatttcatacaaactaaaaaatatacaatagcataacatcataaaaatagaacaaccccattacagaacagttaaaacatgtgaaaccagtatcgaccctgtgaaaccagttttgacgctataaaaaatcataaaaataataaatgttaaataatagagtcagctgaaacgagtttcatcagattatcaaatgaaaaatgaaaaaagaaaaacacatataaaaatacaaaaaaaaaatatcaatcacaaatataatcaaaacaacacacaatgcataccaataatttaaaaataaaatataagtgtaagtttcgaacctagaaataaaataataaaaaagttacttgaaataaaaaaattgtataacattataaaataaagcaacctcattatagaactctcaaaatatgtaaaccagtttcgaacaataatttagaaaaaaaaaaatactaacaaaaataatcaaaaacaacacataacaataatttaaaaacataacataaatgtgaaaaccagtttcaaattttaaaaaaaaaaaattaatctaaagaaacttaaaataaaaaaatcataaaatgaagcaatcccattacaaaactttcaaaatctctgaaactagtttcgaccctataagaaaatcatataaaatttacgaaaccaatctcgaccctataaaaaaaaaagaaattttatctacaccccaaaaacttttaaagatttaataatttttattggagctaaattctgaaatcgattgctattgtatatgtagaaaaaaaatatatatactaagtgaacacttgttagaacatgcaaaataaatagaaacaaattattattgtcgtcatagttgt

SEQ ID NO: 103929 - DNA, 511 bp, Cannabis sativa
  modified_base (228)..(228): a, c, t, g, unknown or other
  modified_base (355)..(356): a, c, t, g, unknown or other
atttttatttaatacttgaaaatgttcacaactggccagttttcgtacaaaagacataataaataataactaaaataattgcgacataaacttaataccgtaaataaataaatagagtaccctagaccgcccacagttatatggcccttagcgagttcacacacacaagcgtccaaagttacactcgccaccggcattctagactttcagttactttggtctgcacanggtaatttaataagggtgagctactaaactcagtaaggaaatgtgtgtcacgtagtcacataaaaaaaacacacacacaactaaaatgcacatatttagacaaatagcaatacataaacttaatttnntcactagtaactaataactagtttgtaagctaagtcacataataatgattacatttgagtccaattttggcaaataaactcaaactattggactaaatggcggagggctgggctaagtaaaatcgtacccactactaaatggccccctatctacc

SEQ ID NO: 103930 - DNA, 757 bp, Cannabis sativa
taggccccctaagtgaccgagcagacttgactcttggtcacttgtttatcacaagtatggtaacttagaaacatgatgataatttcgactcaatttgaattttgaaataaacatcttaattcatatattgatcgaaaatgtgtttgttaccgtagtaacttacatcagacgtatttgatctaatctgatcttttagcttaacatgaaataaaacaaattgcagaaataagaaattgtactttaaacggtggtcatctgatctgagtactttttttcttttctggaaacctttgagcgtagtctgcccagcaggccattcacttaaaagtaaatgttcattcagtacttagtgtggtcttccgaccttgtactttattggtagtattttcttaaatgttccccattccaatatcgtggtactagaatgagttgcattttttcatcatacttatctaatttgtatgctccggattcgagaacttagaccactcgatatggtccctccaagttaggtccgagtacacctgtcgtactgtctttggtgtttagaaatactcttcttaggaccatatctaccacgaataatttctgagccttcacttgtttgttgaaatatcgagatactttttgttgatgggctatcacctttaagtttgctgcggctcgtttctcttcgatttcatcaagtgatttggccaggagtacgtgattggtatcttggttgtacgtcaagcttctatgggatggtggctccagt

SEQ ID NO: 103931 - DNA, 572 bp, Cannabis sativa
tgatatttttagtgaagatctttcaaagcaaaagaaacattacccaataattttgttgcaaaatattttcattgaagaataacttatcaattgtcattgttatctgtaaatttcatatcaaaaattagaagaaatataataaaactttaaaaataaataattattgccaaataatatgaacatagaacatcaagaattagagaacaaaaaaagagcataacataaacttgaaacttatgagtggacacaaaattaaattaaatctaaatacatatgtattatgatgatatttctagtgaagatctttcaaagcaaaagaaacattacccaatagttttgttgcaaaatattttcattggagaaaaacttatcaattatcattgtcatctgtaaatttaatatcaagattagaagaaatacaataaaaccttaaaaataaataattattgccaaataatatgaacaaagaacatcaagaattagaacaaaaaaaaagagcataacataaacttgaaacttatgagtggccacaaaattttaacttaaatttggggacactatatatatatata

SEQ ID NO: 103932 - DNA, 531 bp, Cannabis sativa
attctcacattagtgtaaaaaatccagtgcactgatgaattagggacattgtcttttgaagcatataatcacaattacattccactgggttgccatcactgtaattatgaataactatatgttccggacttaacagattttgtatatattaaaccataaacataaaaaactacatgtaaacataaatgacttctaatcttttattgataacaaatcagattagattgaaatgggttttatttacggcataaaatcccaacagatacggctcaagctcctcgtcagagtcgtatccagatgatttccctattttccccacttgatatctcctgaacttgttctccaattcgtttatccgcatttagattggatcctcttgctttggaccaagctgttggcaaagatcaagtttcttccgattcaagtgctctcgcagatctggttgggagtatttgctgggagatcttgtcttactcatttaccgcggcctacttatagactttgttcttaagtggcttgcagatttacttg

SEQ ID NO: 103933 - DNA, 1459 bp, Cannabis sativa
gtgaaacttcatcaaaagtgatttgatcatatatactatgattaaaatagttgttacagtagaacctctatccgagaaagccaccataaaaattgataagttgcaaatagattttcaggcacaaaaaaaatttacgaggtgaacaaatcagatacaaggcaagatcagttttcaagagtttgaaccaaagagaaggtacaattttacaggcattttctcaccagttatgaaacaaacatccattcgagtgataatagaaaatcttgcattgaaggcttaaggagaaaatctttattgttgaacgataggggttcaaaagcagcaatcccaatcaagtatgcctcctacgaaagtctttgtatattgtcaaatcattttgtgaaaatctattttgctaaatgattttatgaatgtgatttaactaattagttgttattgtgtaatattggtttgattctaattatttttgtagcttaaatttgagttcgaaagtttaagtaatttaattttgtagatagttcaattatgaattggcagtatgaataattttctataatatttattcttgcaatctagtttagggaaaaaaaaaatgatttcttttataagaaaacttgaaaggaaaaataaatcatttttggtttaattttgattaagtgtctcagtataattaaaaaactaattaaatatatttttcagttttttaattttaaaatataattttttaataattactatttatttaaatactaatttaattgtttttcaaaattaatataaaatggattaatgaaaatatgacatgtgacattttaataaatacaattaatattttaacagaacagtagttatggaatttgatagaaattaacatttagtatttaatctatcgaaaaaaaaaatgtaatatttaagtgtatgaaataaaaaatataaggtatatatatagtaaataactcaaaaaaattagggatttttacaccatataatgaaatttttaacttttttcttttttattgtggggcagaatttttttcaaaaatactgtgtattgtgttaagttttcacggttgttttttagttgtttcacagttgtttttaattgttctgttttgttgttttgtagttgtttgataaaatacagtatttttgtaaaaaaaaaaaaattgtgtgacagtaaaattataaatttttgttcaaaatctaatatttttgtaaaacccaaaaaaaaattataataatgactataaacaaaggaccaaaataaaaaaccatgcctgtatgtaatgggctatagcccagggtttcttcattagttggcctgttatcatgaccttgacggttgtaattgggcttgagtttgggtctaatcattttggaaaaaatttacgaggaaattacactctataccctttttatattgtcctattttatttttaccctattttttaaagtctat

SEQ ID NO: 103934 - DNA, 508 bp, Cannabis sativa
ttaaataaaaacaaaaattactaagtcttacaataagtacattaataaatataaattaatatgaggagtaattctaaataccaataataatagagtaatttgcggcaaaaatacctaagttttactccgagtagcagataaatacctaagtcgtatttttggcggtaaaaataccttctgttagagttctggaatttctgtaggtatctgaccgttaaaggcatgtaagtatccacttgtcattttctcattggtccaaatatattaatatttattttttaataaaaaaattatttaaatatctaaaattaatataagaaaaatgaaaaatatactataaaattttaaacatatatatatttaaatattttttaaaaaataaataaagattaaaactaagattctctttaaacctagattactaatcatttaataaaataaaaaaaagacctaaattactgttgttgaccgaggtttttggcaaccaatataataataatatttaaga

SEQ ID NO: 103935 - DNA, 501 bp, Cannabis sativa
tcaatttctaaacccttaccttctaatcaaattctttacaatgcatggataagaaacaataacattgttatttcatggattttaaattctgtatctaaggaaatctcttctagcattctctaagatgagtctgttgctgccatttggaatgaccttagagtctgattccaccaaagaaatggccctcatatatacaatctaaggaaagatctcatgaacctgaaacaagataatcaaactattggtatgtactttactaggcttaaaactatatgggaggaattgaccaattttagaccatcttgcacctgcaatgggtgcacttgtggaggagtcaaaagacttcaagatcactatcatatggaacatattatgtcctttttaatgggactttctgattctttttctcaagttcttggtagcatccttctcatggaaccattaccagaaatcagccgtgtctttcatctagtcacacaagaagaacatcaaagaggtaat

SEQ ID NO: 103936 - DNA, 1504 bp, Cannabis sativa
aactaagagcctctttgatacttaaagcttcaataacagtaacatcaaaattaccaccatgtcaaatgttgaggatttttaggtttaaactttaaatctcttcatatatatgcccccaatattttgttcacttaataatatgattctaattaaccatcaagtttcacattaaaaaaataatcatcaagttaaattttttatttttttaaaaagaaaatcattaaaaaaactttaaatttaaaggaaaaaactacttaaaccccctaaaatatttatatatagataaaaaaaagtctaaatttaagaaataaaatcacatttaactccctatattttatataaattagtttcatcactataaataaaaaaaatatatatctataaatatttggaaagagaaagcatcaaaatctcttctccttagagaacactatttttttgtttgttctccacttttggcaacttgaccacattatatgtttccacttacaattctccttttggacataattttaattcatatttaatattttttacactaattaatcatgtttattattttaaatctttcatatagtattgggatatgtcataaagtctttaatttacacaagatttcttcattattttatcttaaaaaaacattttgtacttgctcataatattatatgtcattatcacaagagaatcaagatcacaataaaaatttctatttattcatacaaaatatcccaaaaattctcaatcttctaagaaataaaaaatatagactttactatttttatgccatacaatattccaccaagaatataaaaatctatttggaacttaataaagagtaatagaccaaaaaaagcaaaaattcattttataatacaaattatttatcataaaaaaaatatttatagctacattataatcactcttactaaatttatctaattttgtgagggtttttttactattttgacctataattataaaattaaaaaatttacatttaattttttaaaagacaatatttttattagtgttggctatagtaatagcctccacatcaatcttaagggatctgtccctgtgtatatatactattagtatacatgtatcccatgtaatatatacaagtagcataatgaaattcttttatactttgattttgtttgtctaagcttttactcatgctttcatagtaactaagattgtggtcgaaaacaaaaataaatcaacagctcaaaataatttcagtgtatattttgatgatcttaggttctagttcatttattttgatgatcttaggttctagttcataactagagtatttagtataaaattttgaaacacagtcctcatatccctaaattttaaactagaaagtttcaatcactaggaaatttaaacttaaaagaggtcatttttgaaaaattgtcatccataaagagtattgattagtaaatgaaaagttttatttacaccccaaaattttctaaaggcaccccatttt

SEQ ID NO: 103937 - DNA, 801 bp, Cannabis sativa
atgaaagggctcaagtgtttgttcaaaaagaggaagcaagaaaagagatgaagttgttaaagactggctcaggaagtaaacccagcactgtctcgataagtaccgtctcgacgaaggttgataatccaggaggctctaagagaaaagataactctaagattcagtcaaggacaagaaaaaacaaaagaagcataacaagtacgtgccaatctacaccatttataccgagcttaatgaaactctagaaaacatctatctcgcacatgagcacaaggtcgcatttcgtaaacctaagcccatgaggcatgcgagacataaaagagatgcaaccaaattttgcaagtatcacaaggacattgggcatacgatagaggaatgtcgttagctgaaagacgagatagaaagtcttatcgcgcgaggccacttcagccaatatgtgaaaagataaggcaatggacaaaactagccatattcgcccaataacccaggcaaccaaggattacaacctcctcctcttaaaggagaggatattttggttatctcgggagggccacatactgtcggggaaagtaacaatgcccaaaagagatatgtaaaggaagttaagaacgagcagtctacttttgctccagaatcttctaagaaagcaaagactgaggaacctccgattgtgttctcggaggaggatgtgaagcacgttaggtgtcctcacgtcgaccctctggtaattaccatctagctcaccaacaaaaggatgaaaagggtgctggtggacaatggaagttcagtgaatatccttta

SEQ ID NO: 103938 - DNA, 713 bp, Cannabis sativa
tggcttgggtgtctaggcgagccacgacggcatcgaggcgcgaagacatccggagataattcatttgctcggttcgtttacgaatggcattttcggtgtatattcgagtgccgtcgatgttgcctttttccatggccttcttgatcttgagcttctccgactcctcttctttctcacattttcgggcctggcgttgcagcgatttggctgtgaatttcaactccatgatctgattaagcagcttctcggtgttccccatggcgatcacttcagataatttcaaattgggattctaggggtttttttgggcagaatgaaattgcagagatggtatgagatccttctttttcttttttctttagataagcaacgtccgtaggatattttaaaaataattgtataacaattttttagctttttatttggatgttattatgatgagttttttctcttggtagtttttgttcatttttgttctctttttttaggtatcgagaagattactttgtctttctctttctttaaaaacttttgactgaaatcttagtggcaatttcaattttgaaatttctaagcttttcaatccctatagtttatagtaagggtttttctatttgttgtttggttctaatttagggataaatatcatctgactgaaatttgacacaatgagaaatataccttatgatgtgaccgaagagcaatttataaaa

SEQ ID NO: 103939 - DNA, 1991 bp, Cannabis sativa
atataataatataattccataaatataattccatattaatacacatttaactagttagggtttgctaatccaactcctcaatcttagagtgttacacatgcccacacacatgcccatttgtctcatcttaagcaactttacgctgacacaatgagttatcttgcttacttagagtgcatgttccacctgagccaccctcccttgactgctctcccataccgttagttgtggaatcacccattcatcaggcggaggacgaagccccctcctagcctaagtcgaatcgcaaggctctagcctgtcgaatcaaaggaatgaaatgcattgcatcccattctaacctcctttgcacttttgcatatatggataagccacgtccaccaagaaagtcaagtgcatccctccctgatcgtgaccctacactcccatatgggatggctaatgttacgagcatagtgactcaagccgacatttggagaatagtcaacgagtacacagtggagcgaggtttcgagcccttaccggaggtccgggccaacctgccacctatggacatggtggcttttagtaaatccattctcaaggctagggtggcatggccactctaccccttcttcgttgaagtcttggactatttcggcatagctcctctctagctaatgcctaacgcgtgaatcatactgacatgcttcttcatagcctttaaaaaggcagcaggcagggctcccacagctagggaggtacatttgtgtacagctttaagcataactctttgttcaggggctcgtattatcatcacaagaaagttccttccaatgcgtcagtggtgggcgtcctctctaatacggggaagcattggaaggagagcttcttctttgttctgaaacaagaagcaatactagagctcttgtgtatgcctcgtaagtgattcctcggcttatatcctcattaatggcataaccttgaatcccttaaaatggttgtctaactccccctcttggcattgcttactattattttttctgtagcggcacgaccttcccccacccttacacaaaaggagtacaaatccagcttgctgaaactattcagggcggactacgacagaaagctctgccattatcttctgtccttattcccctcaagaaaagcaggttgattcggtcagatgacaagttgaaggggaaaagctgtattctttgccccttcctccaagcgaggtaggggaagaggtcaagaatgacgcagggtctgacgccactccctcgcaggtgttggaaggagatgtggcagtggaggaagtagtggtggatgcagcaaaggaggttcccaaaggccggcggtggtcgtgcgctgcaggcaaatcatttggggggacatccctccagtgagaaaatggtcgcactgacggtacatcaacaggtgcctattcgccctaaaccctcgcctaagggtttgcttgccaagatgaagagcttccttaaaaagaacattggtgggcaacctttggccaatttgtcctcatggcgtcattccgatgtagaagaaagagtcggctcagggccttggagttctatgcccttcggccctccctctgacatgtctcaagtgggtgccaaaagtggtttcacccccatttctgccgttttggcccaaccccaagctcactcggggtcacccgcgcagtcagctaactcagggagggcagatcccttggcgccatctcccacccagaggtggatgacacccaaactatagcgcccaaaaggttctatgcccttcggccctccctctgacatgtctcaagtgggtgccaaaagcagtttcaccccattgctattgttttggcccaaccccgagctcactcggggttgcccgcgcagccagctaactcagggagggaaaatcccttggcgccatccccaccccggaggtggatgacacccagactacagcgcctgaaagggaggagatgttggaaattattttac

SEQ ID NO: 103940 - DNA, 969 bp, Cannabis sativa
cataatactccatggttctagataaagttatagtttcaattgaaaataaacaaacaacataatttttaagaaccattgagtattataaaataccatttagtacaacgaccgttttaaattaaataacataacttaccctcaaacactttcaattatatattgaaaatttatttctaatttcaagaacatgcttatatcaactatttattgagtaataacttatcgaattttacgagtagaaagcaaaaaaaaaaaaaaaaaacaaaggaagaaccaggatctaaataaacaaataaaggcacacaactcttagaaaatatcattaaatatgtaaaaaaaaaaaactaaaatcaataaatattagagaaagtcacattctcatgtagtaggtgtttattggtacattttatgtgggaaaaaatttacatagcatagagagattgagagaaagagagagaacaaaagaacaaagttagatgatataggaatgttttgaacagttaagaaagtattagtattatttgataataatgcaaaattaattgatattttgatcgttgaatccacgtttaaacaaataaagttaaatttctcattattcaatcatgtaatacgatacaagcaaaacaaaacacctttagtattagtaagaggtagtactgtaaatacggattgggtttttttgacatcacacgaaattagtacgagcttaaaaggcacgagcataattagacatgaaaaaatatagacttggacacgacaaattaacatgacacgatacgaaaaatatatccttaagcacgacacgatacgagaagcacgaaatgcatgacacataagtacggatagactaactcgaaaagcccgacacacgacgtgatatattaaaaaccttataatttattaataataataataataagttaaaataagagtaatttttaatttttggcggtaataatatttaag

SEQ ID NO: 103941 - DNA, 712 bp, Cannabis sativa
  modified_base (338)..(340): a, c, t, g, unknown or other
caaaatagtggcatacgtatcatcgcagaaaccatgcatttggcaagtgcaaaagatataaactatgttttaggtactatgacgtattatggggttattgaagaaatatgggagctcaattattttgcgttccgaattctactttttaaatgttcttgggttgacaacaatattggagtaaaaactgatgagcttggttttactttggttgatttaagtaagagaggaagaaagaatgatccattcaccttggctagccaagcaattcaagttttttacatttctgatccggctaatgataaatggtctgttgttttatcgacaccagagaggaggtnnntagagaatgaagaggatgaggagaatgctgatttatgttatggtgacttcattgttgggcaaccaatacatgaacaagttatgggaattaatcgtaaccttgaggaagacaatgctgaatacattagaaacaatgtcaatgagggaatatgggtcaattgtgattcaggcaaacataaacaaaaaaataaaataaaacgtgtctaattggtaacttgatatataatttaatttatattgtgtttgttcatgctaaatacataatgtctatttatgcatttaatatcagtaccaaacatgttccttccttagcctaaatacctaattgtaacacccgaggtaacttttgttataaattaattatcaatgatta

SEQ ID NO: 103942 - DNA, 598 bp, Cannabis sativa
  modified_base (296)..(297): a, c, t, g, unknown or other
gttgtgttggtgtttttttcttgtctctattgagtctaggaggtccctggccctagtgctgctttttgttctttttgttgtttgggggtgctctctcggagcccagtaatatataaaaaaaaaaaaaaaggtaattccataaatatggaaaaaataaagctagtttagataaatatggtaaggaaatttaataggaaaaaatatgttatttaaaataaaaatttaacatatatgggattgaattaccataaaagatataaaattcacttcatatttttttttaataaaaaaataanncaaatgaaactacagtgattgccgaagttgttaccattgccggaaaaggcattggagttagctgtcggaaatagaaaagttgctggagttgctgttggcaccagaaaagtcgctggagttgctgtcggcgacgaaaaaataatcgaaattgacattattgccaaaaaaacatcgaaaaaaaccaaaaaactagttttttcatcaagaaattggtttcttggtgattttttcaataattttttcagcgacaatgtcaattccgaaaaattttctggactttgctttcagtaccggcaagtca

SEQ ID NO: 103943 - DNA, 1518 bp, Cannabis sativa
gggagttctcgagcgttccgtcacctctccctcttggtcaagcaacaccagccagccttgctttttgttatggaaaccaagctgccagccaaccggggacttcccttgaagtataagcttaattttgataatgtatttgatgttcctaggcaaggtttagggggggggtcttttgcttttttggaaaaattgtattgatgtaactgtggtttcttactcccttaatcatgtggactattttataaataattctaatgatataaactggcatttcactggtttctatggttctccttatgctgattcaaaaatttttacttggacacttcttaatcgcttatttgacactgctccccttttaccgtggttagtgataggggactttaatgattacttatcccttaatgatcgtaactccgcttcaccccctccctctcatgcaatgcatcattttcacaccttcctacactctcgtaatttaaccccccttccttacacgggaaacaaattcacctggcgccacggctccaccctggaacgccttgactggtgcactatttccccttcatggaagtctcttttccctcatgcctctctcactcatttgggcttttatggttctgatcacagagtcctcaaactccaactggaagacacttctttcaggaatcatcaccactctcgtttccatcttgagaactaccttctcaatgacccctccttcccaaacatggttcgtgactcttggtgcaaccattcctccccctcccccctccctttgcggcattttctcaacaagcaaaattcttgcctctccactattaaggcctggcaatcttctcaaccctcccttagactccaaatttcaagcactcaagccgaacttgaccggttgttaaacaacaatcactcaactccccttgataaccaacaaatatctcatctccaatctgagcttaatcgacttctcctaaaagatgaaatctattggaaacaaagatcaagggtagcttggcttcgtgctggagataagaacaccggtttttccaccaaaaagcttctaatcgaaaacgtaataattacatccggggtcttactcttcctgatggttccatcatccatgacaatcaaaccattttcacccaatttctttcatactatacagatctttttacctcccaaggaacttctccagctgctatctcttccatccttcaaggagtcaccaactccctctcccctgttcaatctgctcttcttgctgagcaatttactgctgaggagataaaatcagccatgtttagtctctctggagacaaatcccctggtcctgatggtttaaattctttcttttatcagaaaaattgggatactattggtcatgatctcacttagggtttgctgcatattctcaataatcaaggtgatttctctcaaatcaataacaccatattggtccttatccctaaaaagaaaaatcctaaaactgttcgggattttcgtccaattagcctctgt

SEQ ID NO: 103944 - DNA, 537 bp, Cannabis sativa
tttttaaaaaaatttaataaatttaaaaagtatttaggaagtaattaaaaaataacttaataaaaaaataaataatttatggagaagctacaactaaaatttaaagataatacaacttgttacacctgaaattcggttgtacttcagaaagtaacacgtgtcaatcaagtagcattacaataaaagggactttttatcccacttcttacacttgaaaaaataaaaagtgggataaaaacttttgattccacttttatttttggagccttaaataaaagtttagaacaagggccttgtttggaaaatggataaaaaatagtgttagaaaggctatatttatgcatttgccaaacgcaacttagcattttaagtgggactttttatcccgatttttagataataaccgggataaaaagtcctcatacttttgggctttttaattgttgggccgactatacatataaaagcatatattaagttttagggttttatttttattagagttactattaattcctcccacccgatctctctctc

SEQ ID NO: 103945 - DNA, 567 bp, Cannabis sativa
ctctctctctttctctcctttctctctggttctcaaaccctagaaccagagatctcactcgatcaacagatcgatcttacccagaatccatgatcaaacaacaccataaacactcaaacacatagatcaatacacacaaacaataaagagaggaaatagagagagagagagagaacacagaaattatagaggttcgccctaaatcaggggtacgtcctcttttgagctcgccttgaagacgtttctcaggatctgcactatttggagaagagtattacaaacaggtgagaaatccaagtcacaatctcgactggtatttctgatattcactcaatatttcttttctgtgtttttcttttgatttctcactatctcactaactctcttttcttttctctttgcatgaacacttggatctacaacttctggagcttttggtttccagatctgaaaaatctggcttctgttttctggtatctctcaactgagagattggtaaggctcttgtcctccttttatagttgtagtttagggttgatcaaggtctaggagttagttacaatttcg

SEQ ID NO: 103946 - DNA, 1149 bp, Cannabis sativa
attaaccgtacctagtatggaaaatactacttgaaatattcttttctcagattctcaattaatgataacttgagcagaggtcattctttagggtaactactttcccccaaactgattaaaccactcgtaactccttaacagaaggtacttattcttgattaaaaactttgttatggtgataatctaataagttctactagaaatacatttaagaactcttataccactctaattttcaaggttgaattgtcttggccagatagtatccaacaccattgcaaatgattctatgtatctatcccatgatggatctttattttttattgtcgtgaaaactggagcctgaaaaccccatcatgtaccatacacaaacaagctttcactttcaaattgaaaagttactacattactagcggcttatttagacaataattctattttgagtaatatctcatactccactatactcaaaaacaacaaagtgagtatccaatttcctatttttaactctaaccggtatagacctgagctatccctttggagataactaattctctgccaggtaatagagtttcaaaccctatttcatatctatctcaaggtctattcaagtattaatcaccctgactaccacatgctaatgtgtagttccaaattcaattaacacaaagttaaacaaaatagttgataagaaactaacctaacactactaaagatctatcttctgctgtgattttaaaaatggccaacactcaaacatgaaggagattttgcctcttgttctggtccctttttctatagctgtggacagtctctctagtagttccctacttgatcacaataaaaacatctccaatgcttacactctcccagataatggttcttgcaataaaagaactctaaataagtataataactatcagagctaccctgatggccaccccgtccttgtttcccccaaaacttctttctctagatcgagcccaccgatgtcgacggagctcttttactttgatcaactaatgaatcactcccacctctaccaagacgagaggtaggaggagcagtgaccttacccacaactagagtcccttggggatcttgaacaaattatgtactgtacataattggagaattattcatctcatc

SEQ ID NO: 103947 - DNA, 1346 bp, Cannabis sativa
atgataaatacaaattttattgtttattattagtatcttattatgttttgtaattattaatttataattttatgtaattagtaggcttactcattatacaaatataaatatagtaagttgactcattaatatatatctattataatttaattaagaatttgtataaatttttataaatatgttttcaaatgtgtacatttttaaaattgtgtttttttacacattatttgtaattatttaaaaaaatatatatacatttatgtaaaatgccctataataaaatctcacaaaaagaccactttacaacactattaataatttgaggactatatttttaacaaactaaaaatttcagaaatacaattatacatagttcatagtttaaaacaagatcttaaatagtttatattatatatatggtggtatagtaatattgtgaagggcactatatactttttacatagcatttgattccttctctatttgtttatcctttagattcttgaagcttttgaatcacattcattgggataattccatcaagtatatccaatttcacacgtgcaaataatagtgatcatgataatgtcacatgtgaaattggagaaggataaggtcgtagtgcataattattccaaaaaatagaaaatatagtaaatattatttatccataacaactatttatatagtagccattaatactttattgtaaacatactaaatttattttcttttattttttattatgaaaattaaaataatatagtaaataaagaatataaattttataataattaatgaattagattaattaatagtggtaatataataaataaaaagtataatttattttttggttaaattttatactgaaagtttacgtaaaatatttttttttgtaaaattttaacatttttatgatcaaatatttttttttacccttttacatattttttttttttaaaaaaaaaatacgggtttttatcttttaattacaattttatggtgtttaataaaaataataaaaaaaatcacataaaaataacaacaacaaaataaaaagattacaatctataaaaacaaacaagattataacctaaaaacatcgatagtcagcacaagtgtagaaaaatatataaaatttcgtataattataattttgtaatttttttttattatttttattttagatatctatgtaactatctcaatattatatggagaattttaatttttatgatttttttagcaaagtttaaaaaaattaacctttttttttaaaaaaattattttgtggattttttttttaaaaaaaaaagtgtaaaaaaatagggtaaataccattt

SEQ ID NO: 103948 - DNA, 756 bp, Cannabis sativa
  modified_base (558)..(560): a, c, t, g, unknown or other
agcatcagataaagtacattaaccgcatgatccaaaccttatacaataaggatttaaaataaattcataattgatatatgttattacaagtcatgattgtatattaaaatctctgataataaaaattaaagatatatgtatgtgtatctttttgaggaaaaaaaatactaaaaatgattatatagacatagaaatataattgaaattggagagtagcatatgagaatgagcctagctattatttttcttgaatctcaagagcttatcataaaaaaaatttattttttctcttaccatcaaaaataatttatgctaatgaataaatcatgaataattcaaagtcattgaggacaatcaagttgtcaacataacaaaaaaatccgatgtctccaaatatggagaaatatttgatgagtaatagaaagattaagaatatatatatgtatatataaagaaatagaaaaataagaagtagagagaatattaaaagggaaattttattttttgtcccaataaaactcccaatatcaaaatttagaccctctactaatttgtacnnnttaattccattgattacatgaacttcccattttacccattttttaaaaaaatataaaaaaaaattgttaaaaactaaaaaaactttcctctttctcttccctatctcttcctctctctcttgcctctcgtgcacccctctttctttagaaaaaattgaaaaaacttccctctctctgtttcctctctcttccctgt

SEQ ID NO: 103949 - DNA, 1489 bp, Cannabis sativa
cttcagcaagagaatacttgtcctttgctttgttttcacacaccatatttaattccaaaacagaattaagaattctttgtaaagcaaggagggggtctgcaacagaactcctcatgtgaagagcatttcgttggttccaaatttcagagaacacgcaccctgcaaaatttagaagctctgatctctgaataggcagggaggagaggagagattccaaaaaattgatcatattatcccctggaatgctatcaatgatcaatggatagtaacctcccagccaaatagctttagcaaagctacaatcccgaaataaatgaatcgcattttctcttccaccgccacacaaactacagtctttgtctctaacgaaaggaagtctattcttagtaggaatagcttcattaaggattcgccaaagaaacaccgagatttttgggtgaatatctctatcccaaatccatttccaaatctgcctttccggggcaaacctccaagattgatcaatacagtaagcagatttaaccgaaaacctgcccttttgattgtgtttccaaaaaatctgatctgagaagggattgggaattctaggaatttgaagaataagatttcccatatcctgaccaaaaatctggtatataatctcagcattccaatggttaccaatagaaacatcagcaatggaagaaatcgtgtaccttcttgttcggatctgttgcattaaatctgaaaattcctggtattccatccaaggaatccatggttgcctccagaaatcaatggacgaacccgaggcagctattgacaaagatcctttataaaggatatctcttgactccaggatgcccttccactggcttgaatcactatttttcggattaacactccagaagttttcatgtttacagtatttactcagcaaacatttgacccatggtcgttggatgtttgatgccagattccaagctaacttagacatcaatgccttgttcatatcttcacaccttcgaagtcctaatcctcccgaggccttcggagtacagatctgatcccatgctttaagggccatgaacctatccttctcaacattaccaagccaccaatatttcctcatcaaggcatcaagttgacgacagcaagataagggaattttgttagtggacatagcataaaccggcatagatgaggccactgattttagtaaggttaaacgcccagcatatgagagaagtttcatcttccagccctccaatttcttattcatgctctctttcaacctcctatcttttttccttctcttaaaaatgaaggggttacccaaatgcttctcatcaccccgaacttgatcaattctgagaatgttaagcagatggttcttcctatcatgattcaaattcctagaaaaaagcacccccgacttggtcttgctgcaagattggcccgaccaatcctcatacttcgaaagacactttaataaggtccttgcatcatt

SEQ ID NO: 103950 - DNA, 1611 bp, Cannabis sativa
  modified_base (933)..(935): a, c, t, g, unknown or other
atacttattaagagaagctaaaatccaaatatcaaccccacttgtacagcccctgtgccaatgtctaaggcgtgtgcttgctgagtccttaagtgactcaatcaattaaacaatatataaagattgatttcaacgaaaaaaaaaaaatatatatatatataaagtttcaaataaataatcctctacactttttcaacaaaagttatatacatcttttcctttctaattacagattggttaaaaaaactaccttatagcataagtacaatatactatgtcctacgctagaaataccctatatatatatatatttaaatcttaatttcacaataattttttgttttaaaaatgattaataatatatatatatatatatatgtttctaataatttatacactttattataaccacactctcttaattacaaattaagaatagatctatcactatcattatttttttaaaaaaatatatatatttagacataatatataaaaaatattttgaaaataattaattctctaatcaaactcaaattttatcaattttataatataatccttatatatggagattaatataaaatatatataacaataaaattcattattttattgtatatataaaatacttatatatataatcatatctaaagagcacataaatataggcatgatagctaaaaaaatttctcaaagttcaaaatctcaaaccctattttaaaaattaaaaaataaaaataaattacctaatcaaaaaagtgtaacaataaaatttattcttttattgtacatacaaaatgagtatatatatataatcacatctaaagagcacaccaatgtagccgcaataacttaaaaaattctcaaagatcgaaatctcaaaccctatttcaaaaataaaaaaataaaaatatattacctaattaaaannnttaaacatacatgtattgcacttaacattacttattaaacttaattaaaaagaaacgtggatgacacacaacattaatccagtatgtatattcatattgcttgattcattatatcattctcttataataatacatattttccaattattcttattaccctaatttttcatttagaaattcttgattcactttcttttaacaataataataattttattatctaattaactttaaataataatatttttaatatgataatttatcataaccaaaaaattaatagtaattgtttttcttacaaaagtaatagtaatcactttaggtaaagaaaatcttaaaaatatattatataatgtaaaaagaataatttgtggcataaatatatatgtttaattcctagttgcaaataaatatttaagtttaaatttttgcgatcaagttatatttctagaactttataagtatttgaccgttaaatatcaagtcattatcacatgtcattttcttattagtacattcaaatttttttaaaaaaaataataaaaatttaatgatttagaccaattaggattgtcaggtgccaatccacttaacacttaaatacctacaaaagttctataattataatttaggtattattactgtcaaaaattaaacttagatatttatttgaaac

SEQ ID NO: 103951 - DNA, 510 bp, Cannabis sativa
caaataaagaagataatttgtgggttcgatggatacatagtgtatatattaaatagggagattggtgggaatataagttcccacaaaatggcagctggtattggaaataggtggtgaatgcaaaggaccaaatcaagagcatgatggatattcaacggtttgttggaacccgatataccattgctgaagggtataagttgctctgcccagttcagccgaagatcacctgggatagagaggtttggggaaggctaaatgttcccaaacattgctatattttctggttagcaatgcacaatcggttgagaacaaaagcaaggttgaaagctcataacatagtgtaggaagatacttgtgtcttgtgcaatcaacaccaagaaaacattgagtatttattcttcatatgttcggtttcagctcactgtttgttggatagtaaaacaatggttgcaatggggctcacaatgcaactcaatgcagcagctggtgagagggataagaagagcaaag

SEQ ID NO: 103952 - DNA, 565 bp, Cannabis sativa
aaaatggtcagattaattgcagacaagcagaggttgaacctgagagaatacgagttggtgtcactattgaggcacatagcattttgtatgcattatctgaaacgtaatctcttgtttctttgctgggatttctttattaaaccactttagtatcatttagtagtttttatatcgtgactttcggggtttgaataatatttatgtgatttaaagttcatattacacaaggagatcatgtgggcgagggtgtgattgtctcttgggttactccaaatgaacctggctcaagtacactactttactggtcagaaaagagccacctgaattacagtgcccagggcgtttttattacttacagctacttcaactacacttctggttacctccatcactgcaccattgacgatttggaggtaagtagtagtattatttatcaattaattaccccccaattcattattttgtgatccatatcatatgattgtcttgtgcttataattgcagtttgacaccaatttctatcaagttggaattggtaataccacaaggaaattttggtttatta

SEQ ID NO: 103953 - DNA, 609 bp, Cannabis sativa
tcatatctctattatgtacattagaaattttaattttgataagttatgtgaggatatattatttgatatttaattataaaaaagggtatttatcaatttaaattattttgaatttatatttgattaatgtataatcaaaatggataattttcaacttatccctctatatattgaccttattaaaattaacaaactaaattatattttaaagtactcaaagtacaatagaactttgataatcagcatctgaaaaaagttcgtacagagatgaaatcggcctctccaataatggtcattccttattattttataaatatacatatgataatttcataaattaaagcaagcataacagaacaataatgtacaacaatcaaagtaattaacaattaataattaaaggttctgatcaaagttattaaacaaatatttcccattatttgtcaaattaagttaaactaatgtattatccaaatgctaataattaatatagaaaatgatatacatataatattcctctctcctacgtacatagtacccatgacccaactacctcttaccaaatcaaagctcatggcaaatctcacccaaaactagtttcttactaac

SEQ ID NO: 103954 - DNA, 859 bp, Cannabis sativa
  modified_base (94)..(106): a, c, t, g, unknown or other
tttgttgctcgaagtaaaaccagagttgataaaatttctaagagcaaacctaaatgttttttcctggtcacatgcagatatggtcggaatcgannnnnnnnnnnnntcacatgttctgaatatcgatccttacttcctgccagtttaacaaaaacaaaggctgttggacaaagaacgaccagtagccctgaaagatgatgttgaaaagctgtgcaacaacaacatcataattgaagctttttacacggcttgggtcgtgaatcccgtactagtgcccaagccgaacaagaaatggcgagtcggtattaatttaatagacctcaacaaagcatgccctcatgactgttttccacttccacgaatcgatcagctcatagacgtaacagcagggcacgaaatattaagcttcatggacgcttattcaggctacaatcaaatcaaaatgcatccaccagaccacgaacatacaagtgtccgaacagatatgggtctctattgctacaaagtcatgccgtttggtctaagaaacgctagagctacgtaccaaagattggcaaacaaaatgtttaaagaccagattgggcaaaatatgaagtgtacgtggatgacatgctcgtcaaatccagaaaggctaaggggcacataaacgacttggacgaatgcttcaaagtcctcaaaaaatacaacatgaatctaaatcccttaaagtgttcctttggaatcagctcaggaaagattctaggcttcatcatcaatgcttgaggaattgaagccaatccagaaaagattcaagccctcctggatatgaactcgccaacaaaaacaaaagaagtggaaagcttaactggacgaatcgccg

SEQ ID NO: 103955 - DNA, 952 bp, Cannabis sativa
  modified_base (299)..(301): a, c, t, g, unknown or other
tcccgagtcaagatatggatcactctcacgggtctcggtctggttccggtttaggtcccatgtcctatttctgagtttgggttcgggatcgagactggggggcgattctaggtcccgagccgagttctgtgtccctagtctggttccacgtttgggtctaagttcaggttcgggttcgggtcccgagtcaatgtttgggttgggatctgggtccagctcgcaattcgagtctaggtctgatttggagtccgggtcctggtccagttacagttctggatataggtccaatttcagttatnnntccaagtccaagtcctagttcgagtcccggtcaacttccggttttggttcgaattttgggtcacacggtacgggtttggctccacttttgggttagggactgggttcaggtcctagtgtgagttcgggtccagggctaggtcccaaatccaaacaccgagtacgggttttgtccaagccctgggtcaatatccggatcccaatctcgggtcccagtctgattccatatccagatcccaatctcgggtcgtgatttcagtctgggtccatatccggatcccagtctcgggtcgtgatttcagtctaggtccagatcaggctccaggtgtgggttcccgacctgggtcttggtctaagttgggtccgagtcccatattccaatcccgatctgagtctgtactcagttctaagtctaagtccttggttcagatcctggtctgggttcgagttccgtccgggtccgggtctagcttttggtcttattctaggtgtgggtgtttgagttcgggtccgagtctatgtccgggttagtgtctaggtctcgaccccgatctgggtctacaatcgggtccaggtccaagttcaggtctcgagtgcgggtccaagtttgggtctgtgtcaggatctcggtccacatctaggtccagcattt

SEQ ID NO: 103956 - DNA, 2935 bp, Cannabis sativa
  modified_base (51)..(59): a, c, t, g, unknown or other
  modified_base (2868)..(2886): a, c, t, g, unknown or other
aattctacactattaattacaacccagaagatatatatgttatgagcacannnnnnnnnatcttgaataaattgaatctcacctctaacttaacagcatatcatattatacatcataaatagacaaattaccattgttggcggaatgcagtaaacgacatacaatataataaatacacctaaataattaatagtataacttacataagaaaagcatgactaaacttatataaaagatactattaactttggaagaaaaattagaagatgaaaaacaatttaataaatgagatatggagatgaagcacaaaagaatcaatatcaataatagaaataaggaatacaaaagctatactctaacctcaccaatatttctaaaatagttcacttatttttgtcactcaaataagtaaaataaaatagaaataagagaaaacaagatgagaaagtgttctctattctaaaatctgatgcatttacattgaatttgagtcatatttatagtgtaaatttgctcttcaaatatggtattttggtgtaccatttagtgggataaatggcacaaaaagctgagaaaagtgggggacaaaatgcccatttgcgtcaggcggagtgggaaagagggacaagctttcagaggtggcgttgagggagactctcaactggagtggggcatgcgtaagagaggtcaagggaacaagcagccacgtagcatctcttgctgcttccgtcaagtaataggatcggctagttacatgtagtagtagcagcagtataattgttgcagcaactaaaaaattgggctcttataatttgatttatttgaataaagcccatttgaatttccatggccacgtgtagcaaattatgggccttaggccatgttgatgactaaaagatgagattgcattgccttgatgggccttttgaaactgggtttttgtattttccttttaccactttttctgagaaataatataaatttaaagtaaattaaatatttctaataaaaataaatttatcattaaaatatttaatttatattaattttatatgcataattaaagatttaaaatgtataaatttgagccttaatcggtggtcgactctccttgcattttttgcagcaatggagatgaatcagttgaccatttgtttttcagttgtgagacttcctacaaatgtcttaaacaactgaaatctttgctaaattggcacactactgctaattcattgcaggggctactaaaatggataaggaaagcaaagtaatctgaattccagaagagtgttaaggcagctgcaattgcagctcttgtctacatgatttggagagctaggaatgacatgcttttggaattcggctagaagcaggtctctgagtttgtgcagtagctaaagtgggtagttaaaaatagaataatgtttgtaatgccaaaaaaagttaaacaacatgatagagattggtttcagattttgtaaatattattgtatagataaacttaaggctttctttgaagtgcttttaagatgtacaaatgagatattagagcaatgaatatactgattcatcaaaaaaatacgagagatatgtgtagtgaatttaaatttgaattgtaatgttttttaagaaaaacaaatactttatgttctataatcacatttaatataatatagatatttacagtgttaaaaaaacatgttaggttgtgtagtcacatttaatataagataaaacataagagagataaatgtaatgagtttaaatttaagttgtaatattttttttttttaaaaaaaaatatttatgcatgttatataaccatatttaatataaaaaagggaaatcactcaatatatcattttttttttcatttttatggttagtgctcaggtgaatattgctctgtgggttgttatgtggttttgggttgcaatttaggttgctacgttagtttttatgtgaatttttaataaaaagtaaaaaaaaaaataaaaaattaaatgtaaaaataaaaaaattcatacaaaaaatatggatatatatatatataatttaattaaatttttgattggtgtgttaaaacttggatgatggaaaggacactatagggtgacctttggttggaggtaataaaatgaaatagaatggaaaggaaacaattttcattccattcttttgtttggttgtattttaaaatatttgaagtcattctaataaaatacaatttttaccatttttgtgtaatgactattttattttgaaatagaaggaaaatcattccaatgtaattacatgaaaaaaaatttaataattttttttatacatttttttattttatttcattctatttttattcttattttcattctaattcttatttttatggtttgattaatctcaactaaacgctacctagtgcccataataaactcttgacatctaatttattcatactggccaggcgaagggtgacggccgggaaaagcattttggggataaattttctttaaatttaaaataaagttttcgggttacgtgatatgattaatattatatagttgacatatgagagagatgtatagatgcccacttacattgaataattcgaaatcaagtccatcaaagtacatttgatacaaacgatattccaaagaatgcaaaagaagattacaatacttaattgtttttatttcttgaatcaaatttactacatatctgccatttccatccgtttcatattattggagagttgatctcaagcagccagctaactaaattggccgtgtcatgggtaacatgtgaagatagctaagaattgtttttgggtggtatatgcagtgtagttactctctctctctctctctnnnnnnnnnnnnnnnnnnntactaggtgattgttacgtgccacgccacgtagtgttagttttatttaa

SEQ ID NO: 103957 - DNA, 500 bp, Cannabis sativa
attccgattaatttaaaagtttaaattctgcgctatttttgattagtaatcccatattaggggattaggattccataagcattttgggtagcgtgcctaattatttagggcgttacaggagacaaccctaattttctcattgtccccttccaattgactggccaagataatttccagtcatggaagcgcgctgccacgatcaatctggctgccaagaacaaaactccatttatcgaaggtactcttcctcgtcgtcctgttaatcatccatatcgatctgcttgggatcaatgcaatagtatggttatggcttggatattgcaatctgtctcacatgaaattgcagtgagtattatgtttaaagattcgagttttgctatgtggaataacctccacgatcggttcaaccaaagtaatggtccttagatctttcatctcaagacttctttaactcgcatcaaataaggtgccaacttcgttaccacctattttactcagct

SEQ ID NO: 103958 - DNA, 926 bp, Cannabis sativa
cctgctttaaggatatcagcttccttaaatttctccctcaaatggcataatttgcgccagtaccagcttgtgtcagacttgagatcataatcccaaaacccccctgatttcagatagatattatcaatccatttaacccataagagatcctgcttagttgatatcgcccaaacatacttggccaaaattgaatgattccatttgactccatttttaaatccaaggccaccataagcctttggcagacagactttctcccaagaagcaacatgaatcctgcttctattaccatttaaaccccaaagaaagcctcgacacagtttctcaacctccttggtaacactatgaggaagaacaaatatactcatccaataattcctaaggccaagtaaaacagagtgaattaattgagccttaccagcaaaagagagatgtctgctcgaccaagtatgaagtctctgtttgattttatccacaatgatcccacagtcctcggctttccattttgatggtcttaaaggaacacctaagtatttgagggggaaagtgccctctgttaggtggaatccatcaatgatagcttgcttctcctcagatttcacacctcccaaatagatttgggatttgctcgaattaatatgaaggcctgaaatcaagctaaaatcctcaagaacctgcttaagcaccaaaaccgagcttttggaacctttgctgaacagaattaaatcatcagcaaaacagagatttataatcttaagccctttgcacaaaggatgatacctgaagcttgagcgagcagttgccaattggagacttctcgtcagatactccattatgagaacaaaaaggagaggtgaaataggatctccctgcctcaaccctttttcccctttaaagccaccttgcactctaccattcatgaccag

SEQ ID NO: 103959 - DNA, 528 bp, Cannabis sativa
  modified_base (188)..(188): a, c, t, g, unknown or other
gacaaaacccatagtccgtgtctggatttcggacacagccctggacccgaaccttgacaaggacctgaacccacacctagacctcaacctagtctcaaacacaaaagttgccccaaacccgtaccctgtgacccaaaattggaaccaaaactggaatttgacaagaactggaactaggacttggactnggaatcataactgaaatttgacctcgacccaaaactgtaaccggaccaggacccagactccaaatcaaacctagacccgaattgggagccagacccgggtcccgacccatatctggactcgggatccaaacccgaacctgaactctgaccaaaacatggaaccagactagggacacaaaaccagggtcgggacctagaattgcaccctagtctcgatcgcgaaccgaaactcaaaaaaaggacctggacctgaaccaaaactagaccgagacccgtgacagtgatccagatcttgactcgagattcgagtaacggagcctggaatagaccagtagtcggt

SEQ ID NO: 103960 - DNA, 645 bp, Cannabis sativa
  modified_base (268)..(269): a, c, t, g, unknown or other
ataaaaacttaattacactaaatatggcaaaatatggcattttttggcattttttaaaaaaaacttacaaatatgggaaaaaattttaagaatgccataaaaaactttaaatttgtgtttcttttttattttttatttcttttttaaaaaataaaatactaaaataaataaataaatgatttcaattgtagatgctatcttttttacagaaattaaacctgttttttttttatttaaactagtgtttattttttttttttgttaaaanntaattatttcattaaaaacagcagaaaaaaaaaccagtttcatcaatgtcatcctgagaaaaaaaaaacaatataaaaaattataatctaaaaataatacaaactttaaaaacaagtttcatcaacattgaaagaaactgataatttcattaaaagaataaaaaaatagtttcatcaacaagataatgaaaaaaattattataatctaaaaatgatacaaactttaaaaaccaattttatcaatattaaaagaaactaattatttcattaaataggcaaaaaaaaaaaaaaacagtttcatcaataacataatgaaaaatacccaatgcctaataagttaacttttccaaacgatactaaatttaaaaaccagttt

SEQ ID NO: 103961 - DNA, 705 bp, Cannabis sativa
ctgaggctaggtctgtgttatgttctaggtctgggtccgggtcctggtccaggtccaagtcttgttctatggtctttgttcggcgattctttttcaggtcttaatttttgttaccaggtctaggtctaggttcgggtttggttcttcgtctgagttatggtactagtttgagtcccaaatctagacaccgactacaggtctgttccaggccacgttacccgaatcccaagtcaagatctggatcactgtcagtggtctcagtctggttcaggttcatgtccctggtcccatttctgagtttgtgttcgggatcgagactggggtgcggttctaggtcccgaccctagttctctgtcccttgtctggttccatgtttgggtctgattttaggttcgagttcgggtcctgagtccaaatttgggttgtgatctgggtccagctcccaattaggttctaggttttatttggaatcctagtcctggtacgattacgtttctggatctaggtccaatttcagttatgattccaagtgcaagtcctagttcaagtctcggtcaacttctgattttggttccaattttgggtctcagggtacgtgttggggtccttgtgagggttcgagtcaaaagctgggtccccaatccagacaatgactgcgggttttgtccaagccttggctcaagctccggatcccaatctcgggtc

SEQ ID NO: 103962 - DNA, 830 bp, Cannabis sativa
gatatggttagagaccataataatccttatttttatcattgttatttatttaaattttaattattgtttgctttatttacttttctccaatattattactgatcaagtaagactaaagatttaattaattagtacttgataatcaattctcgtgggaacaatactttatttatcattatattatttgattcgattgcatatactcgtgtattaatattatcttacaattcttgtcatgaaatacttgtctagaattataaaagaggttggctcttggaaaggcttcaaatttcataaccaatgtgcaaatttgaagctaaatcacatgtgttttgcagattatttgctactattttttcttggtgattttgtttttgttatgctaatgctaattagggcttaaaactcttttcttcaacattaaggctgataccaaatgaatataaaattgatgtatattgtagtgatatgaacaaagctgaagttgcaagagttcttgaaatgtcaggatactccacaactaacctcccttttaagtatcttggcgtatcgatttgctcaaaaagcatgtctgtagtagaatataatagcatttaaagaagatgactaccaaaataaaggtatggagttcaatgaacttattttatatggggagagttactctcataaactcagttatgattacttgacactcttattgggctcaaataataattttttaccaagaaactcttgaaacatgtggaagctatttgtatggcctttttctggagaggcttagcacatgatagtagtccaagtttagtggtttggcaaaatgtgtgtttgcc

SEQ ID NO: 103963 - DNA, 2276 bp, Cannabis sativa
cccctgtcagtatgttgttttctgaagatttaataactcttgacttattttatccattccgagcaagcaggaccatttttgttgcttggctatactgagtttgaagatatgccaaagtgtaaacatgggtgtttattgatcaaacaatcttgtgtgttcatgctttcttacttgaattctatataaaattatatttgcaacactctagcatgagcgcccagtaagataagaaattggaaaccagtagaaagaaagaatgacaggcgatctttgcgattttgaaagtcccagacaatggcggttcacttgggaagctcagtctcacatcccaactttaaggcttttcctattcgatcctcagactagacccttagtacaatgcaggaatctcaaggtcaacgtcagtctttcacagtcactggttatggtcacttggtttgatgataaagaagtctcacttagggttcctattcctagggttttgatcgatgatgaatctcccgtgaggtttacagtatttgatgaccacatagaagtcaagcttgttcttcttctccctgtgggtcatgctattgtttccggcttcgactcgatactgaatttttctggcgatgatgagaatctgaacttggatgcttcaacccctctttctgttgactcgggtgagtcgaggatttgaagttattttgctttgatcttactattttactagtcttttttgctcacattcttacattctgtatgattgatttgtttcttttgtgctgctttctcagatataaggaatctgtcatctagtgaaggagttcatttttactgccaaaattgtgaatttaaattaacaagaagccctctaaggtttttctctttttggctcatcccatgttggtgcatgtctaatgatgtttcagtctactatgaagtccggtttcatttgtgggttctaatttgaagttatttgtcaacacacttgtagaaatttttcggaaatgccatcggttaactggcgtgaggtggctgacaactggtttggagcttgctgctgttcatttggaggaataagtgagaagttggtcactaagtttactaattcgtactcatgcatgaagggcatgtgccttgttaactttgctaccattgttgtttgtaatgaggatcttgttgggtgtaatctctctgacctcggtggggatgaatttcatggagttgaatcagatttaattggtgacattggatttgatgaatctactgcaacctcagtcagtgatcctgttattgatgaggaatctaaggataagaatattaaggatgaagagtttggtgccagtattgtttgcaaagatactgctgaagaaagtaaccttgaacgattatctcatttgtgtttagaatcaaatttggctggaaatgaggaactagaacagggatgttgcacacatcatgtatccgaaaaattgttgaataatgagaaacttattgaaagtacgaagatatcagaaaatcagaagtcgtttcttaatgggttccttggtaacatttttatgattagatcatctaatctctcaaaagaggttgagtgggttgagtatttttgccctcaatgttcaactctccttggagcttatccttgtgctaatggctctgcccctgtagatggtggggttcggttttttaaatgctatttatctaccagcttgccagctggaggttccaaagatttcttcaggtcagcataaataatctaaaatgaatgcattgacctctttaacttagtaagccaatatttacagtcttgactttatgaagaaacatgaaagaatttcttatctcttgctcacttaatcacgttcctttgttatttcttaataacatccttttgtgattgctttttatcattttgtactgaagttcatttctagtaccaaaatgatggccgtctatctaaatttggatgcttaattctatgacagggggtacacattagaaaaactgttttcaactcagctacttgattgtgcaaaggatgaattgtcattccgaactgtggctagagatctgaaaacccgagttcctagattgcaagttgttctaacaaattcaaattcatggtcctgtactggttattgttcgagcacaacgagttgcatggaaccagcaccgaagcttgatctacaacctgtcattaaggtgctgttctcagaatgcagcaagtatacagaatctgaaataaggtcgggtagttaattcacttagtatttgtctgcttattctatttt

SEQ ID NO: 103964 - DNA, 627 bp, Cannabis sativa
  modified_base (592)..(601): a, c, t, g, unknown or other
ttatctaaacctatggcttgtggtatgcctggtgatttaattactctagtgcatgcaacttactttataagatgctggagaatttttctaatggctagctccataagaagtcttttgactcctagacatagattttatttatctaaagaaaagtttcaactattctagaaaagataaaggccaaggaataattccttcggatcaacaatgagaggtttcatgtatgctcttgtatgcattagaccagacacctgctattgagtgggagtaatgagtaagtattagattaatttaagaaaggagcattggaagattatcaaatgaatcttatgatcaagaagaggaactgtaacgccctaatgctaaggcatgctacagtgctttttcaattacagtgtaatctttgctaatcaactatttttattgaaaaacatgtcaaattaaaacttttatattaattaataaactttataatatattaaaatatttacaagtgtcaggatcccgttttcaaactttttagagttaatattcaaaaaatacatatattacaggtcgcacggcgactacaaaatacaatccccagatgtcnnnnnnnnnnacactccaggtcgcgctgctttgaca

SEQ ID NO: 103965 - DNA, 710 bp, Cannabis sativa
taaacaacctaaaatagacactacgtaactccccgtgccaaaaactgaacctgacactactacaaaaatatgctttttatcccgatttttaagggtattttatcccagttttcgctaaaatgaaaaccggaatatatgccagtgggataaaagctcttataaaaaccgggataaaaaattacttttaatcccggttattataagaaaccgggataaaagactatttttaatcccggttttcctttaaaaactgggatttaaagtaattttttatcccgattttcctataataactgggattaaaggttaaaaaaataaaaaaaattattctaaaaaaaaaacaagcaatgaaccactacagagattttttttttcttaataataattttaataaaatatgcaataagtatagatttaaatcccaacaaattagtacaacaacagccacgcgaacacccttcgacaaccacgagtatagcggtgaactaccttcgacaaccgtgagtcattatcaacgaccacaaatagcgaccacgaagcttcgtccaccatgaaaaaccatgaacctttcgaccacgaaccttcacacctgaggaaagagagaaggagagagagttgatcgacatttcagaaaaataaaaaaaaattaaaaaagaagaagtaggagcatagatctctcgagaacaaaaaaagaaaaagaacacaaatgg

SEQ ID NO: 103966 - DNA, 873 bp, Cannabis sativa
gaaattcattaaggataacaaaagcacgtaataccgcttggccggtcatgatgtcttaaaaaaggccttatggccaaataagatatataaaaataaggataaaagagaagttgttaaacagctggagtcccaggctctcggttcggatcttctgggtcggtaggagctagaggatctattgtttgaacgggaggtacatcagcattttggccagaggtagaagcaaccgcctcagtttcaccataagccacttgggaagcgcagaacttgagatacatgtctttggcttcacccaagtaatcaaagtttgcctgagggttagccttccaaaagtcataaaagagctcgagaccggctgtctctaaggcatgaactttctcgcccagcctcgccacctcagctgtaagctcgtcctccttagacttcttctcctcttccagacgacggaggacagctcgaagggacgtcctttcatcttgaaggctattcacttctgcagataaggtcttgatggtctcttcaagacggtcagaagcctcgagatccttagtcaactcggttattttcttctgagcagtaaaaagcttcttgttggcttcacccagctccatccgaacagctctaagttccaccctggcgtcatcagcgtccttcctggccaagtccacctccgccctcatggtgttggacaaagccgcgttcttggaagcagcagacttagctcgggagtatgtgtaagccaaataaagaggattaaaggaaactgccaagaaagacttacccttgtgaattccttcaagccacctcccatcagcagctccaaagaagagtcgttgtcagcaccggccagttgctcactaacctcaggaacca

SEQ ID NO: 103967 - DNA, 1062 bp, Cannabis sativa
  modified_base (195)..(198): a, c, t, g, unknown or other
ttccttccataaagcatctcatacggagccatgccaatggtactctgataactattgttataagaaaactcaatcagaggtaggtacttgttccaagaacattcaaattccatcacacatgccctcagcatatcttcaagtatttggatagtcctttcagatttaccatcggtttgaggatgaaaagctgtactnnnntttaatttagtacccattgcttgctgcaaacttcccaagaatttggatgtaaattttggatctcgatctgaaactattgactttggggcaccatgaagccgaactatttccttgatatacaaatcagcatattgatccactgtatacgttgtcttcactggaagaaagtgagcagacttcgtatatcgatccactatcacccaaatagagtcataataccctactgtcctgggtaatccaactacaaaatccatggtgatgtcttcccatttcaatttaggaatctttagagattgaagcaaacctgccggcctctgatgttctgctttaatttgttgacaggttaggcattttgacacatactcaacaacatccctcttcatacccgaccacaagtataaaaccttcacatcatgatacatcttggttgttcccaaatgtaagtagtacggtgtagtatgagattcatcaagaatcttttgtctgatttctttgtcattcggcacacagattctgttcttgtatcgcaataacccatcaaataaacatgaaaagtcttttgccaatccggcctctaatttctccttatgcccctgtaactcaagatcactttgttgagctgctctaattctttccaatagatcagactgtagggtaatgttggcaagctttccaattataaattccattcccgttctagccatatcctcagccagctctgctgaaattttctttagttcacaaacttgccctgctccttttcgaattagagcatccgctaccacatttgcattactagggtggtagagaatctcacagtcataatctttgaccagttccaaccatcgtcgttgcctcatattt

SEQ ID NO: 103968 - DNA, 564 bp, Cannabis sativa
atcaagctcaaagctagggtattaaaatacacaattcaagcattaatatccagcaataatcccataatttcaggttgcataaacacttaaaattcatgcatctaactcaacaaagttcaagctcaaacacatgaacttcaacctaaacatatccaaacttctagctgcaaatacaccaattaaaacatatttccactaaaaaaaataccttatactcttactccaagatcaacaacataaattcccaccaaaccatgcaattccataaacaattcaccaagattaaaacccaacaccaagaacatgcaaccccacaaactcaacaatttaaaatatgctttttatcaaaaattcagcaagataccaccattaaaattctacaaaaacttcagcaagaggttacctaaactccaagctcaagacccacaactccaaaaagcttcaatcacaaccaaaatcaagcttgcttcaacaattcaagtcttgaaaacaaaacaagagggtaagagagggagagggttcgggtgagggataaccacaagcagaaaaatcaattcctttttc

SEQ ID NO: 103969 - DNA, 543 bp, Cannabis sativa
attctttctctacttgcaatagctaatgaatctttagttgataattattaatagttgttaattaagagaaattcacccaccaacataaactaactaaaaaactaacatccttattaagaaagtatgcaaatctaaaacttaaatctaatgatatcaaaaatatgcaggcgcatttgtattcaggttctaagtaatgtcaataaagtttcttctagtttcaaaaagggaatctaaagatatcaaaatataaatgcatttaaaatttttaacaaagcaaaactaaaaactaaagaaggcaaggattatttaccgtagacggtcgccaccacccaaatgcctttcagcgggcttggctcttgagggtagtaggaacaattcaacattaacatcgcgcaaccgtagcaatagcaactgagccagccaaaccaagaaagccgcgacaacaagcatatgatcactcaaaccaatctaattgtttccccaaaaaatatgtagaaaaaaaaatcaaatgaaatacacaaatttagtcaaagcaaaattaat

SEQ ID NO: 103970 - DNA, 1858 bp, Cannabis sativa
  modified_base (163)..(165): a, c, t, g, unknown or other
  modified_base (383)..(385): a, c, t, g, unknown or other
gccaatcgcaacacgacatgtcactacaagaaatgtcacttttgccaacacatttttgtggtggcaaaagttggtattgcattggtaaaatagaatttactagtgatttgttggcaaaatgagttggcaaatcaatgatggtattagaacttttgccagcatnnnatgaaaagcgctggcaaaaatgacttttcccagcgcgtaaatgctctggtaaaagttagattttagccactacaaatgtacgctagtaaaactttgacttttttgccagcgctgtttgtgaaatgcgctggtaaaagttacttttaccaacgtcgtagcgaactgtgctggtaaaagtgtcatttcttgtagtgtgtcgagaaggtgctaggcaccannngtacctaatagcaatgctctatatttaactattacattaaattatgaaatatttatattatttttttattgtcttacatattaaaataataataaattgattataaagttattagatattattttatttttaataaaatatcaattaaatattaaattttacgtcaaaatttttgcaattgtgcattgaaacataaagctaaaatttggtgtaaatttaccataaaattactttttgtgctaaatataccacaatttttacatattcaattagaggagatggtctaaaacatccaacataatgagattacgcaggcatttactaatgtagaggtaaaaaatactcatattgtgatctcttattaattttgaatatggatagagtaaaattacatttataatggatggatgaattctatgaatataaatgaatcacaaaactaaatctttacactttttatttgtgcaattatttttccttttaaaataaaatacagaaaagaaatatgatcaagaaatcaaataataataataaactagacttgattcatttaagttggttggctatggccaagacattactgcatagatgtccgaagttggtattggcttgtgtcaatggagaagagcctgacttgaacccaccttcacaagagtcaccatcggtcatggcagctgttacccaagtgttaatgtccgcgtagtttttggcagctatggcattgagtgagtcacccagttgctcattggcgctatcataattttcattgcagtcatttaaggcagctatcacatccttatctttcgttgttttgagtagacttgcaatctggccctcggtggttttggcgcttgaagatgctgcgttgagggcgattttggctaggccgtcgagggtggcaccactgctactggggtctgctcggagtgtcttctcacaaagatctttgtacaaagctttgccacacgtgtcagagatcaaatctcctttaaccatttggttcaaaccaagagagacaaaggtcacaaagcagaagatcgacatcgagttcatcattttgtatagatatatatttgttattttcttttggagagaatatgaaagaatggtacgtatatcaagatctcaatttcatatgtttatatagagagatgtctaggtttggacaaatttgtacgtacggttgttttgtatggttgttttttcttcttctttaattagtcaatgtgtaccaggaccaaacaattagagccactttcatttttggcaaaccgaattttatgtttgacaataattggcctcaattttggctaactaatattaatttgattaaaatcattccttttcaaaaaaaaaaaaaaaaaagaaacaaattatatatatatatttgggtgattctacaatgcacccccttaaaagagatataccgatacacccttgacttgtttcggtatcccgaagaattttttagtc

SEQ ID NO: 103971 - DNA, 1342 bp, Cannabis sativa
tttcctgttttcagtttgatatttaactaacaatggtattcatggttgtgctgtaactatttttagtttttgatgatagaaaataaagtgttgggatttatgttttgtttcttaatcattttgcaatctgatgtccatggtggaaaagttgagcagattttgctgaattcattgttaacgtgattaccttggtcgtcgtcggtcgtgccgtgggtgaggtctgctggacgttggtggctggtgtggtgggttgggttgggtgtggggtgggattgtttgtgtcttcgtgaggtttgatggtggaggctgctgatgctgaatgtaaataattttttagagctgctcaatgtgtaaatgatttagggtttttatttttttaattaataatttaatacatatatatgaactgtaataaaaaaaataaaaatatatataatatatttatatatcggatttgcgggcgggttctcgggttcaacccgaaacccggtacccctaaaaactcaacccgcgaacccgcccgaagggtactgggttgaacccgacctgcccgaacattttttaaaaaaaaatttgcgggttcactggttggggttcggacgggttgctagggttcgggtcgaatccgctcaaaatgttcagtcgtaatatgtagggccgacccttatggtgtccaagttgggctattgcacaatgctgagaaaaataaagtgcccaatatattttttctttaatgcgcttcagtcttttttttttaatgaacccaattttttaaggagctaacaatttgtcatcggtcacttccatgtcaatttctaaaactcattttttattctattactgcttttaagcaaaaaaaaaatcattactattatttattattttttcaaacgtttcatatttttttctatcatttttatttgcaatcaataataatttttataacataattggagtttttttttgtgtttcataaaatatataattgtacaatattatttataaattaattgtatttttttgtaggggcccaatttttaaaattagaataagacctctaaagtgtgctggtaatgtaatgtaaatatttaagatggtcgtcgatacatggtaattaatataaaagtgtgctctaaaataaaaaaaaataaaaaaaaaaattgaagttttggtgatgtattatttaaaaaaataaagtaaagaaaactcaattatgtaaatatttagagtttagctaatataaaggtgctgtttggactgcttacttgctcaaggatgattattttttttttgggtaaataccattttggatcttctgttttacaaaagttaccaattagac

SEQ ID NO: 103972 - DNA, 710 bp, Cannabis sativa
  modified_base (548)..(561): a, c, t, g, unknown or other
tgaaatcaggggcaacactagtattctatttttctccaatatataatatcccactaagaaaaaggttctagacgtacccatgtgattaaaatagccatccatcacattttccgtcgtcgccgagaaaaaattataaaaataacataattcaaatataactcaaataatacacctagagtttaataaaatctccaaaattgagaaattataactctattgcccacttttaataatgggacccacaattaaataaatttataaataactataaatataccaataattagtgttaatcacttttactaatccatattataaaatacggttattacaatatttattggaaaaataatactaaggatggaaaataattttttatttttcagatcttcctacggtataattttataaatattaaattacagtttatatttagagttatctaaattattaattttaattaaataaatatatatatatgttaaaataaatagattaaaatatatatcaactgaaaatacatctctttaaaataatgagctttagtnnnnnnnnnnnnnnatctccattgttggttttacatggttaattgtttcaatataaccataagacgctagacttcgtctcccttatggatggttattcgttgaagcatttaacaccgtaaagatctcgaaagataagtattttgtaacttttcgtctctatta

SEQ ID NO: 103973 - DNA, 811 bp, Cannabis sativa
aaccagaataaggaccctagaacaggagttggaccttgatccaaaaccggatcaagacacagaaccgaacactgacccggacccagactgggatcaatagcaaacccaggcccgaacgcagacccagacttgcgccaggacctgggacctaggacccgtgacccgagaccttgaccagaacccattcccgtaccagaactcgaacatagacccaaacccagactcagaccaagactcggacacagacacggactgaaaactgggcctagacccaaacccagacctagacctggacccagacccagactcgtgccaaaactcagactcaaactcaggactcagacctggacatagatcacgactcgaacttagacccagactaggaccgagacctaaacttggagtaggactagaacttagactgggaccgggaccgggacccgatactcaaacacgggacctcagaaccgaaccattaaataaacccagaccaggccaagacccgggagaaggaccagttccgaacatcgactgggacttgcactcggactgggaccctaacccagattgggacctaggaccctgacctgaatcggggactcagacccatgactcaggcccaagaccaaaacctagacccaaacttggacataagacccagaccaagacccaagacatgagctagaactggaccaggatctggatttagacccaggagtggacccaagacctgaggcttggacccgacccatattcggtgtctaaatctggtaattagacctaggcttggacctagacccagaccaggact

SEQ ID NO: 103974 - DNA, 537 bp, Cannabis sativa
tgtcactaaattgaattctgtagaaatgtgtatgagattctgagatggatcaaaagcaaaagatataatgctgtcatttccaagtaaatcccaactaagtttggtcatttccttgtttaatggattgcaaatgtagattgttaggtctttagtagggaagcaactcctgcaacaaatgagaccttgacacgatgacaataccataacatcctcatggagaaaatcaaagattgtcaatttgaattgaaagccatcttcatcaacaagaatgtatgtgacaattttgatatctttgttgagccatgaaaactagtcttggaagatgaatcttgagagttcaatataaagtaattttccttcgggtcctaattgtactgcatagaaggttatattgcaatgtaatcaatattattgagaatggtgcataacagtttttgtggtagggcaatagttgattatatggtgcatatctatttttgttggtaaagagtttcaattatggtcttttacttgtttagtatagtgacacatgttata

SEQ ID NO: 103975 - DNA, 669 bp, Cannabis sativa
  modified_base (474)..(479): a, c, t, g, unknown or other
ctctagtgcaagcaacttacttttgtaagttgctggagcattttttgctaatggcaatctatagaagcttctcgacttctagacatagatttatctaaggaagagtttcaactattccagaaatgataaaggccaaggaaagaattccttaggatcaatagtgagaggtctcagatatgctttactatgcattaaaccagccacctactgttgagtgagaaatatgagtaggtatcagattaatccaggaaaggaacattgggagacaatcaagtaaatcgtaaggtcaagaagaggaaatatatgttagtcgataagggtggtattttaatactcttagactacaccaaatcaggtttctagacttgtttgatgctacaaagtctactaatgagatattgattactctggggttggagcagtgattttggaaaagtgtaaaaatcaatctgaaatctctaactctaccagtgnnnnnnaatgttaaagttacaggaaagatatttattcagtctatggaaagttctatacagtttttggcgttgtatcaataatttattaactactagtgtaatttcttgactagcacaaatgtagtttccaaaaaataaagaatctagtatccctagaggagtagacatatacagatgaatttcacaatatcaaaga

SEQ ID NO: 103976 - DNA, 959 bp, Cannabis sativa
atttttcttttactttttttttttaaaatagttaataaaaaataaaaatataaaatattttggttttttataccgcaggtccctaaactatacatgttttgacaagttggtccttaaactttattttttaacaaattagtctctaaactatatatgttttggcaaattggtttccaaactttatattttggtaaattaatccccaaacttttatttatttagcaacattaagttcccactattagatattgacatttttattatttattttacttactttaatttatgtttttgtgttaaattcaaataatttaatttttttaattttaatactttaagaaaaataattatattaatattttttatttattatattaacactaatatttcaatactttaatttattatattcatatacattaataataagaaaaaaaaaatataaatactagcggatacatataatagctagaaaggattttagcccctcacatttttatatttcagcatttatactatattttattgttgatttatgaatatgtggtattataattttaataattttttaattatatatatttattgattatttaaattttgtatctacgatggtaaattttcataggtttgtcgcgaaacataagttaaaaataaattttaaaatataatttactttagtagtttataaaaaataaaaaaaaaaaaaatacattattatttaagtattttcaattgttctttttcttattaaaattataataccacatattcataaatcaataataaaatatatataatgctaaaatataaaaatgtgaggggctaaaattctgtctagctattatatgtgccagtatttatctttttttttcttattatatatgtatatgaatataataaattaaagtattaaaaatattaatataattatttttctcaaaatattaaaattaaaa

SEQ ID NO: 103977 - DNA, 890 bp, Cannabis sativa
tctcaatagtcgactacgtagtcttatatatccggaagcgtcttcagtaaggatttatggccctcgagtctggaagctcatatatgttcccagaggctctggtacttaagctgaagacttcactcgaagaggagttggttaagttaattatttctaactaacttaacaacctcgtttcttgcagccaccgagtttaggattttgatcctaaacctataaataccaccttgactttatcatttgaacaacacaagattatgtacgaaaaggagatgagattgactgtttgagagagagaagattaagaggtagagagagaggtccagagaaaagagagaatatgggtttgggttttataagaagaatcttctatagatgaagaagattcttcggtgtaatgtgtgagagttgaaacactttgtgagaactcaatagagaatctcatctcgactttactgtacatattcttgttcaatcaataaagaaggatcacggaggtgttccaaaactggagtagagccatatatcatatcgatctataggacttgcaccagaatatattttggtgttaatttttttatttcctgcatttaccgtttctggtttaaatactatatttgctcctgtttttatctgattgttgttcttgattgttaatcttgtcattactaattgtttaattatttaaagatgtgatcatcttgattttgcaccattcgtcttaattttctcacaaatcagagcacggtaattgatcaagatcgcaaaattaagattttttccgctgcaatcttaaagaaacttaaatgtcatcaatgtagagattcgagttggagaaattcgatggaattggggacttcgctctatggagagaaagtctgaaagggatc

SEQ ID NO: 103978 - DNA, 604 bp, Cannabis sativa
aggcacaatgtattcctccgcctcggagggaatcccagagtcatggctcggggctggagtgtccaccctgtgggtccgcttagaggactccacctctacatcttgcccgttcgcttacgctcaagggcgaccgggtcctccacttcaccttcttcaacttcctcctcctcatccaccaagacgatggtgcccgaaggggcattggaggaggacctcccacgagtaaccaactgggaggcagccggaggtggggaagcatcaggactgtaggcttcagcgagagttgccaagagttcatccctgggcctggctgctgcaacaaaggagataagtgtcaggacatccatgaaaaaagcatacacttagcaaaaagcaataaaactagtcctaccctgactctctaattcggccctagcaaagtctcgaatcatgatgttggcgtcatcatccccgagaaagctgttagagggaaagtaccaactagaggataaatgagctgaataatccaagagaataggcgccggaggtccagaacccatccggtacctacctagataatggcctaagtgggagaaataatattccttggcatgattcccccacc

SEQ ID NO: 103979 - DNA, 983 bp, Cannabis sativa
atcatcatctaagaaatgtgaccatatatttcccaccatttatacaatatatagaacacacgaaatgacatgagacataacaacaactaacaaccaataaataatagtgtcaatagaaaacaacaataagtaaacaaaaaattacattgtaaaactcttatacaaaggagttagtaaaaataaccaactatgactcaaaaatatttgtcaaaaactatgatagatgattgtaatgagtgttgaaactagttttgtacaggttcttagattcttatgatcaatattattctcacttattcaccaaaaataaatattgaaaggattcatacataattaatgttccgctcaattccttttaatggcctaacatgttttatttttcactcttacttattttcctacctgatgcatagatacacatacatatatgtatatatttatatttactaaaggaaaagtttcaataatataaaagaaaaagacaatcagcctacaaagaaagacttgaaaagtcaagtcaaaactaactttctctttgtcattgtagcctcagtagagtatttggtcttgaatgcaaagcaaacaatgtattgcaccaaccactttttaactactagggtatcagaaaacaatagtttatgattctttcctcctgattaagaattagtaaatccattcttcattacaaattgaatacaaggatgaatgtggaatgaattcttggtcctactatgcctcttttcagatagttcagcaaattattaaagtacaaacaaattaagagcagaaaaatttctcattttataataactaaaagatccggttcttaatataatatatataactgtagactaaaatatatggtcgagctcttctacttctccggtgggtactaataatcacagaaagaaagaggatgcacaaaaaagaggcaccttgagagtaagaggcatttatcggtactggtgttcagcttcaaaagc

SEQ ID NO: 103980 - DNA, 1078 bp, Cannabis sativa
  modified_base (841)..(846): a, c, t, g, unknown or other
ttttaatttcagaacaacttaagttagaataattttaaaatatattttattttaatttattaattattttacaacaaatttcaaagtgccttgtatttaatgcatatatttttgatttttttttttaaaattagattaaagttgaaaattaaatttctttaattaattttggatcaacttaaatcaaataaatttttcattaatgatttattaaaataatttgactacaatatattatattttaattagaaaataagtaattagttactgaaatatctagatagctattttctgattacttgtggtatttttctagttatatataattaaatagaaaataaatatttaagttgttattattcaagatacttaaatatttaatattttttttagaaatttaattaaatagaaaaattaaatttgtgttgaaaattaatttattaattaattttggatcaacaaaaattagattaattttttagaatttattttattttattttgtactaaattcgaaaaatgtatttatttttaaatatattggattttgaattttatcatatatatttatagaaaattaaatatgagttgaaaattaattttaattaattttgggccaaattaaattgagttattttcaaaatatttattgagaattgttactatgatggaaaataattttattttctgatctatctaagtataattttataaatattaaatttaaatttatatttagagttatctaaattggtaattttaattaaataaatatatataaaataaatacattaaaataaatattcgatgaaaataaaccttaaataatgagctttattatnnnnnnattcgatctccattgttagttctacataattcttgttttagtgagtaatcatccctaatggattaatgttcattatcaatttaacaccgtaaaatcttgaaagataagtaatgttcatacattggctcgagacagggagttaagtctttgagttggagccccatcttttcatatggtgtcgtgaataagatgtttgcagaggctccatttgttagaatttattttacgagga

SEQ ID NO: 103981 - DNA, 1144 bp, Cannabis sativa
ctcaatatgcattctcctagcgaggagggcacgaataggaagaacattagaaagaatgctccaccaaagaaccttgtgacgttcaagactttagagctccataacttgttccacaactctagggcaacatcacacacaggggcacggtcaaatgcttgaataaggtaggcagacttggtagaaaacaaaccactcagttctttagtccatatcataaacataaataaataacatataaaaattgcttactacttagctagaaaaactactggtaacaactcgtatgatcactggaaaagatataacatttcgaaacatagatataccaaatggatttttgcttggaaaatgtttaaaaccatgaagagattgagaaagcaaggtacttttatttattggagaaaattgtttcgaaacacatgagcattaatttatttttcaagtaagtatttgtatagtaatatacaatcttcttagatgcggggtgtaaagcaagtaggataagccaaattaaaagtttacacatggtgtttagtgcataattacacataaaatcaattttgtaatttataattggaagattgaatagtatttgaaaagatttgtacagaaagtgaatgagttttagtgattgtaatggttctgatttaatttaccaaaaagaaaaaaaaaaaaagaaaaaaaaaaaaaaaaaatcttgatcttgttgaattgttaatttgttatcgatttcatgagactcaaaatttaacttattatcattgtaaggcttatacaataaaattactataacttataagtaaaattgaaaaagttgtgacaaagttagaaagtacttgacaaatagttatatggttcattttaaaatatttagaaattaaaaaaaaaaattattaagaacaattttttattcacaaaagaattttgtggcacaatgttgtaatttttattatttttagaagacttttgtattacaaaatgggtatgagtactatggttatatgggtactatatagtaacattttgtttagatcaaactttaccatataatttaatttattttttaaaattctcactctttaaatcgtttttcatttttgccctagatgctcctcatgaataccatcatctctaagattgaggc

SEQ ID NO: 103982 - DNA, 679 bp, Cannabis sativa
tgcagctttccttctcattttccgggcttcatttcgattatctgggagtttcccagagtcgaggtaggctgctatttggtgtcatcccttttggggaagtatcaatcattttgatttcttccgtgccagtgatgctaggctcttcgaggaactgaataggaaccaagttcgccttgtcacttacattgctgcttgtcaatcgagctaacgcgtctgcagttgtgttttcttccttcgaaattgtttgagaccgtagcttttgaagtgtgagcagatcatgtattttgctcagatatactatcatcttttctccccaagcctcgtattatctggatacgtgatttaccaccagttgtgaatcactgcagatttcaatctgttcgactttcatatcctgggctaattttaatccaacaattagagctttatactcagcctcgttattatatgctttgaatccaaacttgactgcagcgtgtaggtgttgccccccatgcatgacaagggacattcctgcaccagatagcatatttgtagccgacccatctacatgtagtttctaggtcggcttatcttcattgttacttggctgaggtgtttgtaccggctcggggttgcttttcggtatgctttctttcttgcatgtgcattctaccacaagtctgctaaggctttgcct

SEQ ID NO: 103983 - DNA, 1315 bp, Cannabis sativa
  modified_base (58)..(65): a, c, t, g, unknown or other
tcttgttcttcgattatgcttccatttaccaaaaactcttcgccggatttaatggttnnnnnnnngttatctccgactccggcgactccccaaacacgaagcaacccgtttttttttgtgttttttactgttcacagtataaatgttaagttgttgggcttgggcagtataaaagtaaagaaaacgggcttgggcagtaaaaaaattgtttttgccgtgtcccaatatttttgtaaaattttggtcaaaaaacagtatatatgtaaatttccctttacttcgtatttttatacatttacacatccaaggtcaactctacacgaatattgactccatacatgttttcaaaaataaacattcaatcactacagtgaaaaaaacttcttttaatgacaaccttatacaagcaaatttagaaaatagataacgatttatagttacagatttgcttgattttgtgaagagtataatcactacaaaaaaaaaaaaattactttaaataataatatttgagtcactgtacaaatttttataactaaatgtgacttttagtcacaataaaaaattatttgggactaaaacatagtacttaaatacaaattgtcactaatttaattctagtcacaacaagtattgtgactagagacacatttagtcacaataaattataatttttataattaatacttttaattacaaatattttattcacaacctttttatttataatcataaattttattttcagtaaaaagtatttttttttgagtaaataccattttagaccttgtattttgtaaaagttgtcgattggacccttcattttgttaaatgacaaaatagatcccgtattttctaattatacaaatagtaccctaaactgattttttgtcaaaataaaatctaatattaatctgatctaaaggtgctatgataaagctgtacttatatttttttttatatgtatgttcgtgttaagaattgtcttcaagttagttatattaaaaaaaaagttgtcgaaaaattaagttcagggtcttatttttaccattttagaaaatacaagatctattttttcatttaataaaacatagaatccaatcaatattttttacaaaatctaaaatctagaataatatttaccctatttttttttagtactcaaccttattattttttagtacgtgctatatgtacttggaaaaatctaaaggtgtaaaatagttatgtagggaatctatcacatggctttgtccataaaaaacaaccaaatatttattatatatatgatccattaatattaatgttgggttat

SEQ ID NO: 103984 - DNA, 911 bp, Cannabis sativa
gtatcaaaatattttttttgagaacttatgtcgcactttaatatcaccacgtgatattttagggaggaattaacggatctattaaatgaggaccaacagacttacaagaatgtcgaattttgtgacttttacctctacttttgaaaattaggaatttatatacatcaaatgaactttttggaaacttttacaccaatatttctaaattaatattatgaaaactatctatcaaaaaaaaataaaataagtaaggtcggtgctatcgttatggcgcaacacaaaatttttcctataacatattatagaaaagacaatgggaatgataatgaagataaaattatgctaagtactatctcacaactaattttctaatgaatcctaccaagagtgaccttccttgtactcgaaagggtcccttgaaaaaaaaaaactccaaaggtcgtatataatatatatttatattatgtggccaactgccaattgtggaaaataggactttttattctgagaaaatggaaaataaaataggcctttcttgatagcataaaggaccttgaacgtattaaacgcttctttgctcagtgtacagagacgcatttcggactaagtactatatttaacagttcttacaatacaattaaaataaataaataaagtccaaactaaaatctcaaattagaataacaaatgatcatcaacccagccgttctactttttctactgccgactataatatttatttattttgtgcagtctatattaactattcttttcttttgtcacagatatattaattaatttaacagcaataattttaaatattacagtttaataaattaaaatatattaaaatatcacaataacgatatataaccataaaaaatctgattcaaaaatggtagcggatagaa

SEQ ID NO: 103985 - DNA, 1319 bp, Cannabis sativa
aagactttataataatttataattcaaagcttccatgataatcatgatatacagtggataagaattaacattttaattttatgcaacctcaatgtacacaaaacttaatagggtgtttgttgccatacaatgaagagtaaaaattatagcattcaatcccaaatgagaaaagaaaaatcttcacataatattcaccaaatatataagcaaatgcaattaggtgataactagacatacgatgaattctgacctggtcacgaaatccagtgaacttgtagtacaacccatctttgatccgaacaccaagttgatttgttcttgggaccttcatccatgttacccctacaatgtcagctttatcaacttcaacagctttaccaccaccttgtttcttccacaaaattcccccagaatatattttcagctggcctggattctgcaagcgaaaaattcagttataaaaagaatataagaactgtttttatcgtttccttaatctatgacacaaacagaaccaaagctctacaccccaaaacacacacattgcaccagaaaactacaccaataataggcttgggttcggagttctaaacaaaatctatacacctcatctgtactcgcagcaatcaaatagactccacttaaatttcgtaaaccattaaaatttccaaaatcacatttcgttcaattcatacattcacaattacaactactcactcaacagcgacaatctcaacacgcaagccaaattattaacgcaagactaaaagcaaccaacattagaactcccccaaatgccaattcatttctacagaaaaatatcaggaccagcatactttccgaaaaaactaaatagaacgacaaaactgaatcagtatttcaaaactagggtttcgaaccatcactgagaaaagaaatgaacctttgaacgaaattccagaaattagaaattctaataataataataaaataaaaactcacagtgcctcctcggcctccgaaggagatattgttgaagagatgaccgtcagtcatggcttccaaatcgattaaccaaacagagcgaacgagtagagaagagagtctttctctctcagacaaaaccctaaaagcttaaggtgtaaattattatatatggtccgaccacagaggcgggggtgcgcattacgccccagagccaatgcgcgcgaattgggcagctataggatgcaaccgtatacaggataagaaaattaggatcgcgttaaatccttgtggtggccattggttattggtctttcaaatttgctttctaatttggtgtttaactttgagcattg

SEQ ID NO: 103986 - DNA, 742 bp, Cannabis sativa
cgctgccgcagcttccttgcttccatcttgtcatcaggtaagatacccttttcaagatatgcgactattggagtcatccaggtgacttcttaagcgatatctatttcccttatttcttctctatttatcgttgggtgagccaatacatctacaagaattacatcgagtaattcggcttctctagtcgaggtcaaacgagccaatgcgtctgcgtgcgagttatgggcacgcggtactcaggacaggactactttcttgaatttctggatcagttcgcatactattggcaagatacttaaccaagcgcccacctctggccagatattctccattcacctggcatacgaagatttgggaatcgctgaaagcttgttagtactcgattctcatctcgagagcgagcttcaatcctgcgattaaagccccatacttggcttcattgttagatgcagaaaactcaaaacgtaaagtagcgtgcaccttaaaattgttgggactaattagtatgattccaccgccggaaccttcgctattagaagccccatcgacgtacaatgtccatccttttccttttggcatagcggtgttgatctcttcgtttatgagtgccacttcagtacttgggaattcgagattgaaatctgccaaggcttgccccttgatcgccattctcggtttgtacttgatgtcgatctggcttaactctaccgaccatttaaacaatctccccgatgtctctggt

SEQ ID NO: 103987 - DNA, 513 bp, Cannabis sativa
ttcccaggccacacaagttgttgtgtccacacttcttatttctctagttaacaacactttctgctctgcagttgacaacactttctgcaattaacaacactgtctgtagttaacaaagcatcctgtagttgacaacactttcttcagttaaatcgtgccttttgcagttaattgcacaagtggagatgaacgtacacttgcggtaaatcatcttttcctgtgaaggctggctccacatggcagccttatacaagactggacttgtacttctaggctaaaatttgcactataacaccatacctccctcaccactaagttagccttagtgacttctagtttaatgttagttgaaatttatgtaataaatttaatatgtaatttatgttaaaactatccaatctttataatttgttatatttaaatatttaagaaaaaatattagcgggtaaactatcattttttttacaagaaacacctttgaaccgcttatcttgagcaaaacaactcaaagaa

SEQ ID NO: 103988 - DNA, 594 bp, Cannabis sativa
  modified_base (79)..(90): a, c, t, g, unknown or other
  modified_base (315)..(322): a, c, t, g, unknown or other
accataacaatcacaacactataagttatacactaatcacttcccgggcacttaaactaggaactaaaagtttccctannnnnnnnnnnnatggcaataccccaaataacacaaaaacgagaaaatctagggttcttgaaaatttcccaaccggaagactggttgcacaaccggaattccggttctggaaattcctgaaccccatccggaattccggatgcacaactggaattccggttcatcgcaggaaactttccgaaattcacacattgctcaactcaaatccaattcaccccaaaccttccagacctgttnnnnnnnncccaaagaacatttctaaagcatacaaaccatccagaaatctcagataccaaaaatgccatgtgagctccaagctttgagtttcgaactcaaacttggctaaagctcacctacaagcatcaaaatcagaataaaactacttattcatgcataataaagctgcacaaaccaatctcaaactcgtgcaacaaacacagcaactaatttcgaaatttctctttgaaaactaaagcttttgaaccaaaaactctaaactaggttaaagccaatcaa

SEQ ID NO: 103989 - DNA, 2740 bp, Cannabis sativa
  modified_base (26)..(55): a, c, t, g, unknown or other
aagttcttatttaggatgttaataannnnnnnnnnnnnnnnnnnnnnnnnnnnnntaaaataaattccaacaataaatcctccccttcctctcatttttttcatggcatgtaaggcttcagcagcgagaaccgaacactccgcgatccaccgacccggcaaaaaggccgattgtaacggacacacaagtttatccaacacaatttttaatctatcagtaaggattctggcaataattttatacccgaagttacagaggctaataggtctgaattgatcaaacctgtttgggctttcacatttcgaaattaggcagatgaacgagtggtttagttgatcaacaaacttgccagtgacgaaaaattctttgaccatattacacacttctcctcccaccgtaccccagtatttgcgaaagaagattcccgggaaaccatcagggcctggcgccttcagcggatgcaacttgtaaacaatatccctaatctcttcatcagtggggcttcggcaaagttccgaattctcctgctccgtaaccttctcattgaaaagcatttcaaaatcactgtcaataaccggctcagaactttcatacagtttgcagaaattgtttaccagatacgatccaattgcttttcggtctctgatccacacatcgtcatgagtattgatggctcgaacattattcctccttctccgaaccaaagtagaagtgtgaaaaaatttggaattacagtctccctgagccacccacaattctctagatttttgcttccatatactctccattttaatttccaaatccgcaatttctgtctggatttctaattcctctctttgtctctcaggagtggaagactgcagagtagagagctcattgtatagccttttcagcttggcatcacagaacccaaaatggtttttattccactccttcaacgcccccttagtcttagttagcttctgcattacttgaaaactccaataaccggtgcaaggccacttccaggcttgctcaactacttgaccgcaagaggggtccgatgtccacacttcgaaaaagcgaaacgaatatcttagcccccgttcaattaaatcagtatcacgagttaaaggagcatgatcggacaccacaattggatgatttctgacatttgcccgagggtattgagtacaccaacaaggggatgcaattgccctgtccaaacattttctcaccccatgaggatggtctcttgcattctttcaggtcagacaagggcccgagaagcccaaatccactcctcctgagtccatcaaggaattttgaagtattgccccttcaaaggagcggaaagcccggcctccaactttctcctcagccttcaagatcacatttaaatcaccaatgatcacccaaggagttgaacatccaataatcacactacttaaccattgccagaaactgtctttctccctcgcataaggggtgccatacacacaaaagagtgtccatggcggcagcccattcaaaggcgtataaacacattcaaacaccgaactataaacatttttgatccgtaaattaatcccattacgccagccaacacaaaaaccccctcctattccaagagctggaatacacgctacatttgagaaacccagtcgaacattcaattgagtcatcgcaacttcatcaacttttatttccgctagaaataaaacatccactttttcagatcgagagagtcctcgaatggctctctccgccgcgggtctacgaagtccgcggtagttccaagctaagcacctcatggcaaaggtgggggcatgcttccggccgcctcctcgccatttccaaaattttgatcatacgaaatagggacttcaacacattgagcaagaatttgattgatatcaccttgtaactgtccgtctccatcttgcaatagttttttactcctcctagtcttgactccagaattcctccgaagcccttgccgagatctagtaatccttgcttttctcttattcttggccttgtcttcagtatccccattactgcccagtttgaaagttgcactccccaattcgcgtgtagatgaaacctttgaaggcgaaatttggttggttgaacttgccccatcattgttatcaaataatgaatccttgtatacttcaggtattgggttataccaagtatgggcttttctcttttttgtgcccaacaaatgaatgatcatttgagatagatcaggtgggttagatataagtgagggctgggctttatataggttggtgtagtccggcccaataagttcacaataaagcttttgaagatcagggttgtttgtgggccatttgaagtttataggctcaggaaaatgatggggagtttgggatttgcaagtccaaatgtggggtgtctcaagactttgaattagagaaggtccaatatctgggatgagatccacttcagcctcattaggaccaatgggctgggcaaaatcaggtaacggtctttcggttaaaacatcacgtgcaggaatattcaaaatttcaggagcacatggggaaatattgttgatgaccacctcacctactgtggccccacctctgacattcgtactcccactaccatgcatactcctctgcatggtggtgtccgcgccatgcatcgtactgggacgtgcacctccttcaccattcgaatctgccacctgtaccacccctgtgcctttcaccggcggtggattagcttc

SEQ ID NO: 103990 - DNA, 572 bp, Cannabis sativa
ctcagcaaagcctatgatcgtattgaatggagctttttagagtcagttcttagaaagattggcttttcggatcattggatttctttggtgatgaagtgtgtgggttcggcaaggtacaacgtgattcatggaggaagaacaatggggccgattctaccatcccgtggtatccgccaaggtgatcctttatcaccttatatctttattttgtgtgcggaaggactatcagctttgattagaagatatgaggcaatgggttttattcatggatgtaaagtggcgaatggggctcctaaagtgtcccatatgcttttcgctgacgatagttatctgtattgcaaagccacccttcaagaagccaatcgaatcaaagatcttcttcgccaatttgaatgtgcttcaggtcagaaagtaaacttggggaaatcttcaatcttctatagcaccaatacaacaactcatgttcgggaggatatcaatactctgttacaaatgccacaagcagatgaaaggagtatgtatctgggcctccccagtacgatgggaagaaacaagtcagctgttttgggttt

SEQ ID NO: 103991 - DNA, 555 bp, Cannabis sativa
ttattattattattataaaacatatatcatatgatttttttttattatttatataacacatgaaaatcatgatttgctagtcaatctatattgatttattattatatataataaagagccttttgatctatccagtattactttaaatttgtttgttttgtaaaattattggttagattttttattttgttaaatagtaaactaaatcatgtattttttaaaatagtacaaataaataagactttgaactaattttttttttattcaaataaaacttaataataactcgatctaaatgtgttattatgttttctatatttatttatattaagaattattttatagtattaaaaaaattatcaaaaaaattaagctcaaaatatatactatttttaccaatttgaaaaatacaacatctattttattatttaacaaaataaaaaatctaatcgtgaacttttataaatacaaaatcaaaaataatatttatatatatgtatacataaaaaaaaaaaaagctaattagcaaattttcttcccgaactttgacatata

SEQ ID NO: 103992 - DNA, 508 bp, Cannabis sativa
gcagcaccacaccaagctcctgctcaggtagatggcgatgctccggtgatttggggcaggcttgtcagcgtcaaacatgggtttgatccatctactctaccatcttaattcattgaagaaagactcgtacatattatatatatgtatgattatttgattttttttgtctctctgtttctctctcgtttttgttgtgtaggtggactgtgggaatttggggttttcgccaggatggtggtttggattaatggctgaaggtgggggttccaaatttatggttgatttgtttttagttttttaggtttttttggttctaaacatgttctgatttgtttagatttgcattgactctgatttaattgtttttttggttaaaagtaatgtcatgtacattttgatatgaagtataatgttgatgtaaagtataatgtgtgtattttattattttgtttagtagttaaaatattctgttaattgctctttcaaaaataatatattattaatttat

SEQ ID NO: 103993 - DNA, 861 bp, Cannabis sativa
  modified_base (396)..(404): a, c, t, g, unknown or other
ataaaacaagtagtgcatttcaattaatctattgtcttgatatccagatcaagtgtagtgtacttgactaaacccaaagtacaggaactgtaagtctgtggtacgcaactactttctctaccattacttcctttgtgttcataaaatattatgcatcatcatttttactatatgtattactcctctaggaatgctgaattctttactgcttattaagtgcatttgaatatacagaagacatatctttaattctatccaaaaggaatagagataccacaattaagaactttcttcagtttgaataactttccagtgctttttgaaagcaacaaagttgtttaacttcactggtggaactaaattattatagattttacatccttctagaataattcnnnnnnnnnagagtaaccaccatctcgaataggttatgagttggtgtagataaaaagattctaatatacacccctatcatctaatatataggtcactttcataattctttcttgattgtctcctaatattccttgtttgattacattttagatgactctcactcaacagtaggagtctggttaaactcgtacataggagtatatttaacctctcactattggttcttaggggcctcttgttgtgacttattatcttagtctgaaataataagtttcttctagactaagtcattaacatagcaatcaagttttaacattaatataaaatacttgcttaaaattaagtaatcattaaaaataccataaaaattttcataaggactagggattttgcttaagtcattcgaatagacattgcaaaatattctatcttatcctcataattctaataagttatttctatcca

SEQ ID NO: 103994 - DNA, 516 bp, Cannabis sativa
aaagtccatgacacaggctcgcaacaaatcctctagtatcttaattgttctttctgattgcccatctgtctgaggggtgggaagctgtgttaaactttagctttgtacccatagctttctaaagactcacccaaaactatgatgtaaattttggatctctatctgaaacaatggatttaggagctccatggagacgaactatctcctttacatacagttcagcgtactgatccactgaataagtaactttcacaagtagaaagttagttgattttgtaaatctgtctataatgacccataccaaatcatacactcctgtggtcctaggcaaaccagttacaaaatccatcgcaatgtcctcccacttccactcaggaagggctaaaggttgcaataaccatgctggcttttgatgttcagctttgattaactggtaggttaagcacttggacacgtagtctaccacatctcttttcatcccataccaccagaagtagggttttaaatcctgataca

SEQ ID NO: 103995 - DNA, 649 bp, Cannabis sativa
tatatatataaataatcatatatacttgtaacaaatataatgaaagcctaagttttatagtttattatacctatacatatatgtgccaaaataaattatataaatgtaaagataaatgcaattagtactacaagctacaataatagcaaagatagaatatattatataacagaagtgaaatgtgaaaaaaaaaatagaaaatcactagttgcgttgggcaggttattttggtttaattgggtgggttggacctattttcaacccgcccaattaatagattgggcagtttataatattatcggattttttctgtttatatttttcgttgggtttttcgatttgatatgggcgaattattctgtttgggcggtttacgaaaatttatgtacaactcctaatcccaatatttgaatacaaagtacgtaagcttataccaacagaaggtaaacacttgaaaaaccatatttagagagcatatgggaatctcaacaacctataataaccttcatccttattgtgctccttacatttcttaattcatgcatcaatcttacccttcatagagtgaataatcatttcataactgtaacgccttaatgctaaggcacgttacagtgctttttcgaatatagtgcaatctttgctaatc

SEQ ID NO: 103996 - DNA, 737 bp, Cannabis sativa
agaaggctatgggaactaatctgaaattcagcacgacctttcatcctcaaacagatgggcaatctgagcgaactattcagatacttaaagacttgttacgaacttgtgtcatggattttggagggtcatggagtaagtatttgcctctgattgaattctccaatataataactaccaaagcaccttaggaatggctccttatgagctgctctatggtaggaaatgtcgttccccaacccattagataggagaacgaaaatatctagaccctgagttggtccagaaaactaatgaggcaatagataagattaaagctcgaatgcttgcttcgcaaagcagggaaaaaagttatacagaccctaaacgtcaagatgttacattccaacctggagaccatgttttcttcgagtgtccccaatgaaaggaatcagacactttgggaagaaaggcaagttaagtcctagatttattagaccttttgaaatactcgaaacggttgggcaagttgcttatcggttggccttacctccatcactgtcagctgtgcataatgtatttgatgtttccatgctgagggaatacgtgtttgatccaatgcatgtcttaagttatgagacattggagttacaacctgatctatctaatgatgaacaaatattgcaaattttagataggaagaaaaaggtccttcgaaccaaaaccatagtgttggttaaagtactctggaggaatagtaa

SEQ ID NO: 103997 - DNA, 1478 bp, Cannabis sativa
tgatctgatccatatctctcgaccgatatcgaaaagattatcctgtaaaaaaaacttcattagttaatattatatataattaataagaagcaatttaactctaaaaataattcacctctactctagacaatatcctcttcttcacagagttaggtacttctgcccaacttaggtagtttggatccgtgtactgtcgtacgagcaatcctaactcccttgaaaagtctgaacaatacggacccatctccttgtatgtctttcctttgatgtcccattcaataggcagtggacgtttgaggttttctcgcttttctcgtgtgcttaatcccttatggtgtccacgtttctttggaggagctgttgtcatgtttaaatattcataagttagtatattcccataaatattaataacataacttaaatgttttaaattatataacctcgcacacagtcagctccaatatttgtcggaccaagaggaggatcacttcctccatcacccccgtgagaacgagcaatatctgtcatatctgagaaatataaatattagaaacattataataattttaatatcataatataataaagtactaattaacaatatatatgtaatagattaccacttattcatcactataataatcatcatcattataaatttcttctgaattatcaattttagtgttgctctcattgtcatcttcatcttcctcatatgcttcttctttgtcttcctccactacttcttccatctcttcaccatctacttcatctatgtcttcctcctccacttcatccgtgtcatcctcatcaagtggattattatcgatatccacaaactctgttggagcccctatacgttgaaagttaatctctggtaatggaccaagatcaacaaacaattggaaatcagatgaagttgtatcatgcataacatccacttcaatatcctccaaatgttcatcaatttgcggaatatcccacacatttcgatgatgaacttcttggatgactttccagtcaaatttgtttttgagatcctcaatgtagaaaacttggttagcctgatttgctaaaatgaatttatcatctttgaatccctcaaaactagtgttgatactaatgatgttttgttcagactttaatcttcctgagggtcgactagtgtcaaaccatttacacttaaataatacaacagaaaatccactgagatatgacatcacaataacttcttccaattggccataataagttttattttcaactcccactacagaaacaccactgttttgagttttcttgttctcgtccctttaaggacacaaaaaaatctaactcccatttacaacacacccagggtacgaggcaacaagattggaggaccccgatgctaaagagaataactcatcagatgcctctggagatcctaatcttcgaagatcataaagcttgttataaaaccaagaagaaaattcatt

SEQ ID NO: 103998 - DNA, 607 bp, Cannabis sativa
  modified_base (64)..(64): a, c, t, g, unknown or other
gttcatgatttctgcagccgtgacagtgtttgcaaaccttatttttaaggtgtcaaccatgctngaaagcatgaagtatcgagcttttttgttggcattttgccaacgatcgtacttctcctttacagctttggttgcattatcacccggctgctcaggagacggttcatgtaataccctagatttaagaaatggattagcaaaaccctaactagataattatgtataattaggaaattattattatataatataatatatgagaatttatatgatttatgctaagttaagaccccgttggtgagccaggggcattttagtaattttcacccgagaagggtaaactagtgaaattaatttattaacgtgcttatgggactatattattatatattatgcctgtgttgactttttcaggtgtgttctgacaggttggcacggtatagtcacaaccgggtatttcgggctgaacctggttcgggcgcaaaatgcaatattggattgaaatgttgacattttatttgatagtgagaaatctgaattttatttgaaaataaatgagcatgaaatgtcatttctacccttgtatgtgtgtgggtatgttatt

SEQ ID NO: 103999 - DNA, 506 bp, Cannabis sativa
ctggtcccttatgcctatcaatcacaaaatgattaaaactagaatgagattattagggatatttattcacttggtagggaggaagagcaaccaatttcgatatgcaactccttcatttacaagtgtgtggagagacagagagagaggagtagtacaggtttgggtgaggtcatttgtatagcttatgggttatggagaagaaaaccgatggtatagtattacccataatattgaccagaagtttaaaagtgttttaagactaagcaacaaaatagtgtagtattatagttagaattattactctagtgcaatggtatttgaacatacacaacttagccttcaacttgaggccttatacttagttcttctagttgtaaaaaaataatttaatatcatttaaaaataatcaaatatttaaaaattaattatacaagaagagaattctaatttgtgtaaaaacaagtctaatttttatataaaaaaaaaataaaatttcattgtaaata

SEQ ID NO: 104000 - DNA, 1414 bp, Cannabis sativa
  modified_base (88)..(97): a, c, t, g, unknown or other
  modified_base (1184)..(1185): a, c, t, g, unknown or other
aggttttagggtctatttgttaattaagagactttattaagtcgaattaataaataaattaattagaaattttatttgataattaatnnnnnnnnnnaaataaatagttttgatatttaagtggttgaattggaaaatattgcatttgtgaaagaataggataaataattgagtaaaatgacaaaattataattggtgggcccacattctaatggtcggccacttaagctcaatttagccatctatttataaattttttaatgccaaataattcaaacctaaacctagaaggattcctataaatagagactgatagactcaaaactaacagcttagaataagtagcctttcagtcaaatttgagtcttctctttctctctctaatttttgaatccttctccctattttcttcttcaaatttcatccctcttagattgagtacattcccacacatagcaagttagtactcaattatagtgtgtaagactgtgaaaaatccaacacttgaaggagaattgggctcgaatctcgataatactcttcgaccgaaaggaacaagggttagagatttgagtggaaggagtcatttaatttatttaatttcgctgtaatttcgctgcaagcacgctgcaagcaatgtaagatttcttgaactgtatatgtgtttaaattctattgttttagaaattcatatttaggatgttaaacaacatacataatagtaaatccagatcttggtaaaataatttccaaaaaatggcctcagagccatggtaatgatttactttcaacgattgtgttgatttggatgtgttcatgttagtttatgtgcatatttgatgattgtatagaaattacaatttacgatgctagtttatattatattatcttattagatatctaattaatctaaaccatttaaataaaatgaaaattttgaaaattagttggatatttgaatttcagtttgaattttaaatatttaggagatttgttagatttcaaagattctctaacaacttaaattgaaattctagttaagatatattttaaatattttaatctactttttagatatttgttgtttatttatttattcaaatttttttaaaacaagcctattatttatgtgatctaaattgctataattaacttgttgataaatccaatgatctgattttaannatagttcaattgtcaatagatcttataaataatttataacaggtaaattttgtaatttctttcatctgtgataaatctagaaacatgatagggcacatccaaatcatttgacctgtgtgagattataactttacttttgggcttagatgcatataggaagctcatttaagttttaagtaattaaatggactaggttgctaaaatgaaatttcacataagtaattttatt

SEQ ID NO: 104001 - DNA, 506 bp, Cannabis sativa
  modified_base (33)..(40): a, c, t, g, unknown or other
  modified_base (66)..(70): a, c, t, g, unknown or other
cactctttccctacacgacgctcttccgatctnnnnnnnnttccataaggatattaggcacacgannnnngaatgtcgccaattgaaagatgagatagaaagtctcttcgctcgaggttactttaaatagtacatgaaaagatagggccacggatacaaccatcccagtctgcccaataacccaaacaaccaggggtcaaaacctcttcctattgaaggggaggacatcttggttatttcgggaggaccacatatcccaggggaaatcaataacgcccagaaaagatatgtgaaaaagataaagaacgagcagtcgacattttccccaaaaccttccaagaaggccaaaatagaagaacctccaattatattcacggaggaagacgagaaaaacgtgagataccctcacgttgatccattagtaattaccattcaactcgccaataaaagaatcaaaagggtgttaatagacagcgggagctcagtaaatatcctttataaggaaa

SEQ ID NO: 104002 - DNA, 1282 bp, Cannabis sativa
gttgatcacatctacgggaggcaccttgcctcctgacaatgggacattcatcattctgatgttgatgaattcgttgttaagacccccgtttgcttggtttccagccattgtgattctccttctaaatcaacaagaagtattgtcgttcccacagatggcgccaaatgttgttgaaggaattttaacctaatgaacaagtgcgagtatttaacctagaatggcgagtactcgaatcgggaacacaaatacttaacaaaaagggctgaaaagaaaaataaacacaagagaattatagtggtttagtcagatcacagtctgcttagtcaactgttgcaaagattctatctccctatttcacggtggatcactcctttatatacaaagcaagtgtcctataatttacacaaggattgtattcattgtcaatttgtttatacattgatttacaataattaagctaaaacgtaaacattattaaatgaagaaaattttccaattcactaaatacagcaacgtacgcgacttctatagtccaagttggttgttcacattcttgcataagctcccaggcttagaatgcattcgagactagttgggtctaagatgtctgcgttcttgcacagtcgcttttatggacatcgtataacgagatgatagaaccaagacatgcgagtctacatcggtttatcgaggctgttgggtcacgggaccagctcacaacatagagaatcgtgggaatactcgcatatatcatggtatatgcgggttaaatccgtccgttggtcctacataatgcgagtcagacgaatgtgattagacttggtcatatccgcatcatctcgctgagtctagtttaggcgaggtttgaactcgaggagtctctcattgacatctcatctttcctcaggaaaattgagtacacgtgcccttttactataacatattaattcattatgaacagctagtattgtgtaggactaattaactcttgttaagtttgggattttctagtggaggatgtgtttcgtctctggtcagcaataatatccaaaggttgtctagtgtctagaggctttatatcagacattattacattgtatgtattatttgtagatggacatgtgatggggtgcatgtaaatccaagcatttagtagactgataagccaggctacgggaatttgtctaaggctttataccagtgtttgtttcttttgcagtattcattgacaaatacaccactactacaattaaagcaagttttgtgatatttctttggcagt

SEQ ID NO: 104003 - DNA, 511 bp, Cannabis sativa
atatattgtagtaatatgcagcaggggagtgtgaacaagcttctacaactttctgggtttatgagacaagagcttccatttacatatcttggaatcccaatttgtgcaaggaaaattttaggtaaagagtgtgagcttctggttgaaagaatgacagctagaataaggacgtggagttcaaggaacttatcttttgcgggaagaatcacattaattaactctgtgcttattgcaatacaagcatattggagtcagattgtgattatgccaaaaagaattttgaaatccattgaagatgtttgcagggcttttttgtggaaagggcaggctgttttccatggagcaggggctgtttcttgggacaatatttgtcaaactaaaacttcaggtggattgggaatcaaaaaactagagctatggaacaaggctgcaatgtccaagtacatttgggctattgcaaataaccaagaaagcttatggcttagatgggtgaatagtgtatacataagag

SEQ ID NO: 104004 - DNA, 736 bp, Cannabis sativa
gaaggcctacgctttttatatcgtagaagtagctgaactcttctaccgagggagccctatgaacgtactccatatacatcgcttaaaaagccagggtggtgcggtaactattgggagttagctggaaaggtgatacatcatatcgtttgaggatagccgtgataaagggatggaaagggactgacaccccacatcggagaatgggtattgagattaccacatcctctgtgggaataatcgcaggattggtaaaaggaaggtgtgccctctgagtcggtttaggtctcaaagaagcaagtcccagcaggtttagcctcgtaaaggtagtgaggtctgatttggtaactcttgaaatcaaatcctcgcacgagaaaggctcgttcagctgggcgtcatcgaccgagtcagtctcgctcccttctgcctcttcttcatcctcgcctgattcgcgagctggggctgtccaatcatcatccgtctcctcgacctcgatgtcaggagcatgcctcgaatgaataaggtagtcacgggctgacaccgtagactcgctgtctcgaacatcgatggtcccaggttcagcgagctcctgcaccattctctcgatgtccgcagaagacatcggacatagctctgtacctacggtaggtgcgatctcctcttctgaaatcgaagctgggagaaaactatcttcctcctggtccttgtcaccatcgaatgtgtggcctcccgagccgag

SEQ ID NO: 104005 - DNA, 628 bp, Cannabis sativa
caagtaagtggataggggatcgccttgtcgaataccacgagtgggaaggatgggtcccatgacatggccaccatgaataatagaatagcgagcactggtcacacaagacattatcagattaacccatcgaagactgaatcccatttgaagcataaccgcccgtagataaccccattctactcgatcataggctttgctcatgtcaagcttaagtgccatatatcctttctttttatgaactttacgtttcaagtaatgcataacttcaaaagctatcattatattattagaaataaggcatccgggaataaaggcactctgagtaggggagattacctgatcaactagaggtttcattctgttggcaagcaccttggcagcaattttgtatgcaacattacacaaagcaataggacggagatcacccatggtaactgaagtctttttcttgggaataagaaccaagttagtgtcattgaggctttcgggaaaagagtctgtttcaaagaagtctctcacaagagaaataacatctgaacccacaatatgccagtatttctgaaagaaaccaggtcccatgccatcaggccccggtgctttatcaggatgcatttagaagagagcaagt

SEQ ID NO: 104006 - DNA, 567 bp, Cannabis sativa
  modified_base (509)..(514): a, c, t, g, unknown or other
tagcaaccctaatgtctatataagggttgcgtgttttagaggcaagggaggcagaaatgaaaccctagagatgaaggaggaggcaaaggaagcaattgtggcggtccagaggaagatcaccaactagttctttcttcccctttttatgtctttatgttaatttctatttcaatttttatggatgtgaacatgagttttttaaactaaattcccaatttagggatatgattaatgttagatgatatttctttaattcagttaatgtgattattagtttttcttccctatattgtgtgatttgttcttatttgttttaattacatattttagactggccatcttaaatgtgatttatgatcctaatatgaaatttgagaagtgaatattaggaatgctctaataggacaaacataagttttggtgtaaaacgagagtatttagatagcttatgtgatttttagactctgaatttaatacaagttatatgttaatttacttcagagatgcannnnnntaatatatgatttaggaccttaatgattagagaagagttagggttaatttgat

SEQ ID NO: 104007 - DNA, 2267 bp, Cannabis sativa
ccatattaatgataacagcacaacagaaaatagggaattgcataaagcaaatttttgaatcatgttaatttaaaaatttaatttagataatgaacagcctaatttaaacaaactaaaaaaagaattaatgtaaaactagtacctgtatgatactagcatgatcacccctggagtgctctgtggtggggactgtccaagtaccaggccagtgagttccatcagccatccatgtagctttcgggatctttacatcttcctccagttcatcataatcaagctcacgccttcttttcatgattttaatctcctctctagtgttataagcatcagaacgtctccgaattgactcagggagtccattaacccgaaccttaaactcatcatattcgcgctttacccgcctgcggtccctgacaaaatcagggcgtaccttattcttgtaaggatctctcttcatattaaaataagattccggatttcttggctcaatatcatgctttcggcaaaatggcacccataaatgagcaaaactagcagcttctgccatggcctcaaatgttagtagcgcaccaccatcatcagaaacataacacgccagcttctccacaggatactcagctgcaagaatagatagaatagtgtttgcagtaacaagaggcggttctttttcgggatctgcagtggatacaaacatgtctatgccaggaagatcagattttccactaggattactagggtttggtgtttcaaacttctcctttaagacattaaggtcagaaacacgattgatggggcagagttttggaagctggtcaagtagccaagagaaagcaaaccagatttcacatatcacagaaagaaaccataaccagattgcatcgtcattaggatttgtgattctccaatgcaaaaacaatccaagaaccgccattcggatcaatatcaagagcctgaaagattgtacaagtgagagagccaaagttaggaagatattattgtttctaaacaaaatttaagaaaacaaacagcgagaacaattttcatcaggaaagaaaaacaacaacctgaagctggtgtataaatagctagctactgagaatatggtgagcaataaataggagacaacaactgatactaccaatgtttattaagcacaaaaatcttgtcttgtcatattatctactacactattcaacgggaaagaaaaggccaaaactttgatttcaaacacaagtgaaggaaaaaaggcaatcgaatatgacagtgaaacatgaaccaaccagagcttaatgcccaaatcgctgtttatcatgaataaattaacaaattagaatagtggaaaaacaaaaaaaaaaaaaagcaaagaaaagaaaatggcgaaaagtatataccgatatggactgataatagcagccgaaatatgcaatttcctagtaagtggtctccactgcttatcacgaaacactttaggatcaccagcaatcccattattcccatcaacactcccgttctcagaatccttaggccacatagcgttcccataaccataacttcctttagtctcaaacaaccattgagaatgatcaaagtcattgttctgactcctcgtattcatcgaattcgaccgtgatttcgacttcatcatcgacaacctcctctccatcttggacatccccgcgccaccactagccaaagccgcagacaacgctgcaggtggcagaggcagagactgttgtagtctaccatcacgaccaccaccatgttcagtgaaatcagggtccttgtaaagctctttgcatccaggacaaatcccatcaccggttctgatggcatccctgtaacaatctctgcaaatcttatagtcacactcacatgggactatatccaaacccctctcgtcagtcatgacacgagaatcacaacccgggaccgaacacggtgacccattaatgccagccatctggggatggctggtgttttcagactcgatcaccttttctttcaactgggcacgcgtgacgcagttgtatccgccggtaaacagtgagctagacgcgtactggtcttcaactcgctgagatgccgacctctctacggcgatctccatgggctgattatcaggtgttgggggtatgtgaacggtgtaagtagtgaattcaacacctcccatatcactatctaagtcatcactgctttctcgtacatggtgagcagttggaactctgtgtggaaaactatgcttcgagccagaagccatgtagatgtaa

SEQ ID NO: 104008 - DNA, 605 bp, Cannabis sativa
gctgacgtggagatattgttacgaggagtttgttaaatcataactgacttaacaacttagttatagcagtcaccaactttgggatccttattacttagaggttgaaaattgagaacgcagagaaaagagagagattgagttttgagatttgtatgaagaatcttttgtagatgaataagattcttaggtaagactacgagagagaaacactttgagagaatgcaaatagagaattgttctcgactaattgtacttttactcttgctcaatcaataaagatgtttcggtggtgttccagaactggagtagagttatagatcacattaatttataagacttgaatcagtatatatcttggtattgattttattgttttattgttttaatcgtttctagttttaattactttgttcgtctctattttatctctgattgttagttcatgatttgttgactttgtcattactaattgttttgtgattcaatgttagttgaattgattctgtatattaattgtaatttttccacaaattagaatttggtaatcgatcaagaaagcataattaagatttttatttctgagctttgctattgggtactactgg

SEQ ID NO: 104009 - DNA, 542 bp, Cannabis sativa
ggcctactaccccatgctaaaaactttctctcatgtggcattcactttgctagtgtctcttacatctcgaccttacactcttagcaaaagaggttaaatcaaccacctgagcatataactagaaaacccgtagttactaaacaactatacccacattccgagcgatatacttttcccaccttcaactaaattagactccctagcggccttaacagccgtttcttgaaaacagaacttggacaatcggtccggtttagtatcattctccatccccacactgtccgggatcaactatgcaagttctactaccttgccactcggataatctcttacttcatagcattcatttgctctcagccctatggtagtggaagatttatacccacaccacctaccccgagcctaacaggctctcaattttacttactagattaactcaggtacacctcctagtgtgatcattcctttctcatagttaaaatctttctaactagaattaatgctaataagcattaccgcacatgcatagacatacttagcaa

SEQ ID NO: 104010 - DNA, 1579 bp, Cannabis sativa
gaattcccataaagatagtatctgataatggaacccaattcgatggcgacttgttcactgagttctgcgagaggaacaaaataattaagagcttctcatcagtatccagacctcgagagaatggacaagtggaagttgttaataaagccttaaaggatactatcaagaagaagttagacgctgccaaaggcaggtgggtcgatgagctacctcaagtactctgggctcacagaactaccgagaagacggcaacgggacacactcccttctcgctagcatttggctcgaaagcaatgctgcctgttgaagtgaacatatcgactcacaggagagagttttataatcaagaagaaaaccaagaacttttaaagttatccttggatctacttgatgaaaaacgaacttagtcgcaagtcactaatgcagcgtatcaacaccgagttacaagatatttcaacaagaaagtcaagaaaagactattcaatgttggagacttggtgctaaggcgggtatttgcaaacacgagggatgcatccgcaggagtgttcaacccaaactgggagggtccatatgtaatcgaagcagtagttggaattggagtttacaaggtggctcgacccaatggctcgcttataaaaaactactggaacgtggaacatttgcgaccatactaccaataaataaatgatgtaactcacattactaatgtaatattttaatttcagttatgaataaagaaaatcatttctattatttaagtaattacaaagttttaatctttaaaattacttaaggggcatttgtgtatgattaatcagaattcatctgaaaatacatgatataatgcaaacccaccacttcaaaaaaaaaaattgaattttttaaaggttcttgactaaacctttttaacgaaagaggggtcaaaatgatataacttcctgaccaaacttttttacgagagaggggtcgaattattatagcatcctgatcaaacctttttgacgaagaagggatcaaacaactataatttttgattaaaaacgtatctgacgggaaagggaaatcaaaagttataacttgcgtataaatctgaatattaacggttcgctcaagataggaaagtactaaacgagacatcaagacgtcttgataaaaatacttaaacctaataaatggatagataatttaactattcatacaagcaatcaaaaatatacaaagtgataaaatcattaaaagtatattcaagtttgcttaaggcagattataactgccatagcgaggcagaattgacaactgctcgaaaatcaaaagtttggtagataactaactgcttaaacaagaaaattacgagcaatggaaaaactcaaaaagtactttacatttgatcaaaatataattgcttacattgtgaataaaaacgcaagcaaacacaattatattaagttcgaacaaagtacaaggcatttaagataagaaaaaaccccaggttggtttacaaacttgtctttacaaaaatgtcgttaggggcaaaccattaagccattttctgtgaaagtacatcacgggacaaaatcgt

SEQ ID NO: 104011 - DNA, 1155 bp, Cannabis sativa
aactaaaacatagataataaattagttaagaaatataagtaaaataatttaactaatgatacatgccacacgatactatttttgtaaatagcgggtctcatctaatattttggtgtatatattttgaagcacattttctccctttttaaaatagtgaaaaaccatttcaatacttcatataatgcccctattctatataatatgcaacaatattcactacctaataagtataaattttaggggaggtttatatcatatttttgtgctgtagtactggtacatcatttttcctgaaaagtaaaaacatggggtggatattcttgttttgtataatagtattaacaatcctctcaattaatttttgaaaacttattataacaaaattaaaaataactgtttttacactaatgtaacaaactatttaaattctgtttttgtcgtacaataaattactcaaaatccattgttactataataaacaccattgtaaaaaaatagaagaaggtaataatttgtgaatgtataaatataaataaacataagaaaagaagtaataaaagtgtagtagaggcaaattgaagagagagaggttgcattgggtggtattataagtataagtataagataacataagaacgaaagaggcaaagggtggccctctttcccgtactcttggattggacttttctggaaagtctttccttttcttactattattctcatttccttttctgataccaaacccaaacccaaacccaaacccaaacccaaacccaaaccaaacccacctcttctctcttctcttctctctctcttttttttaactacctcctcttcactttttactatttacacaaatctcccacttcaatttacttttttttttacacttttaattcaagtatatttatatttatatatatgcacaaacaaacacaagaatttaagcatatatatttatattattaggcaaaggcagtgttctagttaagtgcttgcgctgtctatttccatgaatggtagtattatagggagaggtcgatgagagagaaagcttttcgatttggttaacgtgggaaagttgtgtaagaaagagatgcttctttctttccaattttcctcccataaatatttcatattctttttttttttttt

SEQ ID NO: 104012 - DNA, 567 bp, Cannabis sativa
ccaacaatatgtcccagaaaggacacttgtgacagccaaaactcacactttttgaactttgcatagagtttatgatctctcaatcgctacaggaccatttgaagatgttgcccgtgttctgcttctgaccgagagtacacaaggatatcattgataaatacaattacaaaattatcgaggaaatccttgaataccctattcatgagatccataaaggctgtcggtgcatttgttaacccgaatgacataaccaggaactcataatgaccatacctggttcggaaggctgtcttcggaatatcctcttcttgaattctcaactgatgatatcttgacctcaaatcaatcttagagaataccgtcttgccctaaagttgatcaaacagatcgtcaattctaggcaaaggatatttatttttaatagttagcttattcagctctcgataatcaatacacatccgaagagttccatccttttctttacaaacagaaccggagctccccaaggtcacacactaggccgtgttaaccttagatccaacatcccttggagttgtatctttagtt

SEQ ID NO: 104013 - DNA, 973 bp, Cannabis sativa
tctcttccataaacctgtgaatcagctagcaaaggagcatgtggtgtatgtaatgttgtgaatttctggtcaacttttttcaaaccaaggtggtctgattgttccaaaaaatcctttagactatcaaggatctcttctaattcagatttcacagcactcatttcaaatggatcattaaagacaaagctaaagtgcttacttgctgatgtactttcgggtccatccttctccacctcgagtcgtagagcttccgtaccaatcttgtccatcacgtaatctgcttcatacaagacttccttaagctcgtcaagccaattcctcacgttgttgtctccaagttgtttctcctcggcatcattcaatagcgcattagccgaaagcagcatagtcttcaactttttgagcagcttttgattgagcttgtctccatgaaagaagtgaaggacatctttagaagcaagcctatcaaagaggacattgatgaaaccagaaagaagagctcctcccaccattaactcagccatgattttcagtttaggatcttgagagagaatcagttgtagtgtatagcaaagaagaaaaagaagtatgatcgtttggaaagggaaagtgattcaataattcatttgaacatagctaattaaagttgaattggatttctttgttcatatggcttttctttattacttttactttttctttttgaataattagtggctacgtacaattagtgattgttccaacaaaagttttgttttatttgcccatatttttatatttgtatccaattaattagttgatgatagattgaaagagtagattgtttttttttttttttgaacatgaaagagtagattgttgacagcttaatattctatatatgtagtcaatatttatattttaatattactagggaaatttgattttctatacttacatatacctaatattttatttctaaactaatacatat

SEQ ID NO: 104014 - DNA, 534 bp, Cannabis sativa
gttattaagctataaattattaaaattaactttcgagtttattaaatacaaaatacgggcgttacaatataattaatataaatttttataataaatcattttattcacttacataatcttttgcagcagcttcattaacgaaagtgccagacggttttttcacatgaacctccttccatgcttcaactacatgctctccgggaggacccctatacgaacataaacaattaagttagtttattataaataaaaaacatatttaacaattaaagaattaatatataccattccgtggcgtatggaagccaacgattttgtgccttgcgttgtacgatatttcattagttgccgattcgctttatttttacttgagcgattcaaaaaattttcgctaacaaacaattcacaaatcggcttccaagtctcgatattcaagtggtcaggagggattcccaaaactttctcccaatcttctggtttagtgtaatgttgtttaaaatgcatgtgtcttattgtctttcgctcactatacct

SEQ ID NO: 104015 - DNA, 562 bp, Cannabis sativa
tttgtaaaaatattttctaatatacatagagagatcaatataaaatacgtataataatgaaatttattcttttattgtatatataaaatacgtatataattacatctaaaaagcacactaatatagccgcattagctaaaaaaaattctaaaaaatcaaaatctcaaaccctaattcaaaaataaaaaaataaaaatacattactcgcctaactacaaattaagaatattgtatctatcactatcattatttttttaatatatatatttagacataattaattctttgatcaaattcaaattttattaaaatattttctaatataatccttatacatagagaaatcaatataaaatacgtataacaataaaatttatttttttattgtatatataaaatatgtatatatataatcacatttaaagagcacaccaatacagccgcaataactaaaaaaaatttgaaatatcaaaatctcaaaccctatttaaaaaattaaaaaataaaaatacattacctaattaaaaaaaaatttaacatacatgtattgtacttaacatca

SEQ ID NO: 104016 - DNA, 710 bp, Cannabis sativa
tttttttttttttttgttgaattgaaagaactcagttgaagatccttttgatatcaggtttgtttagctctatatatatatatatatcttccctgtctttgcatctcctttgtgagcttctgctttctggttctgtgaagttggttgatttggtctgtaaggaggtaagagaccattttatttttctctagattttgtgaagttgtttatctaattttgtgtaaagttactacgttagtattttgatgattagcttatttatttaggggttttggtcatgttatctcttgttttattcttttttcataacctctttcatttaagaaaacatcaagaagaaaagggtcttgctcttttagaaaaagttgttcgagttgtttttctggctacaatttgacatgtgtaccatttgatgtaggaagctaggttggccttcaaaatatctgtataatagtgtgattcatctatcaagaaatttttgtatttgcaacaatccaagtcggtactggactatgggaaatgatgaagagggaaagtctgctaaatccgagaaaaattatccgcctgcaaaccccggtaagctgagggcagaaatgtcctttttctgacttagaattagcatcagtgttgtttgcttcattataatgtatgtttcttttattctaggtgcatgatttgattttttttttctttttctgctatccccttcc

SEQ ID NO: 104017 - DNA, 670 bp, Cannabis sativa
aaaaaattaataaaaaattactaaaaaacctaataaaaatattaaattaattaaaaaatatattaagtttacttaataaacctaaattattcctaaaaaaatatttttaaattttttatttataaacatgtatcttaaaaaataacactaaaattatttaataaataatttaaacaaactaatttttttttgaagaaaaatcaaacttatttatatttataaactcatatcttaaaaaataaagaaaaataattaaaaattcaataaaaatacaaaattattttgaaaaaaaaaatagaaattaaactaaaaaaatattatgtttactttaacaagtctagatttttagagaaaaaaaatagactcaaacttgttcccgtaaaatttagttttcataaaaattgaatttttaatattttttttttatatcaaaatagattttttttaataaaaaaataaatatattttttcgtttttaattttcttaattattcaaaatgattttttaagaaataaattaattttttaagatttactaaaaaaatattgtttttattttgaggagatacgatttaatagttgtcaaagtttaagttacaaatttactaatttacaaagacatgtcagtatttgaatgaaataataagacaaaatctaacagaaggactaa

SEQ ID NO: 104018 - DNA, 628 bp, Cannabis sativa
tgatagatcaatcaactttgagtatgtaatcaggctgaagtatcaaaagagttgtacaccatcgcagatctctctaatcctacatgttattcttatcctagatgtattgttaacggtgttaaattcttagttgaggaccgagatgaaaattgtaacacccaaaacagtggtattttggtgcctggagtggatggtaacaatttttctggcgtactcaaacaagtggacaagttgacttacttcaaggattgtattattattattatttttaggtggaagtggtgggacaaaaaaaaaggtaataggaagaaagaagaaaaaagaagtggatggttttttcactagtgtctgcgttgctcgtgaattgtaccaaaatgaaccattcatacttgcatcccaagaaaatttaatatattatattcctgacccaaaagaatggagttgattggaagcttgtcaatgcttaaacaccttgcaatgtttgagatttctcaaatgaggatgatgatgagactgttgggttttatgccctaaataacacccatgggtttaaacacaattactagaatcatggatgtcctgatcgtggccttaagaaaagttggaactgttaaccaaggtttgcatg

SEQ ID NO: 104019 - DNA, 535 bp, Cannabis sativa
ttttagcattttagaaaccaatttctgccttgttctagccctagccgcacctccccctttccctctttctctcaaatttttgctttactttggttagttcttgaaattgagttggtggtattgaagcttgagagttaaagcttggttttgtaaaggtttgaggtaattttcatctttgattctgaatttaattgctcgagcttgagattgtttgaatatgcttaagtattgttttgctcttgagtgcatgtttaagaaaatagatgaaattgtgatgcttttgcccttctttttagctagatgggattcaaatttatgttgtgattaatggggaacttggattgagtttttagtgagtgaatttcagttttgaatcttatttttataagctgaaggtgtggcattttcctcaagtttaaaggtttgtattttaaatgaattttgctcatgtgagaaacttgttattgattgatgtttaagctgaactttgagagttatattaatggatgttaatttatgttttaaactctctgtg

SEQ ID NO: 104020 - DNA, 655 bp, Cannabis sativa
  modified_base (308)..(310): a, c, t, g, unknown or other
  modified_base (483)..(496): a, c, t, g, unknown or other
tatagggtttgaaatattgaagagacaaagagagaggaagggttcgaataaggtagagaagatgggtcaaaattttgactgaagggaagtgtgttcatcttctttcgatttgaggttatcactatatatatataggaatccaactaggtttaggtttgaattatttggcattaaaaaattgataaaataaatggtaaaatagggcataagtggtcgaccatggatgtgggaccccactttgcaattttgccattttttcaactatttatcttattttcccaaaaatgctatttttccaattcaaccannnaaatgccaaaactatttatttaattattaaaattaattatcaaataaaatttccattaacatatatatttattggactttataaagtctcttaattaacaaaaaaaatttcttcacaaataagtcctagcttagtgaaaattcataaaccagacatagtctaattttagaatnnnnnnnnnnnnnntaaaatcaattaactaagtcttacgagtagtattgtctcaactagtatggggaccatgggcctatacaaccaaccttccaataagcagaactattccctaacttattaattcatcattgcatccaccatagaacttggaatttcactctcagttatata

SEQ ID NO: 104021 - DNA, 633 bp, Cannabis sativa
gttgttagatgctttgaatccacacttgagtgcagataggtgttgccccccaggcgtgacgagggcaatccctggaccagatagttgatctgtggctgacccatccacatgtagtttccaggtcagtttgtcctcattgttacttggctgaggtattggtgctagctcggggttgctttgttgtatgatttcttttttgcctgtgcattctaccacaaagtcggccaaggcttggccttcgattgctgttcggggttggaaagtgatttcgtactgacccaactctactgcccacttgagtaaccgtctagaagcatctggcttttgcagtatttgtcatagtggctggttggtatatacccgaataggatgagcttggaaataaggcctcaacttccttgttgcaagaataaggcagtagacgagtttttctatcaacggatatcggccctcgtcctcaatgagtcttctactaatgtaatagactgggtgttgtacgctattctcttccttaatcagcacggcacttacaccatgttccgtgacagctaggtatattcccaattcctcgccgtgcagaggttttgaaagtacgggaggttttgcaagttgtgcctttagctcttcgaaagc

SEQ ID NO: 104022 - DNA, 4132 bp, Cannabis sativa
gtagtacctagctttaaaaatcttactgacaagtgagtccagacgactaaacaatctccatccttgtttacaaagcaaactcaagttaaagtcatggaagttgcgaaatcccataccacctttggacttatgtaccaagaagaagctttagcaccagaagtcatttcgtctcaaattctctcagttgttttattctctttctctgtaaggcttttctttacttttgaaaacatgcattcaggaagatctgcaaaaattgacgtctagggtttggcttgttgattgtttttttttctttttttggcttgatcttcgattttttgttggttttaacttttagtcttattgatcgatctacttgtataccttacgttccataatccaatcttgtgctcggtattacatattatctgtgtgctgattcaagaaaaaaaacaagtgttaaattctggataattgatttggggtttaggaattgaagaaattttgggatttgttttttctttttcaaaattgtattaagaattttgtggtatttggtaatatggcgacatgaagagttgatctcttgagaagaaggtatatctcatattaaattattttctttattatttatatatttttttaattaaatatgtaaagtcatataaattatatttcaaaaactatatttattactatcttataaaatcatattaattgtattaattatttttattttttatcaaaaaaatgaaatttcattaatcacttgaacacatcagctacaccagcagaaacctgctacaaaacactgctcacacgagctacaaaatcacatcagcagcctataagtaatttataattacaaccttttaattttctatctttaagactataaagcctacatttaacaacactttgaccttcctttacagttacaaccactaaaaaacagtaatctttatagacacaattatttctattttttcataaacaataaactgttgcagcagtcgtggcatacatgatgtcctccttcaagcttcttattctggtttttaaccaattcagccaacaaacaaaatcaagaggccaagcattgaatcctaaccagctgaatatcccagcaacaattttctttgaataacaacaatcaaagtaaagacgcttatggctttcctactgcaaaccacaaacaggacagctagaatctattacaaagatgttaaatcgagatagctgatcctttgtgagaagctagctgttcactacctgccagaggagaaatctatgtttgggcaaggataacttgcacctaacagctctagtgttcaagaacaaatctatcttaagcaaactattatacaagcgagaagctttgaatttacatgtaggttgttggagctaaaatttgttctcaacctgctaaacttcctccaataccaggcggtgttaattggcagcttataactccatgtgtcttcccttttcaagtagactatgttgacccacttgacccgaagaacatcgtgcttttgcatgactacccaaagaaacttggccaggtttgctcgatttcacattgatcaattcctaaagcctaagcctccaaatttttttgggagacaaaccttgtcccaagaagcagtatgaatcttgcttctctttccactttgatcccataagaacatccttcaaagtttttccacttccttgacaatgctttcaggaaggataaatatgttcatctagtagtttctgagccccaaaagaacagtctgaatcagttacattctactagcataagagagatgcctagtagcccaattatgaaggtgtttttttaatcttatccaagatttctccacaattctccattttccacttagtaggtctcaaaggcactcctaagtatttgagagggaatctaccttcttcaagacctatctcttgagcaattttttttctttcaaaaggttgcaccccaccaaagaaaatctgagatttagccaagttcacactgaggcctaattgattgcaaaagtcatcaagagtagttttgaggtgtctcactacagtctgggtgcctttactgaacaaaatgaggtcatcagcaaaactgagattgacaagattcagacttttacattgagggtggtacttgaacgtccctttttcagcctctttatgaagtctcctagttaaaaattccataacaagcacaaataacagaggagacattgcatccccttgtctcaaccccttctttccttcaaaactctcttgtaacctaccattcagcaccaaattataggaagtactcctaatacacagcattatccaattcacaaaccgagagggaaaacacaaatagtttaaccacttttcaagaaaatcccaacttacagtattataagctttgctaaggtcaatcttgattgcacacctagctaatgtattcttcctaccataattttttataaggtcttggaagatgagaatactgtgagcaatcgatttattctgaatgaatgctccttggttttggttgatgaccataggaagcaccttagcaagccttaaacaaataagcttcgagatacatttatacactgttgaacaacaagcaattggccggtagtccattgctttagaagggttctcagtcttggggattaaggtgatcgaagtttcattatactcctttgggataactccagaatcaaagaagattcagatagcaagaaaaaattcttcttatatctcacgccacattgacttgaagaactcagtgttaaaaccatccagacctgttcttttagagctaggaatgctaaataaggccatcttgatctcttttttggaaaaaggttttgaaagagcaagtttcatatcaagagaaagcttattacccttcaaattgaagatgttcacattcgcagtaggcaagtgatgactccccatgtaactctgaaagtgattgataaagtgcttaaccactttaggatactcctcaaccagctggcctttctcattagtgaagtgcacaattctgttctctcttcttttctttatgcaagcacaaaagtaggcagtgttgtcatctcccttcttcaaccagttagctttgcttctttgcacaagaaatctatgaagcaacttttccttgtcactaaactccattgcaacccttttttcttcctctaatttccccaaatccccaggattagcttgagctgctaactttgcttcttgtaatcgagctttgacctctgcatgttgcacttcaatatctccaacttttttgttaaagatcctaagctgatgctttaatctcatacatttaatgaagagccctttcaaaccattacttctgaccaatttattccaactatccaagataacttgcttatagtctttgtgatgcacccaaaagtagaagaacttaaagggtttgatgccaatatcactggcctttgcagaagagacaatacaagagcagtggtctgaaacagtttcccagctcatgttagcattagagttgggaaagatgcccaaccactcttcattttttagaacataatgaattcttgaaaaaacccgtcattcgcctcttggttgttgaccaagtgaaagaaggctcagatctttgaagagagtcagctaatcccaaggctgcccagttggttgcatcctcaatttcattttttgacacctggtttcctccacttctgtccccaaaatcaaacaccgcattgaagtcctccattatgagccaaggcttaacagggaagttaaggcaagacagcccatgccacatctctttcctttcactaaggagtttgaaccatacacaaaagttacacaaaattctttattaagactgatcaatttcacaagacaatggacatattggtcggtttcgtccagaatattcactttaacaaacttattcctccaaataactaacatcctaccctcaatcacaagatggtgtggagctccagccactaaatttagagttcatgacctgagctactttattccccctcatttttgtttctaacacaactcctactccaatatttctcaaacaccataaatctaacactacctcttgcttcttattactattaaggccccttatgtt

SEQ ID NO: 104023 - DNA, 501 bp, Cannabis sativa
  modified_base (283)..(303): a, c, t, g, unknown or other
ttttctatctatttaattagatttttttttttcatttttacattaaatgggttgggattggttcatcagctgaaaacaaataataataaaaaaagtttttcagcaaaaaagtgataaaaaagttgactttgacttaaatatttttcatataaacatgttttgatttagtgcaaaaagagatattgtttgatattttctttaactaagtaactaaattaagcatagaaattcaaatttctcttttattattcgttatcggaccaaaatttaatggtttaatatnnnnnnnnnnnnnnnnnnnnnttaaatttatttagtacccattaatgagtaataccgattgagaagtattctatatatatatatatatatatttatactagttaacaatgccgcgctttgcgcagctcttcaaatatttttaaactatattattttttaaaatacgacaaactaaaaactaactaaagactaaagagtcatcatcaatctaaattaata

SEQ ID NO: 104024 - DNA, 838 bp, Cannabis sativa
gaaacaataataagagagattaacagtgaggtgacattatttaccggataaatagctattatataaacatatattatatcgtatagtttcatttaaaaaaatattgtttaattttttgagtttatttatttgttaacgtttaacgttaacagtctgttaagttaatcgtgtaagactaaataaaaaaaaattgttaaactaataaatcgttaaaccaagaattgctgttagatagacacttttaaactaataaatcgttaaattaagaattgcggttagatagacacttttaatatatataaaaagatagagatattatataatctatagagatatacaaatataggctccctacaaatatataataaaataataaaccgccacgtatatagccagtttgaggaagacacaaacataaattgttttttatattcatctaaaaatctcactaaggaaaggttaattataaattttttgacaaacggatcaaaatatagatagcacacatataaagtctttggtcgcttatttatatatatatccttggcgaccaattaaccgaaacatacaaatttatatagatatacacatggatttgatttgacacctatgtatttttatcgatatatataaaaattagtataataaccgtaattaacacttgcttatatatatataattacatgctttaatcaagaaaaaactaagtaagcattgagaaataagaaaaatggccactactcgagatggtgttctgatcgtattttgttgttgcctttatctcttatcggccggtacgtacataataaagtgtatttttctttaaaattatatatat

SEQ ID NO: 104025 - DNA, 514 bp, Cannabis sativa
ttgtagactaacacataatgccttgtacttttcaaatatttcaaaatattcttaactctagtccaatgttcccctcctgggtttgtctgatacctgctcacaattcctactgcatagcaaatgtttggtctagtgcataacataacatacattagacttccaactgctgaagcataaggaacctttccaatgctctctatctcttggggatcagtgggacactgttccttagatagacagatactaggtctagaaggcataactgcccctatggtgttagtcattgagaatcgctctagcaccttatcaatgtaagctgcttgggagaaagcaagtgatctattcttctggtttccaatgatttgaataccaagaacataaccagcttcacataaatctttcatttcaaattgagtgttaagcatttccttaatgttagtcattttcttgatattgttaccaataatcaaaatgtcatcaacataaaggcctagaaatactaccacttgattat

SEQ ID NO: 104026 - DNA, 577 bp, Cannabis sativa
aactctcacccatgcattatggggttgtgctaaagttaaaaccatttggaaacttgttccttggtatcacaaatgtgctcatttcaagaatggatctatgtttgacataatggtgactttaaaggatcatcttcacaagagtgagtttgaagaagccatcaaaataatgtgggccatttgggaaaaccgcaacaaatattggaacaaactcccagtcatgaatgggattcagttgttggattggatttccacagcctaccccgactcgagaaataacaaagagcagcctatgaacatagacatgaagcaccagcaactaaagaagtggcttcggccaacaactggaaacatgagcgtaaactgtgatgctgccatgaataatggcactgctggtgtgggcacaggcttcatttggcgagactatgaaggccacttgctgttagctggtatggtgtatcaccaaagctgctgctcggtggaaatggctgaagcttgggcaatcttggaagctctcaagcaccaacctcacacagccaacatggcttttgaaattcaatcggactgcaaaaagattgtt

SEQ ID NO: 104027 - DNA, 564 bp, Cannabis sativa
atatctttccaaaagtcactcaacagtaagatgcctccaagtatggccgtatattggccttcttctatcatgcttttgaccttggtggcctcagtaaggaactgttgaatgtagtcctttaaaggttcatcttgtctttactttatttcgacaagatcctctagtcgagcaggtatttgtcttgaagtagagaaactgaatatagaactctcttgagagctcttcccaagaattaattcttcctgggaccagcttgaaatacctttgttgggctatttcagctagagttgccagaaaaatttggcatcatacatctttagatacttgttggagatccatttggttctcaaagtatttcaggtgtactaggggatcttctttccccgtgtacatcatccaagtcgacatcttgaattttggcaggagtaaggcttttatatatgctaagaatggtgaccccctggatttgtttagctcaagttcttaaggttttggactagctaggcccataggcatgtctcgtatttgatccaactgtgcttgcacagaagaatttgttattgc

SEQ ID NO: 104028 - DNA, 681 bp, Cannabis sativa
aagatggtggcccgaaccatgatagacaatggagcctcttccaacatcttattcaagacaacgtatgaaaagatggggctctagctcaaagatttaactccttgtctccaaaccgtgtatgttttcccgggccaaggtgtcgcacctctagggcaaatttgcctacccctcactgttgggcaagctcagaagagcataactataatggcacaatttctagtattggacgttccatcagcatttaatgtcatgttaggccgaccagctttatatgacttaaaggttgtaacgtcaatattccattcatgccttaagttcctaacaaagaatggggtggggtgcctaagaggaaaccagcaggctgctcgggaatgttacaaccttaccataaccaaggctaaaaaggaagtatcctctagccagagttcggacaagggaaaaaacattgctaaatagggaacctcccaaggcgaggatgaagatgtggatcctcgacttggggacccaagcaacaatgttggaccagtggaagaactagaagagattgaaattgacccgaatattctaacaagaaagcttaagattcgaaaacgtttgttgcttgaagtaaaatcaacattgataaaatttttgagagcaaacctagacatttttgcctggtcgcatgaggatatggtcgga

SEQ ID NO: 104029 - DNA, 699 bp, Cannabis sativa
  modified_base (176)..(188): a, c, t, g, unknown or other
tgtcaacatagtggaaagtaatcacgatttgtgtgatttaatgtattcctatgatttatcaatacacaaggtttaactgataggataatctacaatgtagtttactcgcaccatagataagtgttatgtcctttccagggcattagttaaactaagcttgggttggatgtatggannnnnnnnnnnnngggaccgatattgaacttggataacatataataaaataaccgtaaaatctattcaattcaatatcacctagtttatcttagatcaaaagatttcaatcctgagatggttagtactagtttagttgcattatttgtgttcttctatctcttcgttaaagtcgaccaatcgttcttctcgcgacatatagattaaggacatgatagttcaattgagtgggatcactaatgataaatacagaatctataacttttatccaaacatagaagtcaaacaatgattttcttcgagcttggcatactagagataaatggttgagtactcatttctgtgattatattagttcactgaaatatcatttataggtagcctagtgttttaaggataaaatacaatgaagggtgtaacgaaaaatttgtccctactcaatgtagatcatctatagaggatcattgattatgaagattataacaagtagataactcatagcgtatctatatcatggaatatata

SEQ ID NO: 104030 - DNA, 531 bp, Cannabis sativa
  modified_base (144)..(147): a, c, t, g, unknown or other
cttaacagaattcttaaagaaaccatctatatggagcaaccagaaggttataagtttccggggcaggaagagaaagtttgcaaactcaatagctagtcaattaatggacttaagcaagcttcttgttcttggaacaaaaggttnnnngaaataatcaaaacctacgacttttaccaaaatgaagatgaaccttgtgtttaccaactcaaggataatcaagtggtagtattcctaatcctttatgtagatgacattttgattattgtaacaatatcaaaaaaatgactgacattaaggaatggcttaacattcaattaaatgaaagatttgaatgaagttgcttatgttcttggtattcaaatcattagaaaccaaaagaatagatcacttcttctctcgcaagtagcttacattgataaggtgctagagagattctcaataccaacactagaggggcagtgatgccttatagacctggtatccatctatttaagaaacagtgtcccgctaatcctcaagagatagaggaca

SEQ ID NO: 104031 - DNA, 663 bp, Cannabis sativa
  modified_base (622)..(638): a, c, t, g, unknown or other
ccgccattcacatctccgagaatctcgtattccataaaagaacgaagcacgttgagattgactgtcatgttgtccgagagaaggtccacgaaggcacattgaagctaatacatgtcactaccaaaaacaacaaagcaatatttttacaaaacccctttttcccacttattttcatacacttgtaatcaagataaacttaagaaacttataacgttcatcttgaagggggggtattagatattgcttaggcccattacttaagcccacttgtttattgggctgcctaccacatatatatatatatcctttatttgtacataatcgatttaatcaataaaaaaaagtcacttttgacttcagctttattttcgaatagagagtttccctctctaatactctaattagggttgtacatcggttggttagagcagtttatcctatatattttctaacccaatctaaagttcgagttgctaaaatttaaatgcaactcgcccaatttaaaaaaaaatatatatatatataaaccgaccaacagtttgggcggtttggttgggttagctagcccaaaccgaccaaacttttttttttagttttaaagtcaaaatcaataaaaattaannnnnnnnnnnnnnnnnatcacattccaccaaagtacaacac

SEQ ID NO: 104032 - DNA, 1062 bp, Cannabis sativa
tgataggagtttattgaagtctcctataactagccaaggagatagaggtgcaacatccttacgtctttccaaaagagtctaagtatgaattctttgctagatagaaggggctccataaaatacagtaaagtgccatcttgtgttatttgcaaaggcaatataataatcagagacatttgtattaaaatttaaaagagatacatctacatcatctttctaaagcaacatcaatcccccttctaaatctattttagggacttcaagtttattattgaaatttaaaacttaagtgagaaattacattaggacataacttagtttctattgaaaaaatacatgtggagattactctttaacaagcaaacaaagatgacaaaatgagcttggattcccaagtcacgcgcacattccaactaacaattttcatgattgatcacgagattgagtttcagcctctgttgcattgtcaagaaaaccagcaaaatctataggagcaatagaaactttctggtttggatcttcttcaattgacaagattgaagcaagcatggtaaattgattaccctcgcatttcttaagagtatccttaagtgaatcttttttttggttgtctctttgggttgccattaggaggacaatttttctttccttctttctccatagagtagagacaataaccgatagaaaggcagtggcattggtaaaaggcatactcagagcacatttattttttgtcataacgttttcaggtaatggtagataagttgcaaatgtattagagaaattattaataatattcattaaaaattttgacatgtaccaaatcatactctttgaatttttttaggagttaaaaattctcttaaactattgagattgttggattgaatttttttaggagttaaaaattctcttaaattgttagatttaaagacttttttctaattttagtaaagaaaatctaacatagataaaagttcaaagggttagatttagtacgtaaaagttagagatatataattatttttaccagtttaaaaaatttaaaaatataatttgata

SEQ ID NO: 104033 - DNA, 854 bp, Cannabis sativa
ttatttatttccttaaatagaaatttatttccttaaatagaaatatatttcctttaatataaaaatattcttatatgattaccataaaacatttgactgttaccaatgttaaattgatcatctatggacttttttttttttttttgataagtaaaatctttattgaaaaacaaaaaagaactacctcaaaccagagcaaagagagggggctatatccccaatacgacccttacaatccatacagttaattcttgcccactgagccaatttatcagctactaaattttcctctcgagggatatacaacacttcaaacttacgaaaactcttacacaacctaaggcactcatagaacagaggatatacatcccaacaaaaaggcatacaacccgcctggaaagcattagcttcagccattgagtcggtttcgatgcgcaccatttcagctccatactccactgccatttgtaaagccaagttgattccctgtagctccccttccataacgctatgaacctttccggtcttgacagcaaagagatgatcttccaaaagagctgcagatgcaagctcctccgaatgagacctagagatacaaactgctgcaaaatcaacctgttcctcaaccacagaagcgtccactcgaaagcagcatccaccaaagtgcatatgttggtgaggtttctccccacccaactcagaaggaatatccacacaagctgaatagtgagtcgattggacctcactataccgtcgcatacagtcaccatagatatcttctaaactacatctcctctctttgtgtatcatgtcattgcaccatttccacatcgtgttgttggaaattattttac

SEQ ID NO: 104034 - DNA, 506 bp, Cannabis sativa
  modified_base (185)..(185): a, c, t, g, unknown or other
tcttgaataagatagactcatggagtatgcagatttaactgcaaaattacgtaaaatacctggtgttattattatatttattatacttattatacttatttaatctttataatttttatgttaagtttattgcgaaaaaggattattattagttaacgaaaatctgcgttaacagtttggtgctntcattgagagcctacgtgataaaactcagaaaaatccctccttacaaacaaaatctatccatggttgatcataatcaaaacgataatagccgccctgaagagactacacattgtcctggcaaagaaccaatgggttctcaaaggccacccacttttggaacaacacattcaagaaggaatcatggtggtaataaccaaaacccagaaggaaggaatgaagaaaccaatgatactacagggtatgtacccagaagtgatgatgcttatgatcccattagatatgtactattattagatttggaaaatcgacaactccagcaa

SEQ ID NO: 104035 - DNA, 540 bp, Cannabis sativa
gtggtttggggtttttaggtttgggggtttggggttaagttattttacattaggtgtttgggtttggggttttgggtttttaggtttgggatttaaggttttggggtttgggattaacggtttgggttttaatgtttagagtctttggcttttggggtttggggttttttgactaggatctagagtttaggatcttggaccaagtatttggggtatgaggttttaagtgtggggtttggtgtttgggttttagggtttcgggtttagggttagggtttggggtttgggatttagggtatggtgtttttgtgtttggggtttttaggtttgctgtttttgggattagggtttggggtttagggtttgatgtatgaggttttaagattttacggtttttgggttggggtttgggatttgggttttagggttttgggtttgaggttttgtagttttggcatttggggttttggggtttggggaatcgttatgggaatgggaatgggaataggaatagcaattggaatgggaatgggcatgggt

SEQ ID NO: 104036 - DNA, 570 bp, Cannabis sativa
ttttttctattaatatataacgtacgtacgtgtgtacgtacactcttagaatattgaatatatattaattaattatagctaaccttttaaaactactaactaattaattagattgaactaaattatatattactatatattatagtgaaaccatatttttatttgtactcgtgaaaaaatcttagtacatacctacctgtggatatatatatgcacaaataatcatcatacatattacatatatatatacattaatattattaattttgaataaaaaaatccaaattcatctacaacatctatatatgaatggatattcaaataaaataaagaaaaataatttatttatatatagtacttttttatttgttattggtacctaaggtggatcaactgatatatagtgtaaatctatgtatatatatgtatcgttattgataatgttaaaaatattatttataggaagatgaggtttgatttgtgggactatatatatatttgctcatatagcaaaaaaatcatactcatatagacatattatttttattattttgtaatttagatcttctt

SEQ ID NO: 104037 - DNA, 929 bp, Cannabis sativa
tggggattttgccacaaaaaaatataagggattaagtgtataaatattgaaacctaagggggttttgccacaaaaaaaaaaagataagggattaagtgtataaaagttaaaacataatgaggttttgccacaaaaaaaaaaaaaagagggttaagtgtataaaaattaaaacataaagaggtttgccgcaaattgctcttagaaaaaatattactgtaaattggttattattcttttatctaaatcttaaactatttattaattgtaaatttaaaacaaaattaataattaataattatttgagatagagcacatgtctcttagtcacatattaaccatagatttttagtgatcttgttagatctaacaaaatagcatgcatttagcataacaaaggctgtacacacataacaataacataatgcaaattttattaacaagtttgtgttctcttaatttacaatggatggttgcttataagatatttatttttcaataaagatatgtgagtacaagtcctacactaatgacaatcttgttgctgatgtaaattttgatgacaatgtagacatgttagataatgtggacacatttttgacaacaccaatcatttgaagatcgtcaaacactaaaaagaacataatttactaaattaacaacaccaaaatgttaaattaacaaaataattatgcgaacattatagttgcaaaatataaatttatggctgcaaactaatagtggttttgttgttgcatagcataacggttggatgcgatcaaacatgattgttttactaataattttttttttctaagaagatattttacttataaacatttttacaatgacaatttttacaaaacactttgtactattacaaaaatagggatatgattttgtcccgttattatgctttcacggattgtaat

SEQ ID NO: 104038 - DNA, 513 bp, Cannabis sativa
cgcgacgggcaacattccagtcgcgacgggaactggcagagaagattttgaagaaaacgaagcttaaccccgtcgcaacgggggcattgctagtcgcgacgaggacccgagtgacgagatttttgggcagtttcgtaatgtcacgaattttaaagatgagacttggtttaaattgagggagctcgtgaaaattaaggattattcagatttggagccctagaaacaaaggaggaggctagaagagcggcttgtggcgacccagatcaattgctttaactagttctttctcttctctttaattcttctatgctattttttgtttcaatgttaattatgaatgttttgaactaaactcctatttagggaggatgatgaatgttgtttaagtttttgcctagttaataaataattgtcgttcctccattttgattgtgaaaactatctatatttgtgtttaattccatgtgcaagattgatcaccttttacatgttttatgatctcaattcgaaatc

SEQ ID NO: 104039 - DNA, 654 bp, Cannabis sativa
gtccccgagtcttgttccatgtttaggtttgagttcaggtttgggttcgggtctccagtcctagttcgggtttggattaaggtttcaaacccaatcccaaggtgggtttgtgtcctcgtctgggtcctcgtccggttacagttttgggtctgggtttaggtcctagtcctagtcctgctcctgggtcccgatttgcttctagtttcggttacagtttcaagtcccggggtatgggttctggtcgagtttgggttcgggtcctgatttgggtctgagccgaggtttagttctaggtttcagtctcggttagggtctaaggtttggtctggttctgggttcgggtcccggtgcacctctcggtctcgttccaagatcccagtccggttctagttcaagtttcgatttagttcccgagtgtgggtctgggtcttggtatgtgtcagagtcttggtttgagttcgagcttgggtctgggttttggtgtaaggcccaaatcaagacaccgacaacaggttgggtccaagcaccgagtcttggatctcaggtcctaaggtgacttctaggtccaagtttgggtctggggtcgggtcccgtatcccgatccaagttctgaggcccaagtcccgggtttgggtcccccatctatgttcaggt

SEQ ID NO: 104040 - DNA, 731 bp, Cannabis sativa
  modified_base (186)..(186): a, c, t, g, unknown or other
aaactcgaactcagaatcgcaaattgaactagaaccgaactaggactagtaccaggacaagaacctaaacccaaacccgaccccagataaaaatctagacagatacctaaacccgaacttagactaggactcgaacccgaacgtagaccaggaaccaaacaaacacaataactgggacctggaccnagaatcaggatagggacctgagaaacagaactaggacagggacctagtacccgacctagacctgaacttgaacctaggacctagctcgtgaaccggcaccagaaatggaaccagactgggacccgagattgggatctagattttgacccatggcttggacaaaacccgtcgtcggtgtctgcatttgggacccagcctttgacctgaacccttacaaggacccgaacccactcacggacctgaacccaaccccaaaccaaaaagtggacgcgaacccgtaccctgtgaccaaaaagtggaaccaaaaccagaagttgacagggactggaactaggacttggacttggaatcataactaaaattggacatagatctagcactataaccggacagggacccgaactaaaaatcagacctagacccaaattaggtgccggacccagatcccaacccaaacctggattcgggacccgaacttgaacttgaactaagacccaaacatggaaccagactaggcacatagaaccaaggtcgagacctagaac

SEQ ID NO: 104041 - DNA, 597 bp, Cannabis sativa
tttgtatatttttttatgttgctttgttgttgttttgatgtaattttcttcaactcttgttattttcttgtatttttatagactatcgtaaaaatattaaaaaaataaataaataaataaacgtaaaaatatattttttttttataaaaattggtatttcatgtaattataagtctcccgacaaattagaatgtaaataaagatgacactcaaaatcgagaaaaaaatatcttcacgcttgtaatctacaatgattaacagttcgctattgccattaaatttttattatttaagcatatgatgtataattttgattatggatgataatcaaaataattttgattattaatgataatatactatatatacgttaaaaataaaaaagaaactatttatactttaatgggatcagatatgatgcggtgtggatattattatccttactgccgcctcattcttgcttcgagtattaaaattgtcttccactattgccccattaactaccaagacagaaaatctccaccctattaaaaacgagtcctcgcggttacctattctcgccgtatgaaatttcatctctatatataagactatgat

SEQ ID NO: 104042 - DNA, 901 bp, Cannabis sativa
gttgatttttgatgaaaatgagaataacgaggttcattgattaatgagtttgttacatcatataattaaccaactaacattctatatgttgagaaaagcaatctcactctgcatagaaacaaaattttcaaaatagaacttttcaaacaaacaccttaatagtgctcataaacaattgcatcaatcaaatagatatttaagatcaattacatcaatcaaaaatgaaaaaaaaaaactcaaaatgattgggaagtttttctttttcatgattaaaccatatgagaaaacaatttaagcgcaagaaatgaggtttttataaatagatattttcaagctttcaaaacagaaataaacggcgtctgatgaatgaaataagctgtgataataataataaatctgcactgatgattttataggtgacatacactttgaactatataaatataattagtgggaactacagaaagagaataaagtgttgggttgattaaaaatggacaagtataaatgtcttctattaagatatatatatatatatatacatattaatacaaaatagaatatggtggaattttgctatagtgtacctggttactagacctatgttattagacctaaaaagaataatattaattcaaataataatttaaagtcaaattgatcatttgtgattaattttaataacgacgaatatcaaaatattgacaatatagactttaagtattttgaaaatatttacattcttgagatgtttgatattgttagagaatttttttttacataatcatttgttgcttattttaaaaatgatcgcatataatacaattggatcattatagaactttaaaagtttttttttttaaaaaaaaaatgtagtgtttaaattgatttaataaatatt

SEQ ID NO: 104043 - DNA, 573 bp, Cannabis sativa
ttttaacgaccaaaaaagttcaaggggcacgatttactacatgtcaaagttcaaagagaaaaattactaattaaccttcattttaatggtatactaaaatatgcggtgtgcaccgaatcctatacttttaatggtattgaattttcaatctacaacaatttagtatacaatttattttttcattgtaacccttattttatttaaaatataatcttacattttagttcttaaattaaaatttatgacaaaaataatagttcatttaaaacactaaaacatatttgaaaaaaaatataaattaataaaataaaaaaaatactaatactaataaaataaaaataacatgacactaagttataaaattaaaaaaaacaacattaagtaaattaagtaaaataataatttaatagtcaaattgataacttgtgaatcttagccttgaagaattaatatcaaaatattggctatatggactttaagtattttgagaatattaatattcttcagatgattgatattattggtgagctcttttttgcaaaattattgttctctcattttaaaaacagtcgc

SEQ ID NO: 104044 - DNA, 1153 bp, Cannabis sativa
  modified_base (149)..(153): a, c, t, g, unknown or other
  modified_base (505)..(507): a, c, t, g, unknown or other
atcaagaatttattctgataattgctaattcattatattacttccatgtttaaaatatgtgtgacaaagaatactgtggtgtattgaatataatccagagttcaaaacgaactacatatttcaatagtatagtccacccctaagtatannnnnattatgatccacccctaagggatatagagatcatggtccttctctaagtgttatagagatcatgtggagctatgaatataatccaaagttcaattgatataaaagatcgttgaactgcatattattcttaacttttccacccctatcagatcaaaatatctttctattaaacaaattcttaataattgttttagagtcaacaattattcataaacatagaaaagaaattctaagtgtttacgtagtattaactctttgcagagttgaagatactatagaatttgtatcaataataaaaacacatacacatataaacatataaatataattggtactggcatacacaagatannntaaatgaagctcaattcataaatgtaatttccaaaatagaaaatttttattattaaaattttccaaaattaaaggaattgtctgcaacaatatgaaaaatagggaataaaaacccaaactaataattgaaatctaaattgttctgaaactaaaacaattaattcaaaaaataaataaaaaaaaagagcttcgcttcatcatggactaactccacccttctgtccaaccatccgaatcaactcgttaagatagcatccgagttcaagcaactggagctgtaataagaagaaaaacaaataaacatggttagtaggtccagaattaataatccaagtggatagtaattcactaaaacacattagtttgaaaagaaataccttgtttctttgctagaaatttaggacattggggtttccagtgtcccttttcattgcaatagaagcattttccttttggtgtatcaccaggagtagcagcctttttctttttaattgttttcacagcttgaacatgcttcttgctattcttcaacttcttcttgttcttgggtttttaagtagagacaaagtttgcctcagctttagttgccccattaccatttccagaattatgagctttaggaccctttttcttcggtcctccaatc

SEQ ID NO: 104045 - DNA, 1398 bp, Cannabis sativa
  modified_base (680)..(681): a, c, t, g, unknown or other
cgaaggctttgcaatcatctatgagtgatataaaatagtgttgactattccaaaacatcgtaaggcatgaccgacaaatatctgtatgaatcgattctaagacttttaaagctatcaacacataatcttttagttttggtatgttttttcttgatgcaatcagcgcagacattaaaatctataaagtcaagagactctaaaatgtcatcaaacacaagacgcttaattctaccttttgatatatgaccttagtgcttatgccataatgacgctgaattttctttatttaatttgcgtttagtacctcgtgattctacatgcaaggtttcattataggatgcaattatttctagaaaataaagatattcataagcatataaataactagttccaataacatttgaatttaaggacaaactaaactgctattttccaaatgaacaataataatcagatttctccaacaaataaacagaaactaaatttacggcacaacaaaagtatctttcaaatccaaataaaaactagttctcaataacaatctaaaatgcctaattgcttctattttagctaattgtccaacgcccacaaagatgtgtctttcaccatcacttgagtttcggtagctcagccaattctgcatagaaacacttatgtgagtagtagcacaagaatctatnnaccaagtgtttctaggtactgaagctaaattaaactcaaaacaaacaaaattaagattagtacctttctttatacgtcatgcgtgatatttagcacaatgtttcttcacattttcatgttggttataaaagaaacaacccttagaatcctattgctgtttcttttgaactggacccttagcaggttcattctcaaatttctatttcttgcccttatccttaggggtagtgccaagtgagcactctcagatttgtcctttttgaacctttcttcgtcttgcatacaatgagaaatgagttcattaagagtcaatttatccttttaataattgtaactaatttaaattggttaaattgtggaggaagcgttaacaaaccatgagcataaacacatcatcagaaagttcaacagtgtccttaatcttgagacaacaggatgtattttcataatgtactcccttacatttccttgacccttatacttcatgttcattaaagagccaagaagtgttgtcatttcaaccttatcgtttttagcgaaacattccttaatttgttcaaggaaattattggccataataatcccttcagattttgtgcccgaaaaagacttctagaatgttgtgtttcacaatcattagactcatgcgatttgaacgatcccacctctcaaattctgttttatcatcacagatactttctttagtgagagatgcag

SEQ ID NO: 104046 - DNA, 820 bp, Cannabis sativa
atatgaatacacagattgtgggatttgagcagcttgccatatcttgatgattcgatcccagatttatagggattacttttatgcttcacgatacaaattctggaattgctaagtgttgatgtgctgcccggattatccactgctcggctggaaagacatcgtccatgtaggtatgtgttgtgccatgctcggagcatctctcttgggcatatatggggaatcgagtccacgtgtcactagtatgtgctgccacgtcagtgcaaaaaataggataacagtataaagaaataacaataacatgcgtaaactagtagagtgttacagagttacactgaataccaatggatatatgtttggcaaagtactgattgatgctatcacatcagtacaattagagtgatgagtataggcagatattatggtcaatcgtactgtcgtacaaacgttgcagacttagtatgtgttggacgtgagatagggttgcaatttggtgtatgggcgcctagctatgatgtagtttatgttggtgttatgattatgtttttcttactgagtctgtcgatgcacaaatattattgtataggttttggcaaagctaaggctggacaatagtggactcaagaaaataaagattgtacctcacctcaactaacttctcctccttccatatcaaagccaaaccaccattaaggccctttgggtccatgccaaaataaccctcaaaccccagacaaatcttgagactagggatgccaattatacccgcgggtactcgcccctaatggggcgggtatgagggttgactttcgggagtgggggc

SEQ ID NO: 104047 - DNA, 640 bp, Cannabis sativa
caaatgctttgtacaggtataggtgccccccaagtgaccgagcagacttttgactcttggtcacttgttcttttacaagtatgttgtaatacccaaagattaagaatcgaattagcaaaccttaactagttaaatgtgtatttattatggaattatattattatataatttattgtatgtgaattaaattgagaaatgacatgataagaccatattggtgagccatgggcatttttataattttgacccgagaggggtaaaactataattttaatttaatttcatgcttatggactatattattatatagtatacttgttgtgtccttttgcaggtgtttctgacaaatcagcacggtatagtcacaatcgagtatcttggcccaaactgggttcgaggtcgaaaaacattttcgggattttatattgccattttatggttgagtgaataacctgaaatttatttgagtatgtatgtgatgaaaatgacattttttcccttaaaattgtgtatgtgttatattaaggccctaggccattttggtctttttgaccctttaattctattttcaacaaaagagatttttggctgattatttgagatattttctggttttttacaactcaaaaatgattctctc

SEQ ID NO: 104048 - DNA, 775 bp, Cannabis sativa
ctattgtgtctgttatgatgaaagcttgaaaggctttgttattgctgagaacagcagtgccaataacttgttgatttttaagctcattacttaaataacctccgggtaaagtgaaaccggctgtaaatgttactgttgcaattaatgttgccgcaactagagctgactctttgtattttgtagtgatgaacttttttctttcattccactcatttctctcctcttcctttaatttttcgcggtctgttaatctttgttcgtagtgagaatttactagcaatgatctttggtaaatattctttaatattttgtgtttaaggaggacttcaagcagtttttgttggatctgtcatataagaaagaaaacaaaaacattgtagaatttttataacatagcaagaaaagaaaatcacaaagttcatattatgctaattaggatttttttcacccgaacattaacatgtatcatatcatacctctagacttttaatgtcgttaaaaattctcactaaactattgagcttattataattaaagacttttgtccaattttagtgaaatttaacatggatgaaagttcactgagcatgattaggcaaatatcaaagtccaaagacatgattgagtagatattaaattatgaggagcttgatttagtaaatgaacaataaccgaattagtaaaattgaatgaaatttgacaaaaaattttaagaattcaacaatctcaataattaagatgaatttttaacgattcatattttatttttattttt

SEQ ID NO: 104049 - DNA, 634 bp, Cannabis sativa
accttgtcgaagtgggagggttttttagggaactcaccttgtcattacttgggagacacttgtgataaaaatccattgttattttctaacaagtaatggatagtaagaataagaaactaagaagcaaagccaagagaactatggttgaaactattcatatggagtaaccaaaagttttctattacaaaaacaagaaagaaaattttgaaaataagtctattcaaaggacttaacaaaacttcatgttcctagtattataggtttgagattatctaaacctaaggcttgtggtatacctggttatttacttactcaagtgcaagtaacttactttagtaagatggtagagcatttttctaatggctaattctaaaggaaggaagtcttttgactcctagacacagagtttatttatctaaggaacagttttaaatattccaaaaaaaaaataaaagtcattaaaggaattccttaagaatcaatagtgagaggtcttatgaatgcttcggtatgcatgcgatcagacaccgtctgttgagtgggagttattagtagtattagtttaatccaggaaagaaatattggaagataattaagtaaatcttaagatcgaaagaggaactatatgttagtc

SEQ ID NO: 104050 - DNA, 642 bp, Cannabis sativa
cctaagattagacactttatttttaggcttgctcaaaactccattcctactgctgaaaatctttatcataggcactgccttagctctcctgtttgtcctagatgtaatctttgttatgagtcagtgcagcatgctttgtttgagtgtaggtttatgaagaaggcttggtcaggtacgttttcaactctgccattaagggcatcaaacacttgaacatgttagatatctttttatacatacagcttaatttttccaaagatgcctttaacctttttctttgcatgttatggaagtgttggaatgcaagaaatgcagctgttttcaggaaccaagagtcgaagccaatgcgcattgaacaagaagctcaagactatttggacttttatcaagcagctcaggataagcggaggacacagacccaatctaccacagaccttaaccttttggcttgggaaccgccaccagtgggcaccctcaaactcaatacggatgctgctgtatctactcaccagaacagaacaagaggtggggctctagtgcatgatcactctggaaaagtacttgcagcaacagccttcaatcgaatgggacagatgcaacctcaagtagcagaaggctgggttttgttggaaggtcttaaat

SEQ ID NO: 104051 - DNA, 566 bp, Cannabis sativa
attgttatttcttggccacgagtaacaatttgttaagctagatattgttccggaagggctagatctagtagttaaacttggaaggagcaagagaaatcctagaattaggtttttcttagtaagtggaataagaatatttcatttaccttgcataacttaagaattgatgtttaattagggttttgcaatctggtttgatataggaatatgtgaatctagatggtagaacttaaattgtgagttttgaaaaattctcataaacacataaaaaaatttgttatctctgtgtgaaatgctgaagtaatgttataacaactgggaaaaacctgactagggggattagttattcaagccactttttaatatattacgtttcttgcaagtaattttctagtaacagtagcattaattttagcaagtttaattacattcattttagttttgaatcattcctcaaacattctcatatttttctttttactttaagttgtaattagttggttttacatcgtattttgtttgcaatccttgtggagacgatcttacttatcactttattacttatt

SEQ ID NO: 104052 - DNA, 571 bp, Cannabis sativa
  modified_base (27)..(27): a, c, t, g, unknown or other
agtcgacagactcagtaagaaaagcanaatataataaacatactaaatccctggttataatcaagcccccatacacctgactataaccctaactgaaccaggaacgtccataacaaagtatgattaaccgcggatccagcctatactcagtactctagtcgtaccgatgtggtagcagttattccatactatctgatagcctagcatatatctgttggcatctcggtgcaactctatgtacacctcactgttgccctaatatgctaatctgacggctatataaaatttgcctaacatatatctaatatgttaatctgatggcaactaaaatgtacgctaaacatgtataagcatatgcatgacattatactaatcttacctcgattccgaattcaggtgtgcctgtcaacctgagtggaacaatctgctcgacgaattacaggctctaaatcataataatcacaacacagttaagtgacacgctaaatctcttcacggggacttaaactcgaaactagaattttccctatcgataaataacatggtcataccctaaataacacaaaaatgg

SEQ ID NO: 104053 - DNA, 937 bp, Cannabis sativa
acctccaacacacacgcaccctatatatatatatattaaagaaaaagtgagaagaatgtattcaaagtttagggacacgattttgtcccgtgatgtactttcgcggaatgtattccgtggtatattagatgggtctcagggtacattagatgattgtcagggtacgttactattttttaaccctaattacctttagatcaacctcagctctcagatcaaataactctctcatctaacggctgtcgtatatcacggaatacattccgtaaaagtacaatcacaggacaaaatcatatctctcaaaattgaatatcaaaattattaaactaattattgtaaaagattgtgttttaattatttaaagaagatttatgtaatttgtttttttttctcctctttttctcatgtttgcatgatttattatttagatttggaggaaaaacctcatcccttctttaccctgtctaatctaaacaaatgaaatgatttaggcgcgttcttcccactttctctatttattattcccaataaaagctctcttgccaaacatagtgtacagtggaccaccaaatccaaaaccaattccaataattaagcgaaaaataatctataataaaaagaaaagcataaattgtctcagccgtagatttaaaaaaaaaatagaactaaaataaataacaaacaaaaagtaaatagtataatttaaaataaagtgggttgagctctcaattataatatacaacattatatataatgatggtgggtttaattttaggaataattacataaaaaattacatttaaataaaaaaaaaatttacgtttacagatttaaatgtaaaaattatatttaatttttacgtaaaaatacatttatagattttttttatatatatatttttacaatttttcataaaataacaagaaaactacataaa

SEQ ID NO: 104054 - DNA, 2442 bp, Cannabis sativa
ttagaaagtaaaggtaggataaatagcaagataaaaaataagatatttttacgtggttcaggcgttaactatccttagtccatgagtctattttattagggtcatcggctagtaattatttatacaaatagagatacaatagactaaaactcctttccaccgtgttcctcttgaagaagaggaagcttagtaggaatactctggagttgataataggtttacaaaaatgtgttttcttgggatgacgaagaatgagtcttctatcccaaaaaaaggtgttcctctctgatgctttttcaagggtatttatagaccaactcctttccatgtgctgcagtagatggattatcgctggggcaaaatcggaccgttggaatggtaggtggcactttcccatatggcatttaagggtgtcagatcgtacaagctaggcttctcctttttccatttcccttatccttagccattggatcattttggtcaggtacaaaggacacacatgttctgtacgatagcgtgtcgtgggagacaacttcttacattgtacccgaaaaagtctgattattaggtccatagtctgacacgtttaggtggggcttccgtgggctaaaggcacaacccgatttagtgtgtctcagaatgccttggcctttctaggaaaatccatactcttcttgggagaagatagctttagttcaaggaatggagggagttcttggctcacggataccgtccatgtagctagcagtcggggaactcctctttacagaggcccttcccgcgaagttggtgctttatcttctcggagcatcgattgaggaagcagggcgactgatgaattcttagcctttctctattaaaattcgacgtgtcatgatgacaaaaatgtggataacagtgggagcccttatgggttcatagtttacttagagtttttcttttgtaattaattgttgatggtgtttgaggtttacataatctgtataatgtgaaaactcatacacacacacatatatatatatagaacattgtttaatttatttttttcttcatgaaaatgactatatatatacctgcctcttgaatttatgtctcctctgtcctaaaattttcttatttcaaagagtctatgtcattccaccgccccaaaaaagccctattttgagtttattatttgtttgttttgattaatctgttttctaagttatgataattgtagtggccaaaaattgcactaggcccaaatccctcttacgacccaaatcgaaattacaatccttcaaaactaaatcagtaaatataacccactcattcaaaatacattaggtttgggctaaaacacaatgcccaaacgagcctagtagctacaacaccaattaaatacataggataggaatgagtttataactgatccataagaattgatccttcctcttgaaaaaggggaagaccacttcccatgttcattcttcagaatagataaatttgaccattagaggttctataaaaggagaacccaagagtcttgaaggatcacctcattttcactcagtgaactcttactcaagcattcatgcaatacattactattgttattatcagtccttctccatcaatctacgagataaatatttattttctattttcttattttacattttattattcttcattcgaattatttactaacttgattgtcagagtcccttcagatggcaccatctcagtgtcccaaggttggcagtgcctgcgatccttccattttgatcattgtagaatttttcctctatattttggcgcccatcatgggggcatgacaaactgaatcaggagcaagagacacgtatcctataccatggaaaatttggaagaaggagagatcaacgtttaagcctagatatctactcttatgtctcaaatgagtgaaaccaatgaaagcctcataacgttataagaagagaataaagcattccaggaagagaatgctctgatgaaatcaaaggtggagatactggagtccgttcaacctagtacaatggagtctcagtcaaggtttcgtgttctaattccatccatgcaaccccttgatatctgctctgacttcaaccttaggccaacgtccactggtcacagagacgctgccaaaccaaacaacacactagaagtcaactacaacgactacttgagtagatggatcggtaccagggggatctactcaaacacatggaccctctttggtaggtgatgaaactatgactgacgcccagatcacatcagttcttgacgcccagatctcaagaaggaaaactcaggacctctgccccaatccctccaagtattttgatatttaattttcctattgttccattttcaagtcaatgttgggttttattccctaaataaaactccatttcaatgtaatctattttattcaacatcaat

SEQ ID NO: 104055 - DNA, 1216 bp, Cannabis sativa
atggtgatcttggacatatggtacaataataataaacaactcttccactacctacctgatttagtaccataaaactaaaaattggtaccggatcagttccattatgtatatatattaaatgttgtgtgagttttatatatttagatatatgtgatatatattatgaatggatagtattttattgtgattgtatgtgaggtgatggatcgttaatttttggtaaaaaaataggtgtaagtccaattatttttttagataataagtaagccaatattagggcataggaatttatttttatgtaattttttccatcgatgtaatgcttaattgcatgtgagctcgggttctaaggagtcccagccgtgcaccacgacacaaccaccacatgtagcttgaattttttgaccttggccatgtgcacgatagacacttggtttttcgctcgtaattgtcgaatcaaggaatctcggtatgtgttacgaaaaattatatacaaatatgcaaatgcacgcaatcaagcagtactcacagctgaggtcgatcccacagggaattaaattgaataacactaaattagacttatatttctatttggtaaccaatacatttgatgaaaataaaaataaagattaacaagaaaataaaattacgcaaataaaagtatttaatcaaggatgagaaattagggaaaagaatcatgttgatttaattacccaatcattaatactaattactattctctttctcaatgtgaatggcagattataaaaattaactaactctttttcagatcttttaggccctaaatcacatgttatctaatcatctctgaattagactaacatataatcagcattaagcaataatctcaatgtcactaaggctatgcaaatactttcgtttcacatcaaaacctagtttatgcaattttagcattcccaaaactcactttcagattttgaattgggatcataaagtatgcaaaatgtgatcaatcttaagcatgtaattaagcacaaatatggataaattcacaatcaataaaggagaattagcaattatcattaacctaaaaaaaatgtcaatcaacattcattatctccccaaataggagtttagttcataatctccacaattaaattcatatttaaagttgaaacagaaaataacatagaaaaattaagagagaagaaaagaactggttgaagcaatcgat

SEQ ID NO: 104056 - DNA, 909 bp, Cannabis sativa
ttgggcaaagaggaaatagggacggcgccaaacctctgatgggaaaatgcccacttagccacatggttcaagatgctcttaagtgtcattttacatttctctaaaaatttcttttaatatttttcctaaaataaaaatttacaatattttcttctaatatttatagtaattttaattttattttcacatttaaatttttttagaaaaaatcatgtatattttttcaaatttttaaataaaatttcatataaaattttatttaattttttgtcttaatatttaaaaaatattttatttttattttataagtatatttttatgaatataaaaaagaaaattttttaaaaaattaatataaattaaatatatattttatataaaataaaaattattgatgtatttataattttatttcgtgtaaataaaactttccttattataataatttttcaaaataaaagtaccatttttaacatcaagtttacctttttctattataaatttgacattttgatatgtactacaatcttttaatttttattgatttttttaaacttttgaaactaatttcatataaaaaataatacatatatatatataaataacaagcattattaaataataattgggtgtttggaataggttaatactagcaagggaatagaaatataaaacattattttttttttattttgagggtttagtcttgaaatgttattcctttagtaatataactatctttgaggatggtaatattaatatcttaaaaaaagagtggaattgaattattacctttcattatattaatttgaatattatttttgaattagtaaataaatttaaataccaatagtattatcatttattaaaaagaaaatattatgatatatattttgtttgtgagatcga

SEQ ID NO: 104057 - DNA, 973 bp, Cannabis sativa
ttgctaatatcgttgttttccataactttgttttgcgtttacttccatttaacttggacactatcaaatgtgatacagaccttggcatagcccatgataattcaaattcagaagaggatgttcatcattgtaaggatattcattattattaagcttgctttttagtggaaattacactcttatggaaccacttgagctcttttactcttttccttttaacttactcaactacggcttgaattccagaccacttgcacacacttactgaaccactggagctcttttattctttttcttttaacttactcgactactggagcttgaattccagaccacttgcacacactactcaaccgctggagctctattacgttttttttttaacttgtcaaattaaaatcctctttgatttgaacttctaattgcctaggtatgcgaattcttataagactactgtgaggtatctctcacttgattttcttctcttccctttatttttctgtttcctctctttctaagataatatgtttttctatatcttcctgttcactgtcattacaaaagtttctaatggaatgaaacaaaattacaacataattcacttgccaaagcaatcaagtctagaaaaaaaataggagctaaccttccatgttttgagacctggccgtcgaacaagttgaggaagttcattagagacatccaatagttcgacagactctccacatttgcgcaaaatctgaataaagaaatccatggttctcagttcaaaaaagtataatttcctgcatttcttagcttttaatgctcataactaacaaaaatttctgtttttcctcatacagaaattcaatcgaaagaataattggacagaaatccacaactcgtgatcaatgtaataaactttactgtagctaaatattacaagtcctttggcagcagtataatcaaggaatagaaggggttctctagtctt

SEQ ID NO: 104058 - DNA, 1114 bp, Cannabis sativa
aagtttacaattttacttttacatcgaattttttgtaaaaatactgtctttttataaaataatcgtaaaacaacaaaacagaacaattaaaacaatagtagaacaactaaaaaataaccgtgaaaacttaacacaatacacagtattttttttaaaaaaagcccaccccacaataaaaaagtaaaaaaattaaaaatttctgtacgtgtaaaaacatcgtaccataaatttatgataaactatttcttcaaaattattttgaattttagcttaatttttataaaattttgtaaaatatcctctaatacccaaaaactcctgttgagattttcaagaatggactcttaacaaaatatattttgatccatatcataaataattatgtgcttttcattttggttttggtgggcatgaaggattatggagtttcagtgatgttatttagctctcattacttggtggacattgaagaggagaagataggaagagtattaaaacttggttctttgaaaaatgcaaaaatatggaaccaaatggatgttctcatcttcaacacttggctttggtggtaccgaaatgattcttatcgcccgtacgtaccatttttaacaatttttcttataattaaatacataacatgcagacactgctctgggctaaggcgaactaggctcgtgcctatacatatgtatgcaatctatggaaagaaaaaaaaatgttatttgtgaaattttgtgaattaggcccatttatacccaagcccaacccaatcaaataaacaaaatttatcttaggcccatcattggtctagataaatataaattaatttgaattttaaatattactaaattataccaatatagcaattgttagtactttattatgacaatgctctaataataatatatttattaattacagatgggattatattcaagatgggaagaagatagtgaaagacatggatagaatggaagcatttagaaaaggattaatgacttgggcaaagtggtttaacacaactgtcaatacaagaaaaacaaaagtcatttttcaaggaattactccaagccattatgagtaagcaatttatttattttagcatctaaaaaaa

SEQ ID NO: 104059 - DNA, 778 bp, Cannabis sativa
tcggtccttcggccgactcaagttagatttatgggcaatattataattgttattgatattaaacattgtacatttagttagagacatcaagaaatctgaatgcactgtgcatgtatgttatatgtgttagcctatttaacaggatagacatattagaaagatgacaatatgagttaaattgttgatattccctagtgggatatagaccatgagtagttaatggaggcatcaatctaattgattcaaataacaaaatcttttgtttagaagtgatctagcgttaccaaaggtaagacaatttatgagtattgtctggaatcctaggtgaattgaaggcgacgattgtgtagtaattttgagattatgtagtcgtgggactacctatgttagcaggaagcatcttattttggcagctcaccatgagggaactccatggttgagtgtctttgacttggggtgatttcatttaggaaatttccctatgaagcgtgcgagttggagcaaagcacattggaaacactttaattggtctgtgggggccagtcaacagttcgagaagcagctagagtgatgcactcatgtataagagccaccattctgtgggagtaaaggcccaacagaggcttgaagcggggatgttaccgggggtaacgtataaaagaacatcaggaagagtggaggtattactatggtaaagaagattacttaaattacttaaggtgatacggtaatgatggagagtactttataattgactggatagtcaatatggtatata

SEQ ID NO: 104060 - DNA, 510 bp, Cannabis sativa
aaatttaatttaaaataatatttacaatttaactaattctaaatatcaaaatttgaaaataatttttaataaaaaaataaacaatatcaacaattttattattaattactttaggtggattaattatatttaggtttaactaactacatgaatgctgacccacaacatctaataatttgttatttttttatttaaaaaaaaagtcaccccataatcatcaatatatatataaaggagaagtgtaagacggtgacatgacgctttagaattacttcaaatacatctatctattttctgcttaattctttcactttttaattttttaataggtttataaatattatttttctaaataatttaattatttttctcttctatccttaattttctctttttatttattttttattattaaaaagtgaaaatatctatacattcttaaattttaaaaataactatctaatatatctttatatattaaaagtgcctatctaacgacatttcttggtt

SEQ ID NO: 104061 - DNA, 546 bp, Cannabis sativa
  modified_base (177)..(193): a, c, t, g, unknown or other
attcataacaatactaaaatactaattatattacatacaacagactatgcagtacaatatacttttcttacctttaatccaggtcatacaatttcagccaacccaagtggagaactatacccgatgatctcggccctatgtcacaacaacgttaaaccaataagtgtttatcccaannnnnnnnnnnnnnnnnacataagacaatttagggttttctaccaaacccgtggtataaatacactaaaataaaacttatattttggttctaaaacattcaacatattgtagagctcgtcgcaagcttcgaaacggtatatagaatgtccaaaacagacattcgagtcaaaagttataacaaaaatacgatttctgatctcctaagaatttcaaaaaactatgaaactcgaaaatcctaatttttgcattccccgaaacacttccaaaacttatttaagtcactccaaacttcatagggcgcatatataccataaatattaccatccttgtgtaacagaaattaaaatcgagcccttaaatgaaaaacgc

SEQ ID NO: 104062 - DNA, 1349 bp, Cannabis sativa
  modified_base (252)..(252): a, c, t, g, unknown or other
acacccatactaaaatatctactcctcgtagagcttcctacagacaaaaacgaggcgcgcaaactcttatattcagtatctcgctatacaatagaaggcaaattgtataggatgggttatttgatgcctctcttacggtgtgtacttccaacagaagctaacgaaataatcaaagaaattcacgaaggcttttatggagatcacacaggttggcaaagtttatcaaagaagattatccgtcaaggatactantggccaacaataaataaagacacacatgaatttgtcaagatatgcgataaatgcctgagattctcacatatacctcgggtaccgccaacagagttaagaatgatgatctcaccatacccatttgcaatatggggaattgacttgattggggcattacccacagggcgaggaggtgcaaagtaggcagtagtagctgttgacttctttacaaagtggacagaggctaaaccagctagtttccataacttgcaaaaaagttctcaatttcgttgtcaagaacataatttgtagattttaaatacccattaaaatagtatctgacaatggaactcaatttgatggcgagctatttactgagaactgtgaaaggaataaaattattaagagcttctcgtcagttttgagaccctaagcaaatggtcaagtagaagttgttaataaaacctcaaatgatactattaaaaagaagttggatgctgctaaaggaagataggtagatgaacttccacaagtactttgggctcacagaataacagagaaaatagctacagggcacactccattctcgttagcatttggctcggaggcaatgctacctgtagaaattgatattgcaacccacagacgtgaattctacaatcaagaagaaaacaaagaaatccttaaattgtccttagatctacttgaggaaagacgcactgagtcgcaaataactaatgcagcctattagtatcgaatcacaagatactttaacaaaagagttaagaaaagacactttaatgttggagatttggtgttaagacgagtatttacaaacacacgagatgtgtctgctggagtggttaatcctaactgggaaggttcctatgttatcgaggcagtagtaggaactggggtctataaattaactcggcttaatgactcgctaataaaaaaccactggaatagtgaacatttaagaccttattactagtaaagttaaaatataaatgatgtacttatctctgtgatatgtgaattcttattattaataaatttaaagtttgttcaagtaattataattttttttttaaattacttgaggggcatatatatgt

SEQ ID NO: 104063 - DNA, 535 bp, Cannabis sativa
aggctccacattcattagtttggaggtttaaaatttgaagatggaggctccatatttgattgccctatattcgaagatggaggctctacatgtggtgcgacacactgttgattacgtaaaatgacatcacccactaaaaatgaagaaatctgatcaattacgccatcttcattatcctcatagctaccaagcctttcataatagacatcatgttcttgaagtacttttcctttaacttgttcttagaagaaacaagctccatttcttcaggtgtcgggccaccattagtgtacaatccagatactattgcaaactcttggagagaaaatctcacaggttttccattaataaaaaaccataactcatgcctcttttggcaatctaccctcctcaaaactatctggtttactaaggtgccaggaaaaagccctttgtgtctaggttcaagagacaacccaattgggagtaatgtttaaaaacatcttggtcagactttgtgagccaattctttatttggcctattacacttagtggg

SEQ ID NO: 104064 - DNA, 630 bp, Cannabis sativa
accgacgtgaatagtactgaaatatttggggcgtctctttaaaaatgacactaataatatgttatttgcgtcgtttagatatatgacgctaaaaactaaaccgacgcaaataagcagacaatttaaaaatttacgtttcattttgcgtcgtttattaacagtcgattattatatgaccgagcttttaaaaatgacgcaaaatacaatagtgagaattagtaacagacgcaacaaaaagtgaaatacctaaaactaaacctaaacaacatattgttcatcatttcatgatctaagcgaaagactccacagtcgacctaaacgcgaaagactccacagtcgacctaaacgcactgccgccttcagtctccagtcgcactgccgccttcagcccctctcagtcgacctaaacacagctcctctcagtcgacctaaacgaagcccctctcagtccacctaagcgggaaggtttgttcagtttcctttaatattcattttatctttcaaagtttttttgccctgatctcatcttctctcattctctattcgacctagacactaactctgttatctgcacatctaaaacatgtataatagtaaccaggtagtatagaatgggatgtgtgtcaattt

SEQ ID NO: 104065 - DNA, 634 bp, Cannabis sativa
gttacaaaagaagaagctgcacgacttctgtccgaagtgcatgatggattctgtggcaactacgcagtcgggcagagcctatcaaagaaaatactaaggcaaggatatttctagccgaccatgatggaagattcaaaggcctatgttaagaagtgtgacaaatgccagtgattttcaaaaataccccgtgcaccgcccaacaagctaactcaaatgtaaagtccttggacttttgctatttggggaatagacctgattggataattgcccaaaggtaaaggcggggtacaatatgcagtggtcgcagttgactattttacaaagtggacaaaagccgagtcattggtaataattacatctgaaaaagtattggactttgtggtgcaaaatataatatgtcggtttggactcccacacaagattgtctcagagaatggcaaacagtttgacagccaattgttcacataaatctgcatgaatcatgaaatcataaaaagtttctctgcagtggcacacctttaatcaaatggtcaggtcgaagcagtcaataagacactcaaagacactttgaaaaaattacttgaagaagctaaagggaactggctccaggactactagaagtattatggtcatg

SEQ ID NO: 104066 - DNA, 506 bp, Cannabis sativa
atttatttaatctatttgttggtccttgtattataatgcaatagatcgtaatatcttgattttcttccattgtaataatatctctaacacaaaattatataaaacacatatttaaaataatataataatagaaaatatttataataaaattagaccacttgtatatatatagaacaaaaatatctcaataattatgtagtcactaaatagttagatatttcatgattatagtgttgtcagcacagtggaatatattcatgattatatgttcaaaagtttaattcccatgatttgtcagttcagtgtcgatatggaatctatagcttctatttggacatagaagtgaaacgatgatttcctttgagtttggcttaatagaggcaaatgattgagatacatttcagtaattatattagtttactgaaatatcatttatagatagctaagtgttctaaggataaaatacattgaagggtaggacggtaaatttgtctctattcagtgta

SEQ ID NO: 104067 - DNA, 595 bp, Cannabis sativa
  modified_base (266)..(267): a, c, t, g, unknown or other
gagagagagagagagagacgagattgagattcagagagagagagccttagggtggttagagaactgctggggtggctgccgggttttgaaaaccctagatcaggactgagagagacagagagaggagagagagagagagagacagagagagagagagaatcgtcgtttcagacgaaaaagaaaaaaaacagaaagaaaaagaaaaagaaagaaaggaaaaaaagaaaattatttatttttttatttatatatttttttttaatttnnaattaattttattttaatttttctaatttttttttaaataattttttacgtggaccagtaaaattgtgccacgtgtacactgtgttcagtccaacatgacacttaatacctaaaatggacggaaggggtaaattgctaagagaatacgagtattgggggttttaccgcccaaatttggattgtgggggttaagtgaactaaaatgaaaatggttggggttttgccgccatttaccctaattataatattattaatgtaaattttaaaaaaattcaaattatttacaatgtcaaaaatagagttctcgatattctcatttttcacacat

SEQ ID NO: 104068 - DNA, 1009 bp, Cannabis sativa
  modified_base (843)..(843): a, c, t, g, unknown or other
cttcttacataattttgtttaaaggaaaaagggtcattactccttagctagtgtatagatattttgttatatcactttttctagatatttatgtctaagtagtaagcatgactcattagtcattatagaggaattggatccaaaatttcatatttttatagtctccttcatatttcacaattaaaaaacaattaaatatatttgtggaaaaataaaatgtgattttaaatgaagtagttgctctcaagctatggaaagtaataattccatttaaaaaaaaaaaaaagtgtcataaataactaaattatgtgaaataatacttaatatatctttagaaaataaattatgattttaaggaaattaagtggtagaacattaatatatgaattatgttaacataatttttgcacatgtatttaattttagcaacatataaatttaagtgaggaacacattatttttatttgtatggttaagattaattacacattatttgtgtaaaaaattagtataatttgaatctctctctaaatatatatatggaacacttctcaatggatattacccattaatagttactaaacaatttaactatgaatattaatttttaaaatattaaattataagattttgatctaattacgaataataagaaaattttaaatttttatacttaatttagctatttaattaaataaatatacacttcttacactacattaaaaatatgtttatatacaaaatacttaaaccgaattcaacttttttttagtcgaaaaacttttttttcttaatgtttctttcaaccgatggaataatcccaactcatataatataaaaatnagagatttttttaattagataaaaaaactaagtataaaaactcaatttttcataatactacccatggatgggtaatacccattaagagtagatgaagcattttttaatttattttgaaaagctttagtcataacaaatttgtgttggaaaaccttactttatacat

SEQ ID NO: 104069 - DNA, 585 bp, Cannabis sativa
ctcatttatttggcttgatttgtagtcaaatccataattttagggatataactgtaaatgtatttcggtcaactttataattaactgccactatgcaattataaatagtggcagatatgatcaaaagggggaggccctgaaaaaacatactcagaaatctgaataagattgactcgtggactatgcaaaattttaactgcaaaaccacgtaaaaaacccagtgttcttattttatttttctataacttttattatttctgtgttgaatcataatcgtgaggtacaaatttggttagcaaaaatctgcgttaatagtttggtactttcattgagagcctttgtgaaaaagctcaaaaaaaagcctcttgacataaaagtgatggatgacaccatcgataatagtcctcaagaaggaatcaatcatcgtcccgaaaaagaaccattgagtcctcagggatctgctgaatcatcacatgaatagaatgcaagccccaggaagacccagtattggggcccttggttcgacggaccttggaagagcaacaatcggtcattccctagtcaggttgatgaggatggcgctta

SEQ ID NO: 104070 - DNA, 1028 bp, Cannabis sativa
aaaggaggagtgcagtacgcagtggtggcagttgattacttcactaagtggacggaagccgaaccactcgcaattattacatctaagaaagttcaagactttgttgtaaagaacataatctatcgatttgaattgccatacaaaatagttttagacaatagcaaacagtttgacagcccgtccttcgctgatttttgtgcaaaccatggtatcatcaaaagcttttccgcagtggcgcatccccaagcaaatggtcaagttgaagcagtcaacaagaccctgaaggatacactaaagaaaagacttgaagatgctaaaggaaactggccggaggaatttcctgaagttctatggtcgtatcaaacaactgagaaaacagcaatcggacagaccccatttgctatggcatatggatatgaagctatgctacctgtagagctcgagccaccatcccacagaatattaacgtacgaccaagaagtaaatcacgtactcctggccgaatcacttgatgaaattgaagagaagtgaaccacaacaaacataaagttgatagcccatcaacaaaaagtagctcggtatttcaataaataagtgaaggctcggaaattctttgtgggagatattgtcctaagaagagtatttctaaacaccaaagacaatacaccaggtgtgctcagacctaactgggaaggataatatcaggtagttgaagttctcgaatcaggagcatacaaattgggtaagtatgatgaaaaaatgcaacgtgttctagtaccacggtattggaatggggaacatttaaaaagatactaccaataaagtaccaggtcggatgaccatattaagtagtgaaagaacatttacttgtaagtgaatggcctaatgggtggactatgcccaaaaggttccgacaaaagtgaaaaagtacttaggtcggatgaccaccatttaaagtacaatttctaatttttgtaatttgttttatttcatattaagctaaaagatcaaatagctcttatgtaagt

SEQ ID NO: 104071 - DNA, 688 bp, Cannabis sativa
tatcttttccagttggtgggcacatgtaagggtcgagtttagctcgtctgcctcccagctagtggaccggtaggtgtatttctcatggaccaccgggcccttcatcacttcttccaaggtggccaatttcttgggcaccttgtctgaagattttgctccgattgaggtggggtaagacatgatctgggcttggtaaagttctaagatttcttggtcgaagccgaaaaaaccatggtcgtcaagatcatgaagaacctcactcatctgaaaaagaaatccagcagttagcccccaaacatcgggtgaaaatatctgaaaaacaaaaattaaaaaaaaaaagagggaagaaaaagacaggagtatgaaagtcacttcaagttctcgaaggcacctaagcgaggaaatcattttttggccccacaaggaaaactacaacgtacgacagtcttcgccatgaccaccgtgccgcaacaattgagtacgactaaaataaggacactattctaatttttgccctaacgtgaagaaaaataataaaatagaaaaagtatgcacagaaacttacacaagggtgataggtgagaagttgatgtcgttcgacgataaagcgacggaggaacaacagtaggaagtcaatgatttctggaattttttcaaatatgctatctgagtcgaagattgcagggtg

SEQ ID NO: 104072 - DNA, 556 bp, Cannabis sativa
ttttttccaacagattaaactacaatgtaatattaataagttctctaatcatgaactcaatccttattctggttacatttatagcaacctttgatgagatcttttcgtttacaaacttgtcctagaactctttggttaaaagtatccactactaatttttcttcccagaaaagtagggaattatactgttataatctccaatcagctctaaccatcgtcgctacctcctaattaaatcctttccaaatgataaaatattgacgctcctatgattcatataaacttcgtacttttgccaaacaggtaaaagcaccaaactcccaaggtagaagccaccgctatcaattcaatattatagctggaatactattactcacacttccttaatcgcttagaagcacatgcaataactctcctggactgtatcaaaatgcaatctaacccttgtttggaagtgtcacatcaaatcataatttctcctcactgactagcaatgttgacattggtacaatagttaacctctgtttcagttctttcgatttgattccactaaggg

SEQ ID NO: 104073 - DNA, 717 bp, Cannabis sativa
tccaaaacatgatcagtgaatttccagcttaacctgtcataggctttaaccaaatcaatttttattgcaaaaaacccctccttgcccttcttccgattgaacgaatgaataatttcctggacaatcacattgttatcgtggatgtttcttccagggacaaaggcagcttgagtcggacatataagagtgggaagcaggggttttattctgtttgcaataattttggagataaccttataaaccacattgcatagagagataggtctaaattgagtggttcgagtcggattttggaccttagggatgagcacaacatttgtggcattaattcccctatgcatattaccagtgacaaagaaatctaaaaccgcatcacagaagtcttctccaactgactcccaatagtgcttaaagaacagaacagacatcccatcagggcccggggccttatggttattcatggcaaatagaactcttttgatttcatcatgactcgggcagcaaaccagggcctccgaatcctcaagagaaattctctcttgaaataactgggcacaattatactcaacatcactgtcaaccccggcaaaaatacctttaaaatactcaataaattcacccccaatagcccttctgccagagatccagacattatctttgtttaaaatactctcaatggcatttcttcttcccttaatagcagccgataggaagaaa

SEQ ID NO: 104074 - DNA, 752 bp, Cannabis sativa
aataatctcataaagatttttaaaacttaaatttaaattctttaattcaacactaaatatacgaaattaagaaatagtaacgatcaaaattttaacttaaaatagatatcttgtatgttaatatttttcatgaaggtccacccattatagtatagtgaacttattccccattttaatttaattaccatgataccaatataactcatactttacaatattatcagttttttcaaatattacttctacaacaatgacagctattgaagaccatttcttgttaatattactaaacttataataataatgtaacgttcctttattatcaaccatattcagttttaatgatattcagttttttgttaatattttattgttgataaacttaaataatattattggaagaaaatgtactgtaagaacttttgtagatgtatctcatgaaaaaataatcataatagttaaagtattcataacagtgattaaattaagcacaaacataatttattgaaaaaataattcttcctcaaaatgtcattgcttacatccacctttagacaaattaaattactgaccaaactagaatattaattaaaaccaaaaacaagcaacatcacaaatttaaaactgaatacatccaaacttccataacattctgatagccccaccattattgtgaacaactcccgtgtagatgaaaataaaacttcctttccattttactccttcactcctttattagctgcctttttact

SEQ ID NO: 104075 - DNA, 601 bp, Cannabis sativa
atagtttttgatttagtgtctatgattgttatatgacattttttatgtacatggaatgctattaatagatatggatatgcaacaaaagaagattatgatatttcttttcacgtggcattttcaaatgattagcatgtgtatgatgttgcaattattattgtataaaatggtacgcaaccgtcataggagacgtatgtttctagatcgtacttttgctagacatgagactcggttaaaatatttggagagtttaataggtgaaagtgacatagcatgtgtgaatgatctaataatgaataggagaacgtttggagtgttaggtgaggattgattttgtcggttgaactttggttttggttgttgaacttttatatggtcggttgaatttttatttggtcggttgaactttgtttaatagttgaaactttgacagtgctacaaggtctattttagttatgtaaactttttttttaaaacaatttggttacttttttaagacaatatatttacaattgacatttatattcgggttagaatgagatatgacatggtttttttttaaaaaaaaaaaaaaaaaattagtgtttttagttaatttatt

SEQ ID NO: 104076 - DNA, 1307 bp, Cannabis sativa
catgatcatggaatgtcttcgaacaatttcgtataatattgttcatggtggagaaagtttgggtcctattgtcccatctcggggaatccgttagggagatccgatgtcgccgtatctatttatcatctatgcagaacgtttgtctgctcttatttggttgtatgaggagaggaagtggcttcatggttgtcgggtggctagggggctccttgtgtttcccatatattgttcgttgatgacagctttctctattgtaaggcaaacagagaagaggctcaacgggtcctggagtttcttaatacttttgagagggtgtcgggccagaaggtgaaccttactaagtcttctattttcttcagttctaataccgatgcggggactcgtgattctattttgtctcctcttcatatgagggcggcggatgatcatagtttttatcttgggttgcctagtatggtgggaagaaataagaatgtcactttcggctttctaaaagagaaagtgaggaaaagaatttacaattgggatagtaagctcctgtctagagcgggtaaggaagtgcttatgaactcagttatttaatctttaccgacttatgctatgagtgtgttcttgatccctttggaaatttgcaaggatgtggatcagcttatgggtagatattggtggcatacgaagtcttcacaaggcctagatattcattggaagagttgggataaactttgtctggataagcataaaggggggttgggttttcgaaatctaagggattttaatttagctatgttaggtaagtaaggttggaggcttttgacgaataatagttcattagtggctcgggtctttaaagccaggtattacccccattccttgttccttgatgttgaactaggtgctaatccaagctacgtttggcgaagtgttttagaggcaaaaactgtggttaagatgggtgcgagatggggtgttggagctaatttttctataatgattttgaatcaaccatggcttccatgcaaagaaaatccctatgttatctctactcatgtggctctccacgattgtaaggtcaataacttattaaaagtggattcctttgagtgggatgaggaagtacttcaagatttatttgttcaaatggatactgatttgatctgtcgtattccgttgtctccttcttcggttgaggatgcttggttttggattttagagacttatggggattattctgtcaaaagtgcttatcgtgccttacaggtaagcaatggtaggtggaatactcaagacaattcgagtttttggaggat

SEQ ID NO: 104077 - DNA, 691 bp, Cannabis sativa
  modified_base (225)..(238): a, c, t, g, unknown or other
  modified_base (310)..(314): a, c, t, g, unknown or other
  modified_base (571)..(573): a, c, t, g, unknown or other
ctctctctctctctctccaattttcgaaccctatagtgatagagtacatgcccacgaatagcagttgatacttaatcatattgtgtaagactgtgaagaatccaatcaactgaaggagattcagactcagatcttggtgatattctgctacaggaaggatacaagagttagtgatctgagtggaatgagtcatttaattaattttgctgcaatcaatgtaaggtnnnnnnnnnnnnnnatgtgtttaaattctattgttttaaaaattcatatataagatgttaaataatatacatggtagtaaatctannnnntggtaaaataatcctcaacaactggcctcatagccatgttaatgatttactttcatgaaatatggatttaaaatgatgtttgtgttgatttggatgtgttcatgttgttttatgtgcatgtttgataattgtatgaaaattgcaatttacgatgataaaatttaattatttcgttctgaaaagatttttcatagaaagtagataaaaaattaataaatttaggcttgtacagaatttaatttggattttttatgaannngttatgattttttgaactttgaataaaaatatctcaaagggttgcacacacgcgcgcggacgagggacctcactcggcatgcacacggcttcagacagcccatgaccgagtttactcg

SEQ ID NO: 104078 - DNA, 590 bp, Cannabis sativa
ttcctataatcatctacagtcggtcaatggtacttggaactcctctacggaggatgatgtttggaagatgttgtggaagattaaagcccctcctaagattttacattttgttgtgaaagctctttcgggttgtttgcctacgtgtactcaattgtctagtaaacatgttccggtggactgtgttgtgcagctatggggaagagtcgattttccatgttttggttcaatgcccctttgctcattcatgttggctccgatctgcgttaggtgttggccattccacagcaattttttttttgactggtttctggaagtgctagcagcgggcagtattggattggtggaagaagccgtcatggttggttgggcaatttggaaggctcgaaatgacatgctttggaatggtagaagctatagtgctgctgatgttatttggctggctcgtaccactcttcgccaatgcccgagtgcttagtctaagcggttgggcgcagtgtctctggtttccagtcgcactgacacaagagattattgatcccaaccggctgctggtcagttaaaaattaatgtggatggggcggtttttgaag

SEQ ID NO: 104079 - DNA, 588 bp, Cannabis sativa
aagcatattagcacgagcctttttggggattaaaactacaagagtggagttgatttcagaaaaatcaacacctttattgagacagtccaagatagcagttgtaaaatcattgcctaaaacagaccaattcttctgatagaaaaaggcattaaggccatctaaccctacagctttgtccccagaaagctgaaacacagcccttttaacctcatcagcaacaaacggctgagaaagactctctacactatgatcaggaagcccagagcctaagcaatcaaaaatggaggcagcagcctcaatatcacttccttgagaggtaaaaagatcagagaaaaaatcagtaattaaacccataattccctccaaagagttgataacctccccattatcagttttaagatatttaatatggttatttttgcgtctcgaagtggcatgcttatgaaaaaacttagtattcctatctccagcattaagccatttaactctagccctctgtttccaataaatctcctccttataaagcaaagcatcaagtaaagattgtaatctacccaaccgagccctatcctcattatttaaaaacaa

SEQ ID NO: 104080 - DNA, 1047 bp, Cannabis sativa
caagatctgcgagcaatttcaaagcttcgcaatgacaaattttataagctccctgtagttggtcatcacaataatgctgaaaagtatctgatgtacacaaggttaagcaaagaaaccaggggaattttctttgcttgtgtaaacgaatttatggatcctctagttttaacaaatttgggaaactatgcatattttggcgacttccttttactgtaagtttgtaatataaaaccttctttttgtcacgggaaacttttaattggtcagaggttgtatttggtggctttaataaagaatgtaagagttttatgtttttcaggtagttgttatgaatgacaggatgatcttcatcttatacagcctccaagattgtggtagaaaatctggggattactttttggggtcgtttggtatgcagtttttatttcatgagaataggtttaatattgcttagagagtgatgaagggaattataaacttaggaaagcaatattaccgtatgcgcagtaatattataatgatgtatgagaatatgaagattactttgtttgtttgacataggaatggaatgtgtcaattttttctttacaataatgttttttttttttgtaaaatactaataatttaatattttttttttctttttaaatgttcaaaataatttttatttattatatttcatattattttataaaaaaagattaacaataataaataattataaagagtaaaatatatatatataggaatgtcaatcgggtcaagtcaggcttgactcggcattgacccgtcttggcacaatatctctttggcacgatatctctttggtagaatttttaactttaaacatctatataaatttcatttttcataatacttatttagagattctcttaaattgatattgtcatatttttttttctaaaataaaatattaaaagctatatatctctcctttactaaaaaaaaaaatataattgtctaacaatgattgacacaattattatcgagtcgggtcggatcgggtcaatgaccccgataaaggtc

SEQ ID NO: 104081 - DNA, 654 bp, Cannabis sativa
accttttgatagggcttttgggattggaatcgataacaaatttagagaagaatgatagagaaaaatggttaacgatgattcgattacagaatttgtgcatttgggctattgtaagttaggccttgttgttgtgggtcttcgtgattagtatcaaatatactaattaacagtgttaattttaaaaatgtattttggttcttctctgttaaagttaacataatattcttttatttttaaaatatattctgttaaaccaagaattgtcgttagataggcacttttaatatataaagaattctgttaaaccaagaattctcattaaataggcacttttaatatatctattctatataaaatgtgactatataactgaattcttagtttatgaaaaattattgggtgattttttttaaaaaaaaatatatatattattgtgtggttttttattttaataaattttttaatcatacatctatctaaaatctctctctatactttattattattttctaattttttaacccaatatcaatttgaaaaatatacagaaatatcatcctataaatcgtgtatttaaacaaaactcaaattatactatatataatataaactctaaagttaatctgattaatttacacgatttctctctctctc

SEQ ID NO: 104082 - DNA, 520 bp, Cannabis sativa
  modified_base (216)..(216): a, c, t, g, unknown or other
gcatccgaatctagacccagggctaggacaaaacctgtagtcggtgtttggatttgggacccagccttggacccgaaccctaacaaggaaccgaacccagacccggacttgacccaaaattgtaaccaaaaccggaagttgacagggactagaactaggacttggacttggaatcataactgaaataggacgtagatccagaaccgtaaccggacnaggacccagactccaaatcagacatagaccataattgggagccagacccggatcccaccccaatcctagactcagacccaaacatggaaccaggctagggacatagaacaagggtcgggacctagaaccacaccacagtctcaatcccgaacccaaactcagaaatgagacttgggatctgaaccagaaccagactgagttcgtgacagtgatccagatcttgacttgagattcgggtaacagggtctggaacagacaagtagtcagtatctagatctgtgactcagactaggaccataaccca

SEQ ID NO: 104083 - DNA, 711 bp, Cannabis sativa
ggccaagtcccctccaaagaatgaatcctcgctgaaaagaaaaggtggaccgcgcttcgtgaattatactgagctcgcagtaccacgagaccatatctacgctattgaagagaagaataaggtctttaagaagccacccccgatcaggggaaaccgcgacaagagggaccccaaaaaattctgtaagtatcataaagatattggtcacactactttggagtgttgggttttgcaggacaaaattgaagaagtgatcaggagggggaagttcagcaaatataaaaggaacgaggaaagtcatccccgggcggatgacaaagaggaaaatcaaaacgcaagtggctcgagaatgcctcacaatatattgaccatcataggcgggtctcatatcgtaggtgactccagaaaatcgcaggagcgatatgcaaaggaagccaaggagaagccgctcaccaacgtgaacaatctcagtgagcgaccagagaagttgttcaaaagagaatgcgatgacatcacgttcatggaaagtgatgggacatgggtccatcacccgcattttgacggattgttcattgttgccaatattgatggagataacgtccattgtatactcgtggacgacgtaagttcagtgaatctcttgaacttccaagcctttaaacaaatggggttgcatgagaaggatctgcgacctgttacgtcgagtatata

SEQ ID NO: 104084 - DNA, 2323 bp, Cannabis sativa
tcaaatatttatcccactaagatatagtttctagacttacccatgtgactctaacgaccatccaacgcctttttcgtcgtcgccgagcaaaaatcataaaaattgcataactcatatttagtataaataatactcctagagtttaataaagtctccgaaattgagaaattataactctaatgccttttttttgataatgggacctacaatcataaaaatgttaatgattaatgttaattgcccttactaattcatattctaatgtgcggtcattacagtgattgctagaaatgttattttcaataagttataatatcctcacttgacctccgggaagagtagtgtatctccgtgtgttacaggaaaaacatgaaacaaagacaccacaagtgtggaagtggagtacggaacgaagctcccaaaagaaggttcacaagcagaaaatagtgtggaaccggaagacagtgcacaaccaaaagctgttgtggagccaaaagaacaagataacaaagaccaaacagaggcgcaagaaggattcacacagacaagtcttgaaagttatcaattggctcgtgatagaacccggagagggattcatcatccaacaaggtttgcagaagtaactatatagcctttgcactagcggtagtccaacaaattgaaattgaagagcccagaacctatgaagaggcaatttcaagtggaagcaagtctaaatggctgcagacaatggatgaggagatggattctctacggaagaacaagacttgggtagttgtgctgaaaccacagaacaagaagattgtggagtgcaaatggattctcaaggtgaaagagggaatcaatgagaatgaactagtgaggttcaaagctaggttagtggctaagagttttacttaggtggaaggtatagactatactaaaatcttctcacatgtggtaaaatacaaaacaataaggttgatgatgtccttggtagcacatttagaatttgaagttgaacagtttgatggaaagactgcttttccaaatggattcttggatgaagagatctatatgaagcaaccacctatgtttcaggtagaagggaaatgagttgaattagtgtgcaagcttaataggtctttgtatggtttgaaacagtccctaagataatggaataaaagattcgatatgtatatgcatcaaatcaagttcaaacaatccgcatacaattactaattatattttaagaatctggagcaatcgacagccatgttctttttactctatgtggatgatatgctcatcatgagtaaagataaatcagtgatcaaaagtattaaaaccaagctcacgagagaatttgagatgaaagagcttgggctagttcaaaagatacttggtatcgaagtctcacggaacaggaaagaaagaactattagcttgaagcagtccgggtacatcaagaaaatcatttagaagttcaacatggaagatccaaagagtacatctattcttttagggggacaattcattttgtcaaaggaacaatgtcctaacaatacgaaagagaaagaagagatgaaggatgtaccctatgctgtggttcttggatgcttaatgtacgtgatggtaagcacgagactagtcataactacactttaagcatcctaagcaaattcatgtccaatccaggcatagaacattggaacgcccttaaactgttattgagatatttgaagggcacatgggattatggtctggcctatgagaagtgaaaatgagaattagaatgtttgtggatgcggactatgcctcgaatagagataccgaaaaacaaccacttcctatgttttcttgacaaaccagaactatatatgttagaaggctcaattacaacccatggttgctatttctaccacgaaagcagaatttatggcgactacaatagcttttaaggaatcgttatggcttcgaggaatactttatgaattgaaacaaatcaaaggagaagtgactgtgtattaggatagccagtcttccatccatctttgtaagaatctggtttatcgtgaaaagagtaaacatatagatataagactctattggatcaaggagaagatagaataagggttggttgactaagaaaaggttagtactaaagataatcctgttgatgttggggctaaggtcttaaccttaaataagttcaaacatttctagaacttagggccagtttggcacagctgtgctgcgggaaaaagcagctgaaactgtgctgtgagaaaaagcagctgtagcaaaactgtagaaaaaagctgagctgagtgtttggtaaatt

SEQ ID NO: 104085 - DNA, 925 bp, Cannabis sativa
gggcataaaacccaacattaaattgttcagcaactacatgttgtcattcattatgtccaatgacaaataataacatagaaacttgctcctcaacagaaagatagggagaggctcttcaataatttttttctttttaaacaccacaaaatagtttgaagacgtccttatccattctgaataaatcataacacctactctcataactatgcaacactttcattacatactcatatcctgaaagggccgaatttttagaatgaccttttgagcatgtacaatatcatataaatgttaaccaaaataagcatattcacacattcttactttgttccaacttcgaattcaattttattcctacttcatcccgtaacagtaatgtatataaaaaaaaacactaaaccaattatcttcaaaaaattatttgaaaaagaagaaaaaaaatatatatgatccaattaataaacaacactaattaatctcatctaagaacattaatattctattttcaaaatcaactcctccttttatccaaaattaagagaaacaattgggcacaactattataattaagttatagatactaaagacttgcagataattaccgtgaaaatataaaaagatgcaacagtataataatatagtgtatatttatctaagccagaattaccataaaaattgcatagccttaaccaagtaaaccaaaaacatttattcaaactacatcatatatactcagatttggtattgttggtctcatatgggctttcaagaagtagaaaaaagatcaaaataagcaaaaaagaaaaatttcagtgtatgaaaaaaaagaggcaaatccaagtatgtgagttttaacaaatcagctagcaaggtgagcttaaatcctggtcttgatctcttttatcttgattcattaggaaaagat

SEQ ID NO: 104086 - DNA, 2764 bp, Cannabis sativa
taagtttatattttttttttaataatggtgtgtatttataattttatggggtgcaaataaaagtaccctaattattacccatccaattttcatcccactcctaattatagaatttttatatttttattccttctaatcaaacgccataaaaaaagtcgggaccgccaaagcatacttctaaaccgttgcctttccttagcattaccatatgttataaacctcattaactctcaaattagcattttcgcagatactttagaatcttggacccaaaaactctagaatacttcaacatcaaactaactcaaaacgaaaatcactaaacttcactagtttccttatgatagctttctcaaatgttcatcataagaatcaacgcaacgtacttggttggccggtaataacacaaacgtttcagttctcttcaattggaaccattttatttgtacctttctcagaaaacttactaattaaatagtacaatagagattagagatgagttcttaagcgtaagcagtcaaattgtcatcacaaagaagctcattatttaaaaaattccaaaaagtagtataagtaggaaatttaaaatacatatatagccttaatggtttattccatgtcagaaactggcttaaataaatcaacaaatccagacattggagagatgattctgaacttttgttttagaaagggaatctatactatcttagatttttatgactagtcatgataatcagtgatatttcaactaataaagataaaaccatatcattttcaataaaaagaaaaaacagataaaacataagaaaataataaaacaattcagagacaaattatcaaattcaaactccaacataaaaaatagtttcttcacctccaattgcagaaataaatatgtcaaacaaaatatctccaagaaaatgaagcacacaacgaccaagttctgttagaatcttcatcacaatcatagcaagctaatatagttatacagtataatagaatctcttactcaaggttctatacatcatggtgcttcaggctcttctttgcagaccgcttcacatgtttccgaccacggtgtgaatcatcagagtcacctccatctgaacgagatggtgatggtgatcgcctgctcttcctcttccggtgtctatcatcctcagatgaatcggacgcagaatcatctgagtaacgatgacttcttcgcctcctcttttccttcctactcttcctatgccgtctacgtcgatgcttgccttcctcatctgaagaatcatctttctttaccctcttctccttctttctcttcctcctaccatcatcagaactaccagaatcatcactttccctcttcccactcctcttcttcttcgaccttcctctctttctccttttcccagagtctgaatccaagctgtcttcatcatcatcatcatcatcgtcagcatccaaatttttcttctttactgacctatctttctttctagcccttctcccagtcctctgagaaataatcctctcaatctctgaatcacgatcagaatctgattcctcactttcatcatcctcatcctcatcctcactatcctcgctctcagcaccggcttttcccttcaccttaccaccctttcccttcaacttatccaactcagacataacatcagcctgaatagctgctgggtctttctccttgatcaaaaagttcctacactgaaaccttagatgcccaacacggccacatctcttgcaggcaccacgagcaacatcggtgttcgacccagtaatgcgagcaagggcaagaagtccttgaaagttggcataaggattctcgccctctggctcggagttggccgatttgtgctgtgtagagctcttatcctcctccttgtttggagcatatggatcatacccaattgcactttgccatattccgtgcgtctgtagggcagcactactgtgcaccctattgttcgcgggcatgcgaacccttcctgctgtagccggcatactgaaaatccacagacccaaatcaaaaccataccaaattaaattaaatcaaatcaactcaaatagtatgaaatcttgataaaaagatatgattctaattaatcgcattttaaaaccctaattttggataaaagggagaatcaggctaatcgaagctagcaatgtaaaactctcaatctaaatttataacattcgaatcggaaacccccaattcgaaaagattaacataccaacgatacaaaacgagaaattatccattgatgataaaaatatagattatatatatatttaacacagcacgattaacataataaaagaaaaaagaaatacttggcagattgttggatgaacttgttctacttatgtgatcgaaggcaacgattgaaatgaagatgggtattttccttttgtagcaattggagatttatatttgaatgtggtaatggaggaaaccacacaaacctcaatccaggttttttctctttgcgacatctatataataaaaaaaataaaataaaaccaaattcaaatgagtcggtccctatctcaaaaaaataaaaaaaaaataaataaataaataagtcggtcccattgggccgaatccgacgttgtatagagttgtaaaatttacatcatacactattttttccaatttattacgtaaatattgtcggtattttttgggaaatttacaaaaatactgtaatttgagttaacttttacaaaaatactgtcacacaaaaaagttttcaaaaat

SEQ ID NO: 104087 - DNA, 833 bp, Cannabis sativa
  modified_base (355)..(356): a, c, t, g, unknown or other
tatagaaattttgtctgtgtgtcgcgatatttacttttaccggcagcatttccttcgagccaaatgctactgagaatggagtatgccctgttactgtcttctcagttgttttatgagcccaaagtacttgaggtaattcaccgacccatctacctttggcagcgcctaacttcttttcgatagtatcctttaaggttttattaacatcttctacttgccctttcgcagaattcattgaataagtcaccgtcgaactaagttctgttatcagatacaatcttaatgggtattccaaacctacaaactatgttttttacaacaaagtcgaggacttttttgcaagttatggaaactnnaggttcagcctctgtccacattgtaaagaagtcgacagccaccactgcgtactttgctcctcctcgccctgtgggaagtgcaacaattaaattaatcccccatattgcaaatgggtaaggcaaggtcatcatcctcagctccaatggtggtacgtgaggtatatgcgagaatctctgatatttatcacacttgccaaattcatgggtgtccttgtttctggttggccaggaatatccttgtcgaataatattttttgacaagctttgccaatctgcatgaaccccaggaaagccttcatggatttctctgacgatctcgtttgcttctgtgggaataacacagcgtaggagaggcatttgatagtcccttgtatataatttcccttctactatcgtgtagcgaggcactaaatataggagttttcgtgcctcgtttttgtcaattggaagttatccgttgagaagatagttaactat

SEQ ID NO: 104088 - DNA, 522 bp, Cannabis sativa
ttttgagactcatcgctactctgaaagtttgaagaggaagaagacgagatctggacagccaacatgcttgttgagagacggagaagacgaaggcttggtctcgaataaatttattgttagagtttgtctgtttgattctatattagttgtttgaaaaaattatgatcaggattaattgtcctatttagatttaagaaggtaattaattatattttttcagtttttataattttttttaataattattatttatttgaataatatttatatttatttaaattgatatagatggaccaataaaaatatgacatgtgttactttagtgaacacacttaacatttaacagaataatagtaacggaaatggatggaaactaacatttggtatgtaatgcgctaaaaaaaaagatgtggtatttaagtgtataaaattaaaagtacttatgccgcaaatttcttttttttttttgttttagaaacttctatgccccaatgatccgtgtgctctcttatatataactag

SEQ ID NO: 104089 - DNA, 507 bp, Cannabis sativa
gaatttaacccagtcccacatccggatgccagtatcacacacaggaaaaatgccccagggtgaggatctccacaaatagaaagccacattacaagataagaacagatgtttaatagtttcattctctatcccatacagaggacacgacacctcctcaatgggaaattttctgccgatcacagaacggacaggaagagccttggccagaatacaccagcaaagagttttcagtctttcagaaattttactgttccatagtctattccaaagagacggggcgacctcacaaagaggcgctctgtcaagggcttgagcaagataagctgatttattcgagaaccgcccattcccttccaacgtccaaatccatttatcgctggccagtccagatggattaccccctttcaagatatcagatacagtacccttatcgaagcactgtttaacaaggggatattccatccctcattatctaacaatagatcagcaactttggttacccaaacc

SEQ ID NO: 104090 - DNA, 696 bp, Cannabis sativa
aacgtctgatcaaataaatttctaaattatatatatataaaagattaatctccaaatatatgatcaataaacaaaattagatgcaaaaaaaagtatagtatacagtatacaaacctataatatacaaaaaaaaaaaaaatacaataatataaaacttatggtatacaatatcaaaacacacattcaaacaaacatcaataaaattgtaaaaagaatgaaaaaaagccctaaattataaaacattaaaatcacatttaaacaaactgcaataaaatcctaaaaaataaataaataaataaccattatgtatacagaaacaaaaaatcacattcaacaaacgaagcaataaaatcctaaaataaatacaaatacaaaaagactctctaacaaaatattatccaaacaacaaacttaaaacatgaaaatatatcctaatcatatgaaaaatacacatatataacaatcatataatatacaaacacattttttaaaaataaaaaataaaaacaatctaaagtatgtagtatcaaaaactaaaaaatttacaaaaatcgcatgatataaactagtatgcatattaatgataaataaaagtatattaaccaccaaataatgatcaataaactaaatcagatgaaaaaaattataaaatagagtataaattaaacaaaaatacaaccctataatatacaaaaa

SEQ ID NO: 104091 - DNA, 558 bp, Cannabis sativa
tctaattttcaatcgcagttttctttttatttctcatttttagggttcaaaggatgaaaatacccctgcttgtacgggctctcgccgccgcggcgcggccatggcatcctccgccccggcgactggagcccccaaaaacgacctctctgttttcgagttatggccccggccatggtgatctcgccgcggccaaaagtgcaccgagcctcaatttggcgtttttcttggctccacttgtcttttattgcacttttgtatcccggggcctccataactctgagaaacctgaaaacataaaaaacaagcgtaattctgtcctaaaacatcgaaaagtgaacataaaagtgatccagaatataggctagaaatagcctaacaactatcttcaatagggttagagttgaattattaggaataaaaaaatgataaaatagggtaaaataccacttgatggccggctacttaatgggcccaactcaagtttgggttttgtcatttttcccaactattttacctatttttcataaataccacttttgcaacttcaaccctataaat

SEQ ID NO: 104092 - DNA, 1488 bp, Cannabis sativa
gcagaaacgagagactcaaaactacccggtttcccaataaatcaccttgtcggaaaagtgaaaatatgaagttgtgaatttggttgttctgacttcatggctctcagttattgtgaaaaactagacgaacaatcgagatggaattaaaatccgataagtagaacccaacgcaccaagtcatatgtcaacctgagcgttgggtgcttatttcagagcttccaggattttattttgatgcttccaaggttctagaacttgaggacagggtttcccacctcgtttttgaccatttaagggagaattcttggagcaaaattggcatttgactgatcgaaaccagcacaccaggttatttttgatttctccccgagtttgcatgtatcttcgttatttttgatgacgtaaaaagtgttcggtacaatttttttgggaaactaattggaaatggcctaggttaaaaatatctcgacttgcgcgctggcccagcaccaggtgtcaccctgggcggttggtccaatttcaggccacttggaagttccttttggtctctgaaaatagttgaatcttaatctttggcgaaaacagagaacatgcccataagactttttgaaaaaactcctcgaaattggcccaggttaacaaaatgtcaacctgggtgttggtcccttgttctaacacccagtatgtatttttttttatgaatacgaagaagatgcatgagttagattttttatctaatgcttggaagtggcccagattgacagattgtcaacttgggcgctaagatgcctaggcaccgggtgtctgggtgctcaaaaataaaagttctcaaaatctaattctaatgcctcaaatatatttgtggtatgaaagtttgacccatttgcactaagatggtcccaaaaactaaaaccctagttaatgttgtcaacttgggcactgggtgaaaccctagatgtccaagttgactttcgaggtgttggttcgtgtatttttagctcctaaggcctagacttggttgttccgtgtctaaatggtacaagatactgaatgatagtgagttggaaactgcaccctagtttttccctttgggagttgaccaatcaggtctattccccatacaacgaagggccgaggagactgcatcatcgtgagctcgatgggtggagctctaggaatcttcgagaatctttggcacttgtcacatgttttgacatagtccatcaaatcctcgatcattgttggccaaaagtacccctgtcagagtatctttttggataggctttgcccccgacatgattgtcgcagaagccttcgtgcacttttatcatcaaacgcttgacttctatcttagtgacacaccttaagagcagcattgagaagcttcatctatactttactccatctaggattagatacctagtagcttttcttctcatcttttttgcctcatttttgttttcaggcaaggctccaatttggaggtaa

SEQ ID NO: 104093 - DNA, 661 bp, Cannabis sativa
gtttatattgaacttattccttccagaaattgggattatccttttttgacaatatgtcccaatctgattttaaaatttcaactccagattttctagaaatagaatgccctaacgaatgagctcttccgtttgaacccaaaatccaaaaacctaaatccaaacttgagataaatgatgccaaaattagggatcatctaataaaaaccaattaggacaaatttccagtcgctataggcgattgttataagaaataactgagggtaaatgtcgttatctgtgagatgcagcttggcctgaaccctaaactttatcttctatccctttagcgagacccttgtttttacctttagtcattgtttctttttcaccaggtgacctagattttgacataatgaccacccacgctcgtaaatcaaagatccttcaagatcctaatgttacttttgaggtcgagctcttcgaatccaaaataagggccattagagattttttcggcggtgtgtcaaagacttgtggcatcaagcaagggcgaggatgtcgcattagatccgtttcccctggggaatttagctgctttccaccaaaaaaggttattcgagaagagtgtggtgaagctagcactagtacctcgtcaggaataggcgcttggagcctcaaacat

SEQ ID NO: 104094 - DNA, 843 bp, Cannabis sativa
  modified_base (119)..(119): a, c, t, g, unknown or other
tgatttttcttagttaactcgatcagtggcatagagatcttagagaatccctcgacaaaatatcgataataccctatgaatgcgagaaaacatcgaacttctgtcacagattttggccncggccaattcttcactgattcaatcttactcgggtcaaccataattccatcttttccgaaaatatgccccagaaaagatgcttctgacaacaaaaattcacactttttgaagtttgcatacaacttatgatccctaagtcgctgcaataccattagaagatgatgctcatgctcctcttttgactgagagtatacgaggatgtcttcgataaacactatgacacaatgattgaggaaatgcttgaatactctattcatgtgatccataaaggccgcaggagcatttgtcaatccgaatgacattaccaaaatctcatagtgtagtgtccatattttgttgttcgaaaatgcagtctttggtatatcttcttcccgaattctgagctaatgataatcggatcacaagtcaatctttgaaaacaccgtcttcccctgaagttaccatttttcgcttgcaatatatattggtcgaatacttggacagaaaatccatcccaagtataatgtcaaactgtgttcattccaactctataaggtcagcattcaactccctatctttgattttaacttgcatagacctaatgcgcctgttagagataaccaactcccctctaggcattagtttccaaaccctttttcaataaaatcacatgacttacccaagagatcgattacccatgtagccacatatgagtgtgtagctcccgaatcaaataatacagta

SEQ ID NO: 104095 - DNA, 632 bp, Cannabis sativa
gaaccagacctcgaactccgatcctagacccgaatcctaaccttgactcggtagacccaacctcggccccaatcccgaccgctactccaacctcgaccagatcccaactttaacttaaaaaaataatatgaaagacaatgagtgaggagagaaaaggcgatgagagagagtagtgagagaaaaaaaaaagagaaaaagtaattacatagaaaatattgtgtaaaaataatgtgtgataaaatagaggaaaatattgataagaaaaaatcaattgttttataaaaaaaaatattttatggctctcaaaatttttattttttgaaaatggttctctaaaaacatggccaaacacgcatataattgttctcaaaaaattagtattttagttatgatattaaacatgcgctaataattagtgttgttattgttatagtctttttttttttattaccaaaagcatttatagataggaaaacattagacctcacggtcgttacaaaataaatttataggcattgaagaaatatcaagataaccataccagttatgagcaaatacccatttggtcacattatgagccatgaaattacaagttcttacaatattaaaaaagggacaaccaacaaaaaaag

SEQ ID NO: 104096 - DNA, 697 bp, Cannabis sativa
  modified_base (401)..(405): a, c, t, g, unknown or other
aatatttcctttagatctattacaacaatcacatggacaatgaatacgttcgggatttttagaattctttaaggcaaactctaaaaatgcatgaaaccgtacttgaaatcgcagtgtgtctctctcctcatgcatccatgatttatccataacaaaaatcctaacaaaaaaaattcagtatttagtaactaattataactagttactacttacataatgcaactaactagatttctcacaattaattcatattaattaatattttattataattcttgtttcatgtttcgttcatgttattaacttgtataagttgtaattaactaactagggtagtgtttaattgattgaaatggatcgaagaatggaaggtcttttcctaaagtgaatccattcatttnnnnngtttgtcatttataattgtaaagtttatataaatgtgtaaataagtatttgtgttatgtcatcttatttctaacaactagaaagtaattaactagttatttgtgttatgtacttttccttcaatatttatattttttagtaaaatttatcctaattctaccaaaattcagcagcataacggctgtaattggacgttccaaaaaattttaaaaatacctaaaataacaaacaaaacaagtaaaacaatacatagcaaacaaaataagattaacaatacaaaatttatccaccc

SEQ ID NO: 104097 - DNA, 3297 bp, Cannabis sativa
tttctgaattttttttttacatttgataaatataatataaaaatgctataaattatttttaccaaatacatataaatttatactttgaaaaagtaatttaaaatatatataaaaaataaaaatattatataaaataagtttttatatatttgtgattataataaactagattataacattatcattattattatactagatcttaacaattcatagtactttaaaatttataatttatcaaacattcagtttaatttttttcacagttctgctgcagctgtttttctccacagcacactgtgctactggcccatagtttgacatttataacaaagaaaattagtaaaagtactagtacagtacttaataactataattagtatagaggtttatagctaatttataattatttaattataatctacactatacctcatgaagcagctgcctaattttggtttattgatgtaattaataatgttttaagaaatttaaactaattaaacattgtatacaagttttgaatctatttctgatatttatcttatatattgtttgtgtaacgaatgttcctatatatataggacgtacgtacatcgtaaatataaaaaaaataaaagaaaactgaattatatatacaatatatatagtatttgattattaatactacatgatgatatacgtgtagttattctgcccatgaataatttcctttaatttgaatccatttattattattattttttctagagaaactaaataacaatggaaattatatatttaattctattaaatacaagttaattaattattaattaggatatatatgtaagcacttaaaatttttctccctagactaataacaaatgaacataatgacacaaaagttgagaaataaataatacatatataactcatcatctccgccaagcctatatatttatatgcataaatttatctgaacagataaaattgctataaataacataatttaaattaatgttcatactgataagagaacttttttaatcaatatagacacatttttaggaaaaacaaaggtattatatacgactaaatgagagtagagtattataaatagttatatatttgttacaaggaatgcaattctttcacaatctgagaataatataatctatttcttgaccatggtgtgtacataatatacccatgccacttggccatgagtacgtatagtaaatgatcttgaacgcttccagttaattaattaaataattatatatatacttaacctagctatagattaataaataagtaaattatgtatgtaataatatataaatacgtacatagctagactaatccttggtcagccattgttttctagataaaatttgttattaaaagtataaaaaatgaaactaattataaattattatttttatactattattaaaaatttcgcaattaaaagtattagttataaaaattacaatttaagtgtatttttaatcaaaagtaataatttttattatatttacaaataatatttagtcacaaaaaaatttatattgggattaaaaattatcactaaagtacatagtttctttttttaattaatggcagttgcttaattttcatgagcttattaatttggtttgtcattaactaattctttaaatacttattaagagtgatctgttagctatatatagacgctaaagtaatactactaattgttattaggtataattaagtaatgagatcaggttttattttttaaatggggacttaaaataaacaatatatacattaatagatataatatatttttttttggaaaatcaataagttatatttcaataaactataattaaacaaatacattatatcagcacttccgtaaaatagatataatatatttttatgggagctaattttttcaaattatttagtgtatagttactaaattaaaggcacattcatacatatatatatatttatgtatctgcttttgacacatacatatatgttacatttttttttttgaaagggggggcttcagctttcacaggacacacactgtgtgttcgtcattaattgttagttgtgccaagcaccccacgatcgaggtgccactttgtgaatgtttagagaaattccttaaatcaaaacatataagtatcgatatttagttattgcatgtacgatcgatctagccacctggcataatttttattgtataactactttacctataataccaatatatgatgtggctaaatgtaattaataatagttatgtttaaatcacagactcacatcagtctttttcccgatcaattatttatttattttagatagttttcatgatttgaaaacataggttaacattactgtttctaatatcctattgtatgtatataattaagttctttttaagtaaaaaagggttgcggatttttcttaattcgaagcttcatacacataagttaatgattccagagtacgtacgtaacattatttacattaattaaataatgaatattgttgatgagggatgagggatctactccagagtaactctaatagtaatattcagttaaaaatttctgcattattatctaaaaatgtaatataatattttatttttttcacattttttttttaaatatttcaataataaacatacttaaaatttattaaaataatattatattattatttaatattaaataattaacaagcaatgacataaaacgcaaggagcattttttactttaagataaaataataataataaaaaagataaataaaggatgtcaatgtttttttattaaatgagagattttattattcttttttttttttttttttgaaaggaaccaaagttcaaattaaactgattgaaaacagataattgggatccagagggggaaatctctccccttgaccttctttagaaagattgtcaatataagagagaacctctcgattagcaaaagcaaaagatacattaataaaactctttttaagatccaagaccaggtagaacagtggccaaatcttccaattcaggggcctttcaaaaaatttgttggtcctttttaaagaaattcctcctatcaacaaacaagtaataatttttctttaagaacactctaatcaagttaattattcacataagaatcaactctaatcaaggatgtcattgttaaacattgtttattggtattttttttcacgagcattgctattaggtaccagtggtgtctagcactttctcgacatgtcgcgttgcgattggctagcgat

SEQ ID NO: 104098 - DNA, 511 bp, Cannabis sativa
tattctattagtattaaactagtttataaaatcacacgtggcgtccctatagattagggcattacagtgttggttgcagaagtttgggaattctccgcagtcaaactactttccattgtccgagactattttatgaggcaagccgtatcgacacacgatatatttgataacaaagtctaatgctttcttagcagttatggtcttcataggtttggcctccgtccattttgtgaagtagtctacggccactatcgcatactttacccctctctttcctgttggtaaggacccaatgagatttatcccccacaccgcaaagggccaggggctagtcactagagtaatttcgttgggcgaggctctcggtatgttcgcaaatctttggcacgaatcacattttagaacgtagttcacacaatctttcttcattgttggccaaaaatatccttgtctcagtattttttttgagaaactcggacctccggtgtgatctccacagaacccttcatgg

SEQ ID NO: 104099 - DNA, 1556 bp, Cannabis sativa
ttcctatataatactattagagtatactatatattatatatatttgatctcatgatatgatttgatatatcatctcttcactcattgctctctatttatagacatttaatttcagttcaaagctggatataggaataataatataaagagagaatgttagataagaatcatcttctcatggctagtagattagtttctgcaccttgtaataatatccattatgaaccagccaatctttttttttttttttaactaattttgccatacgtacttattcttggtttggcttcccataatggaatatattctgtaatttgtcgagggaccattcaacattataatgtactgtacatttcgatcataatacacgtcctccttgaaatatatagtaaagcaattataaaataaaaattgaaaaaaaaaacagattgagaagaagttgaaaaagtattaacatctgtgtaacagtgtatttatgatcactaggggctcgtttaattagtacgtcgtataagagttgtattgaattaaataataaataatattatgtttgcataaaacaatctattgtattaattattacaactaaaatttttaatacaactatatgttgtactattattcataacaaatggtccacattatagctattataatatttacaaaggattcaaggtcaatatataataatctccaacccgaacccaaactcgagacccgaactcgaacctgaacgtcccaaacccaagaccctggaacctagacccgggacccgtacccgtacccgggacccaaatccgaacccgagactcggactcgagacccgaacttaaaccccagacccgcacccggacctcagaaccgcaactagaccctaaacccgcacccgaaccccagaaccgcacctagaccctgaatccgcacccggaatccagacctggacccaggcttcggacgtcgaacgcatatcacaattaataaagaatatatattatttttgtgaacacttattatattaagcattatttgtctaacactaccacaaaggtaacttaccttgtctagaaaatagttagtaatatagttattatattaaatcaggtaacgagacttaataaataattatatttattatcgatataacctcttaggtgatttttaacacatttctctccaaaacactatatatctatatacggtacgtagatgagtgggttgacccaggagaaaaaaagtggaacaaaaggtatatagtcaaataattattataaacggatcgaatgtccttatcaattgtgatcatacatgaatgatgtaaatatataatatatattcggaacatgattccataaatatatatactttcattttttagatgccatgatcctcttccaccttatacacacaaaaagtcaatgcattaatacatgatttccactcaagtctgatagagtcaatgactcaacacacaacaaacccttttgctttttattgactttgtatcatgaagcaatcacacacacatgtcacttgtcaagcatcacacactcacacac

SEQ ID NO: 104100 - DNA, 705 bp, Cannabis sativa
  modified_base (637)..(652): a, c, t, g, unknown or other
ggggatgggggtataaataggtagcggggatgggggcggggatcgcattccccgtacattaaccgaccgatttccatctctagttaggaaggaattagatttagatctaattggaggtaattacacaatttttgaccatgtaattatactaacaattgagaatctaattaaactcttggtgtcatgaaaattgaatgtcattataatgtgtaatgactaaaaaaattctatatttaatattaattatgaaaaaatattattttcatgtgtaattattaactattttaaacaccttataactaaatacaagtccaactcaagggtgggacagtaggatcccacgccgaaggccccacccaaacccaaaaaatcctataacaaaaaggtcctaaattagtttttttaaaataccattttttatatttttactattatttattaaaaaatatatcttttctaaaaaaaaatacttaatatattttcttaagatactacatttaaaattttactgaaaaaaaaatagtccaattatatttttaaaatactatattttaaatttttaccattatatataaaaaaacataaaaacttttatataaaaaagcccaatttgattattgaggaaattacactctannnnnnnnnnnnnnnntcctcttttatttttaccctcttttttaaagtttatcatttttacctcttttt

SEQ ID NO: 104101 - DNA, 619 bp, Cannabis sativa
ttggaacatggtaatatgaaataaaaaattatagcaatatgaatggaatttttacaaaaatattggattttggattaaagtttataattttactgccacacggaattttttataaaagtactgtcttcttataaaacaatcgtaaaataacaaaaaagaacaattaaaaacaatagtagaacaactaaaaaataaccataaaacaacagtgaaaacttaacacagtacacagtatgaaacttacgcagtgtttttgaaaaaaattccgccccacagtaaaaaagaaaaaagtttgaaatttcaatatgtggtgtaaaattgaaaattttagttatatagggcctgctctaaaatttagtggttataagaaaaaaaaattaatttttgagcccttatttaaaaaatatgatatttttcaaaatcaacaaaaattatttataattttaaaagaaaataatatttttttggacctctaaattaggtgggctctaagcacaggcctaatctgccttcattgtagtaataatagggaaacttataaaaatactggaatttaagttaacttttacaaaaatactgtcacacggaaaagtttttaaaaatactgtatttttataaa

SEQ ID NO: 104102 - DNA, 629 bp, Cannabis sativa
atttttaacggccaaaaaggttcagggggcatgatttagtatatgtcaaagttcggggagaaaaattgctaattagcctttttaatattatacataatattgaaaataatattgaaaataactaaaacaatttaattgatccaaataaggtattgttataccgctaaatcaaaataatctctcatctcttattctatttcttgatctgtccgtccatctagtatttttttttctctttcctcgtgtgaaggaacaaaatatataagtttctcactttctataattttattataattgttttctttttctttctcaatcaattctattattttaaaaatattttcgaattactctactaattattttagttcgaaaatgatattattgtgatttattttttaaggtgatcattttaacatttgagaagtataaatttttttactatcattaaaaaagataattaaaataaagagcaaccttttaatttattttatactttatgaagagataattaaccaaaatttaaaaggaaaaataaaaaaaaaatacattttagtaacccatgatgttggttacttgtttaagttaccttaattttttttagcaattttttatgttaattgtaaata

SEQ ID NO: 104103 - DNA, 719 bp, Cannabis sativa
tatgaagattcaaagttcaaagcgaagcaccattggaactggtccattctgatgtgtttgggcgagtcaaaaaaccatcaatcagggacatgcagtacatggttagattcattgacgaattcttaaggtacgtatgagttttttttttttttttttatgaaagaaaaatccgaagctttttcaaaatttaaagagtttaaagaaatagtgtaaggagaagtcgggaagaaaattcaatgcctccaaacagacaacggtgacaaatgcacctcgatgaattttctgagtatcttcgagaatgctgcatatgccatcaattcacatgtgcaaatacgccacaacaaaatagagtagttgagaggaagaattgccaccttgcaaagagatgtcgaagcatgctacatgtaaagaacaagaaggaatgaaaatatcagctcatgtcatcaatagacttcctcaagaaaagttagggttcatttcaccctttgaaaaactgtggggttgtaaacctatagtaagtcacttttgagtaattggctgcgtgtgctacgtattcgtgccaagccacctacatagcaaatttgacaaaaaaggtgatacgatgtatctttgtgggatacgaaaaccaacagaacatcaagaaatttggtcttcgatgaaacatcatcatggtggtcatcacaaaaggaagcattaccagattctaaagaaatagaaga

SEQ ID NO: 104104 - DNA, 1420 bp, Cannabis sativa
cagttagaaactgcaaccacagagaatacttatagcacgaagagattatgatttttttagatgtttaattttttttattttttatttttggtttaacttgttcccatgcctattcgattttacatactcacaacttaacaacaactccctagggttaattattaagtgtaggtggaaactttaccaaatttccttttagcaaaaattgtttatgttaaaagaataagctttgtttttagtttttttttcgagtattttttttaaacaaagtaaataaaattacaactaactaaatacaataatttaaataataacaataataatagtagatagttatataaaaattaggaggcgcaaaatatcatcaaccaacaataataatgataataatagtagtagtaatattaataataataagattttaggaggcacaagatgccatcaactaaaatgataagcaaaaataaaagttaggagaggcactaatgccatcactagagaaaataagtaataggaggcaaaaatacactcaacaatcaagaatttatgaggcacaaaatgcactcaaccactaagagaaaaataaaaataaaaggttaggaggcgaaaatgcattcaactaataaatatgtaggagacacaaaatatcatcaactaccaagaaatatatataaatataatataacaatatatgtataaatttcttttttttttcaaatgtttttttcaattttttaacttttttttaaagatgatagtgagaatataaaaataaaataattcttctactagttattttcttttatttttccaaaaaaaaaaaaataactagtagaaaaattgtttctttcttgcaactccacggcaatagtgccaaaaacttgttgttcttaaaagagggtgttttaatatttataatcgcaagtgcacgaatcgtttcagaatataatgttcatgtaagaacgagatcgaacccatgcgaattaactaacaccaaaataaactattttaaataaatcaagaatattctaacctagttccaaatattaatttgatgagattttagtatagaaataaaagacaagtaataaaaagattaaagattaaagatgagtgaatatgaaaatagtttttaaatatgatgtacaaaataagattattaagatattagaatccacaaaatgcaagtttaatagtatttataagtatattgattctcaagtttagatatagttgaaataaattacactatattttctaaaatatattttctattttagcacaagttgttttcaaaaagatagaattttgttcacttataaaaggtatataattttgtgagcattaaatgtgttacaatttaatgaaactacacaaaattaaagaaactatgtttaaaaaaaatataatacttatcttc

SEQ ID NO: 104105 - DNA, 590 bp, Cannabis sativa
gcaaatcacagctacttggacatgggaatcatggaatggtgtaaagatgatttgaggttttggaactgagggctctacgaatctgagattagttgctatggatccgaggacagaagtgaatgacgatgtgtttggtgtgaaaagtgttgtgaccactggaactgatagctcagaattgattgacacgcattcaatgaagtttttagcagttgccaatgaataatgagtttggagaaaaagaagagaatatagtagcagttggtgtactgctactgctacggatgatgattttaaaccttataaactacaacttcacaatgaaattccacaaaagaaaattctagcattcaaagctaacaatatagcacaagattccatgatttcccttttacaattcctaatcagctgcaccagcaatttttatttaaatttatgtttgggaggaactttctatctaacatcccttaataactaacaacaactatctagttacaatctgatttcccttgtacatatattttctttttacaatctgattttacagcaacatttctaacccaaataattaaccacatctataacaatgaaat

SEQ ID NO: 104106 - DNA, 1082 bp, Cannabis sativa
ttttaatttttttttagtgtaattctatttagttataacctctcaattaaaatataatttgattagttccaagtgtattcttgaatagaaattctacttttaaacgtacttgaattatttttaacttggtgtataagagaggttgatcaatcccaaggagatcacatgcactgaaaaatgaagatagagaggatagacattattcagaaaaaaaaagagtagggcagaagataggcattaatgatatacaatgattgtgtttgtgatgaatatacataaaaatgctaaatgatacttggatgttagtactcgtatttaatatttttatattatgtgatgtaattttattattggtgtagttttatttattttaatctaataataaaaattataaaaaatcgttaataatcaattaattaaagcacgttcaataacttttctactctattatttaaaatactaaaattttattttctttattttacaacacatttttttacattatatcattcatatatttttttttataagaagtcgtgttataaacaaccttatactccataacaatacataaaatagtaaaaggattgctttgtccattatgaaagaccaaaaaaaaaaaaaaagaacttgcctcttgatcctaagcaagccctaagatcaatagtcactaactaccatgtaatgttgatgctttgcaattttgtcttcccaattaccaacaatgatactaacttgtgcaaatgtaggccaagttttttgttacaacatgaattttagagttatatattagaatatttcgttcccattatatataattaattaattataattgattaatttagtatattaaaatgaatattctatttataaactaaatatttcaattgataatttttattatcttaattatttaatttatttattttttatcaaaatattctaacaattaattatagtagagattttaatgaaatatctcacctatttaaatatagggtctcgatcttaattgaggtacctgatcaacttttataatagtatttaatttatcaagataatcgataggattggtggtacct

SEQ ID NO: 104107 - DNA, 959 bp, Cannabis sativa
aacccctaaaccccaaccccaacaacaaccgtaaaccgtaaaccccaaaccctaaaccccaattcccattccacgacccattcccactcccattccaatttcaattcccattcccaatcccatcgccatctccattcccattcccattcccattcccttcgcattcccattctcattccccggcccactcctatttcaattcccattccctggcccattcccaataccaatcccattcgcattcctattcccattcctattcccattcccattcccattcccatttttatacccattcccacccattcccattctcattcctattcacattcacattcccattcccattccttggcccattctgattcccattccaattcccattcccatccccattcccgttagcgttgtcattcccattccccgacccattcccattcccattcccattcctatttgcattcgcattcccattcccattcccattcgtattcccatccccatttccattccccagcccattcccattcccattgggattcccattcccattccttgaccccttcccatttccattctcgttcccattcccattcccattccctggcccattcccaatcccatccccatctccattcccattgccattcccattcccattcccttcgcattcccattcccactccccggcccactcctatttcaaatcccattccttggccaattcccattcccaatcccattcgcattcctattcccattcctattcccgttcccattcccattcccatttttatacccattcccacccattcccattcccattctcattcctattcacattcccataaccattcccattccctagcccactctgattcccattccaattcccattcccatccccattcccgttagcattggcattcccattccccgacccattcccattcccattc

SEQ ID NO: 104108 - DNA, 601 bp, Cannabis sativa
  modified_base (26)..(38): a, c, t, g, unknown or other
  modified_base (65)..(77): a, c, t, g, unknown or other
  modified_base (104)..(116): a, c, t, g, unknown or other
atcgttttagaaagttcatatatagnnnnnnnnnnnnnttagggtatttaaacaacatacttgtnnnnnnnnnnnnntatttaaacaacatacttgtgagtagnnnnnnnnnnnnngtaaaataaattccaacagacttatggcctaataagggtgtaggaagtctatttatgagatagacagcagtgtcaaagtatttgagtggcatttaagcttgagcaagcaaagtaaggcccatttcaacaatgtgcctatgtttgcgctcagcacgaccattttcggctgaatcatgaggacaaggatgttgaaaatcaatgccatgttgatgaaccagttcagtgaagggttggtattcaccaccctaatcagttctaaggcttttgattttcttttcaaatttattttccacaagaattttgaattgtatgaatgcattaagtgccttggatttagctttgagagggtataaacaagcaaatctgctatggtcatcaagaaagtgtatgtagtacttgtgattgatgttagatgcaatgggagctggcccccataggtcagtgtggacaagttctaacatagacttggctcggttagaggacaa

SEQ ID NO: 104109 - DNA, 797 bp, Cannabis sativa
  modified_base (579)..(582): a, c, t, g, unknown or other
gcacgtgtccttcaatttttttttgctttttaatttttttatttattttattgaatctttagtgacacaccttgtgtgactctcaatacatttagagttacgagatctgtgtcactatatatttatatattttttttaaaataaataagtttttagtgacccttcaaatatatagtgacacgcattatggaacatatatttgaaatttttactgtctagtaatgtgtgtcactaaaaattgactaaaacatttagtgacccacactttttgtgcgtgtcactaattgtgtcactaaatgtgtaaattgtagtagtactgtctactcttcgtcgcatacgtcgaaccaccaccacctcccgtcggtatccctctcatcttcgtctcatacgtcggaccaccactaccacctctcgtctgtctccctctctctatttctctctctccaagctcggtataaatacatttatttatttatacactttttatttattttatatatttattttgttattgtataaatttaatgtgtttcaaagttagttgttattgtaacaaaattaattaattgttttattttnnnntaggtaaaattataaaactaatggaggaaaaaaaaggggggaaaacatagatttttctaccattaatctgtatttttttttttacatacagattaaaaaaatggcagaaaaatctgtattttttttctttttttttttacattcccgacagttgaaaaccgtcgcctataacagggtataggcgacggttttaaaccgtgctcgatactataggc

SEQ ID NO: 104110 - DNA, 645 bp, Cannabis sativa
ttttccattccaggaacaacaccaggttttgggaagaactttctaagccagacaagttccttagcagcctccgcggcaactatgtattaggcctccatggtagagtctgaaattgcggtttgtttagcacttcttcaaaccactactccacccccaagagtaaacaccatcccagatgtggatttcctgtcatcaagacatgcctcgaaatctgaatcggtatagcctacgggatttagagcaccaccattgtagactaacaggaattgccttgtactcttcaagtacttcaagatatgcttaacaacactccaatgttcttgtcctggatttgtctgatacctgcagacgattcctactgcataacagatgttaggtctagtgcatagtattgcatacattagactcccaaactgcagaaccataaggaactcttctcgtgtcctctacctcttgaggatcagtgggacactgttccttagatagacaaataccatatctagaaggcatagttgcccctttggtgtttgccattgagaatctctctaaaactttatcaacgtaagttttttgagatagagaaagggatttgttcttccggtttctgataatctaaataccgagaacataggcagcttcacccaa

SEQ ID NO: 104111 - DNA, 508 bp, Cannabis sativa
ataaccatcacaaacttgagtacaagtctgaagagtgtttatttctgggatactctccaaaacataaaggatacttgtgtgaaaatgctgctggaagaatttttattgctagaaattttatttttgatgaagtgtcttttcctgcttctaggacaactactgattcatcaaaagtaatttgaaacctcaatatatcctacaatgcagttcactactggatcccgtaatatgtcacaaaaccatgctattgagccctcaagttcagcctctggtgtgcctatgcctgtttctagtgcaaatatgtctgatgctcacttacctgaacatgcggctgttggaccagataataacacttaggatctatctgcaacaaatatttttgaaacttcagcaaatgttgctgctgctactcacaccagctcatttggttcagtttcctcagccataaaactcaatttgtttgatataactcctgaagctacaacagctacatctgagcaaccttctg

SEQ ID NO: 104112 - DNA, 1144 bp, Cannabis sativa
  modified_base (133)..(157): a, c, t, g, unknown or other
  modified_base (217)..(224): a, c, t, g, unknown or other
gagttataatttctcaattccggagattttataaaactctaggggtattatttgtcctgtatgtgaattatgtaatttttgtacttttgctcggtgacaatggaaaaatacgatggatggctagtttgatcannnnnnnnnnnnnnnnnnnnnnnnncttagtgggaaatattttagagaaaataaaatattgaggttaagcggggttatggaattnnnnnnnnttacccctagctttagaaatatttaagttttaacctaaagggcaatttagtcattttgttaagtgaaggttgaggtggttgtctagtttagtgacacctagctaaactaatttcagcaagagattgattaatctcttttcatttgaagtaattaaggaaattaaaaaagaaaacctaaaattgaaggaaacctctctctcttcgaaccagccaaagcaaggggagtttgttgctgaatattgattatttcagcaagggatttaagaggaattaagccaaggtaagcttagcatctttacctcttaggttcttgaatttttcatttggtttgattatgtgattttgggttttagtagctgttagggttagagatgtttaaggttcaaattttagggttcatttgagttaaaattagttcctggcagctggttatggtgtttggataaagttttgtgaaagtttgagctttgagttcaaagctttgatctttaatggtataatttgattcattgagtttttctgtgaaatactagttggaaaatattgtttatgcattgtttaggtactctggaaggtttggtggcatttggtggaaaattgagcaggaagtgaaaagtttggggtgaactagtgcaaaccggctagccggttttaccagacctctaaaactggctagccagttttggcagggtccccaaacgcttcattttcttgatttttgtccatttcagtgccgtggttgggtgtttccctatttccagagtttgagtaacctctaggggtataacagaacctagggttgtgggttcaagtctcccgggattaggtttttgatcatgtaacttacccggtttcataatgtgattagggcatccatctagcgcaagactttccgttcaggtcaaccagcacacttgaat

SEQ ID NO: 104113 - DNA, 1826 bp, Cannabis sativa
  modified_base (341)..(348): a, c, t, g, unknown or other
  modified_base (1752)..(1795): a, c, t, g, unknown or other
tgactattcaacctaccaaatctagttttcattctctgacaactagtagatgagagacacattcaatagtgatttcaaacctcctccattgttcttcacatatttaaacccatagtgaaagagtgtcgttcccacacatagcaagtcaagtactcaatcatagtgagtaagacggtggtaaccaaacccgaagcagagaaagagatctagattcagatcttgataaggctcagtgacaaaaaggattcaagggctaaagatcttgaatggaatgagtcattatattccgctacaatcaatgtaaggtttttttaaaccttatgtgtttatttcattatttnnnnnnnnttcatatttaggatgttaattcaaaatacttgtaagttaatctagatcctggtaaaatatttccaacattgtcggtaatggatctggccctagcatcagcactagagccaagatcaaaggtcaagagaccagagtcatgagatggataaagtcgttatatctaatggtcattcggtagttattaatcgtaattgcatgggtcttagcttctttgcctggccccaacacctcttgcaccgccccgtgtcagcgtggtcataccccattagacagcaggggactttggtttgaggagaccgacggttaaccatttcctcaaggagttggctagccagatttgagcttttataaacgtgcacgggaactacgagcatttcaagaccatatgcgttcatcacttgtactttcttcatctggacaggggtataggcctccatttttgacgacgtatttgaccaacacacccctggccttaggccgacctcggctgggaaatcaagtagccttccttcttcagatttgtgacggtagacaccgcacatattcttatctttcttcaactctcaatgaaagcaaatgtttaccgagatttttggcaaccaaacattttagagcttaagaaaggaacaacaaaataaataatcaatatgagattttcacgtggtttaggttttattgatccttagtccacgagtatattttattaggctcatcggttgataactatttttacaagttagtgtacaatggactgaaactcaattttcctagggttcctcttgaagaaggggaagcttgataggaatttgcgaggagtttctctatatcatgttattttttgtattacaggtttttttcagaaatattcttacaaaaagtgtcttgtcctatctcgtgttttatagggatatttataggccaacttctctctatgcgttggcttggattgatcatctttgggcgagatccaaccgttagtttggtaggtggcctcttctccatgtggtatttaagggtgtcagattgtataggttgggcatcatacacgtgtcgtcctaggatctttcctatttgaatttcccttatccctagccgttggatcattcgatcaagtatgatgggacacacatgcttcgtacgatagtgtgttgtgggggaaaacctctgatgtcgtaccaaaaaaagcctggtcactaggtccgtagtctgacatgtgcgagtagagcctccaaggaacgaaattatatcttggcccaatgtatttcgatacgcctctaatcctccggggaaagatccatattcttcgagggaacacttaactttgatcctgcacgaatagatggctttcattcctgggaataggggaggctctacaatgcagatatgtaacaccctaactagcannnnnnnnnnnnnnnnnnnnnnnnnnnnnnnnnnnnnnnnnnnntaatcaacgaggtttatgaaaattgtgatta

SEQ ID NO: 104114 - DNA, 634 bp, Cannabis sativa
tgctggtttggaatggataacagcaaatggtgatttgtttttcaaattaggagtaggtgttctattaatcaaataagcagctgtggttatacaatctccccaatagcataaaggaacatgggattgaaacaagagggctctagctacattaaggagatgttgatgtttcctttcaacaacagagttttgttgtggcctttggacacatgaatgatagtgtataatccctaatttggaaaacaaatcattgaattgtaattccttggcattgtcagatctaaaacctttaatgactttaccaaattgagtcttaacaagttgaataaaatggggaataacagattgggcatcagatttatttttgatgagattgatccaagtaaacctagaacaatcatcaacaattgtaataaaatatctatgcccttcaacagttagagtgctatagggaccccatatatcaacatgaataagatcaaagcaattcttggcaatgttatggttggaaatgaatggtaatttcctttgtttggcatagtggcatatggaacaatggaaatgagaatcagacttggaattgaaatgaaaactcaaatctttatttaatgagtgagcttttacacaagaaggatga

SEQ ID NO: 104115 - DNA, 576 bp, Cannabis sativa
  modified_base (316)..(318): a, c, t, g, unknown or other
aattttcaattaaaatataattattagaaataaaattaattttaattaactaaaattagttttagatattaatagcctttgaatttgaaaatttgatttttccataaactaaccttatggttaattttgaaatttttattattttatttattttacttatttaattataagatcagatattgcttattttattattaaaatttgaaatgattttattttgatattaaaatattaataaaatttaaaaataatctatcttaaatttcaaatttgctaaccatatcagattttcaaaatttgttatttttgaaatatnnnttattaaattaaattataagattataaaaatgttagtttttatattttatcttattagatatttattttaattaaattttatttttggcaaaataacatgaaattttgaaaagtttattaattttggtttgaatagaaattttaggaaaactaaccataaaattttcaaacttaggatattttattttatttaattattaaataaaattgataatatcctaatcattaaaatatcttattattcaaattgtttatttt

SEQ ID NO: 104116 - DNA, 543 bp, Cannabis sativa
tttatttgaagctcaggatgtggttaaaatgggagctagatggcgtgtgggttctagtgcttcgatttctgttcttcatcagccgtggctcccttctgtggataatcccaatgtgatttcttctcatgaggctcttcagagttgttctgtttctaatcttcttcagcctgatcgaatgttttgggatatggagctcttagaggatttatttgacccaagagatgtggagctcatttgtaaagtctcgctgcctgcattgccagaacttgatacatggtattggtcgttcgaaaattttggtggttattcggtaaggagtgcctatcgggctttgcaagtgcgtaatggaagatggaatttgcaggataattctggcttttgaagaaagttttggtacttgaaacttcctcctaaagttaggaatttgttgtggagggctcttaccaattgtcttccaactttagtctctcttcaaactaagcgggttcatgtttatagtgtttgttctttgtgtaattttgaacccgaaaccaccttccatat

SEQ ID NO: 104117 - DNA, 2031 bp, Cannabis sativa
tttaattctttaagctttgttggagccattctataaggtgctttagaaattggctgcgctctaggtgctaatcaataacaaaatctatttcttgctgcggtggtaaactcgaaagttcatcaggaaataatctaaaaattcctgaaccactttgatgtcttctggctaaactgattcaggccgtgtggtatccaataccactgccagaaaccctaggcatcatcttgtaacaaatctctagcttttaatactgagatcactggaagtcgggatccctgaactgatcccacaaataaaaatggttccttgccctcaggttagaagatcaccatcttccgcttacagtcaatactagcaaaatatttggacaagaaatccattccaagtataatataaaaatccgctaagcccaattccactaaatcaacactcaactctctatcctcaattctgatcggcatagacctgacccaccttttagagataactaattctctgccagacagtagggttccaaaccctttatcaaaactatcaaacggtctacccaatttattaagaattttggccgccacatatgagtgagtggccctagtatcaaacaatatagagaaataagagttgttgactgagagctgacttgtaatactgaaggactgacttctgcatcaacctgggtaagaacaaacacccttgctagagcgggctttgttgttgtcttctgctctctttctttcttgagttgcgggcgcaatctttcttgtagtgtccaggcaaaccacactgaaaacatcctttccctttactcacccagatgatacttcttacagttgcgacattctagataagtgtatcagatttcagaactaccttgacgattaccacgaccttagttcccttggaacttctacttctgacttaggccacaaggtgcagatggtgcctttcttttttgatcagtggtcaagtcactaccacccctggcataaccagaggtaggaggagcagtggctccaccaacaacttgagtcccccgggactctaggatgctcttaactgtgccctcagctcgcagtgcttttcttaccatatcagcataggtggtgttgtcattggttgtgatcatcaggtcgtgtttgattttagggtttagtccatccaaatacttttctttcttactaaagttggttggcacaattctcaaggccaacctagccaatctatcaaactaggttgtatactctgtaacggtcacattctctttctgagtcagttgagtgaattcttttctctttgcactttaaactgcctcgttgtaatacttcgcattaaataactcctgaaagtcttcctaggtaatggtagtgacatcctaagtaaaagccaccatatcccaccagaccagggcatcctcctaaaattataatgtggcacaagccactttgtcgttgctgataactcccataaaattcaagatccatgtaataatagttagccactattcgactttcatcacatttggacctcccagaaagactgcaggtgcctgcttacggaacctttcgtacaatggttccacctacatttcaggagcaggcattgcaggagcaccctgctgccttagacatctaatttcttcatcttgttcattgattctagcttgcattgctgaaaacttgttttcccaatcttaggcagcctgcggtgggttaacatctccctgaccatgcctgcctcttgggcctctaccttggccacatatatttgggggaaactgaactccctaaccgccattggatctgaccgaatttccatggcttctcgtgttccgcctcgcgtccattctaatagaacaatttacaaaaccaagagctagcctggtcaaatcgtgatcaagaataatttactaattaatgcttattttagaaattaaaatatatgcttattcagctatcaggctactaatatgcttcttatcaggcttttattataacatgctatttaaacaaactattaaagcaataaaggctt

SEQ ID NO: 104118 - DNA, 506 bp, Cannabis sativa
  modified_base (289)..(301): a, c, t, g, unknown or other
aattactcatgtatatttggtataaatttaagtctttgaatttaaattttagattccaaatataaattttttatttcagtttccagaataccatgcagttccactttcacaagttttaatatccattttttgtcaatggatcaaaactttatgtttatgtatggaatatgagtttagtattctgttacgaggatccacttggactattgtatgaactctttattgtaactaagccttttccattaaaagaccacaaccatagtttaatatatctatggcatttgcatcnnnnnnnnnnnnnttttgacaagatcattctttgcaaagaaatatgcctatatccattgaaagtaggatcatctatatttaaatatggatgtacgttcaggggtggatatgagtttttattatattcttttactgatcactctagattttaccttatgcaaagaaatttgaaatgtatgagaaatttcaagaatttttagcaatgctgaaaaacatta

SEQ ID NO: 104119 - DNA, 568 bp, Cannabis sativa
  modified_base (29)..(30): a, c, t, g, unknown or other
catttcatcttccttgaaaaccacatctnnactaatcaagcacttcttgaatccaggttctaaacaccacactctatatcccttaaccccttcaaggtagcctagaaacatacatctcaatgctctaggttgcaacttatcttgtctaacatgcacaaatgcagtacatccaaacactttcaagtgatctaaatttggggttttacctgtccataactcttgtggggtcttgaagttgtttggcacagatggtgatctattgattaggtaacatgcagttttaagagcttctccccaaaaggttctgtccaaaccagctcctagtaacatgcacctaaccctctcaatcaatgttctattcatcctttcagcaacaccattttgctgaggggttttgatcacagttctatgtctcttgattcccattgtggcacacaatcccttaaactcatttgagcagtgctcaagaccattgtcagttcttagtaccttgattttgttcccagtctggttttctagtagcctcttccatgtatcaaaggttcctagagcctcatctttgcttttc

SEQ ID NO: 104120 - DNA, 517 bp, Cannabis sativa
cctgatacaacactagtaaagtaataattttgtaaaagagttgtcttttatagtaaagttcttagttttctattgtcataagcattaccaccataatcaattatacacttggttttgttactttgatgttttcctctgttttttgttggtttgttctttggatttatgtatgttaaagacccagtagcataaatttcaaatacagatgattttgggatttgttaaacctttaaggttcttgatattttgcagtattagagtagtgtaattttcttgcaagcaaaatgatgggtgttgaagaagagaatggaacacttgagaagattgtaatcccgaacaggtgagttcaactgcgagttttgttgaatttgatagttgggccacaatccacattggtgtttagaatttatgttttttttttctcctaaatgaaatactcatttatgttttcatttcatgtttcattttttatttgtcattctgtatggtgtctgtgcttggttgttgatttgcttaa

SEQ ID NO: 104121 - DNA, 1086 bp, Cannabis sativa
ggtgtgattgagcatgtttttgagcaggagaattgggatttttcgggtttgaaatccaggggccgtgacctagctatctaggcgctgcagcccgcctctgttgaaatcctaggttttaaacccaggcgtcgcggccccatgtggggagtgccgcggcctgcccttcgtttttgggcagattcgaactcgttgttcaaattcttgtaatttgtgattcggactccatttcgaaagttctatatatcgttggaaagctcgttttgagctttatgtgattatttggaattttaataccaattttatattatgtggaagtggatttagggattaaccctatatttttaaatcccaaaaattgtgactaggattaccggtacttggtcaggagcacccagggatttgaaatctccacatttgtaggacatcaggtaagatagtagtttgcacgtagagttaagcgcggtggcgctcatgttttatattatgtttgtgattaattgagaaccaagagtaatgttattaccctaaaatgagcggttatatagcctaggattataaccctagtaattaatgattttgggtgttatgtcatgctaatatgttggaatagagaattatgcggtcaaggcataattaaattagactaggtaaattagtaccttgagttcgataataatgcagtttagggttattaccctagaattaatatgaaggtaagaaagaaatgatgagcagtagcatttctaatccagtgaaagtatgatttagggttattaccctcaatagatgttattttgtgcatgttatgatatgttatatgagaaattatttagtatgcaagttagggttattaccctaagattatgtatacatgaatagggttatgcggcaaggcataatcaggttaaactcggtaactataaccgagataagccctactaaggccttattgtaaatagacgtgtgagcgtaacacgtggatctatgccagatagacatatataggcgtgtgagcgtaacacgcaagtctatattaaatagacaaatagtgcggtggcaccataattatgtgttatatatattgag

SEQ ID NO: 104122 - DNA, 578 bp, Cannabis sativa
ctcaaaaatgggaaaaactaggtttccaaaaattgccccaattggtagaccgattcccaaccggaagtccggttcctgggaccaaccggtcgaccggttgctacaggtcccccagaaccggaattccaattctgtggttggaacttgaaaaaatgcccccattacctcaaaagcaacccaaactttgcaaaactctccagtatacctaaacaatgcataaaaaacattttccaaccagtatttcacagatgaaaccaaggaaactcaacttgccattaatgatcaaagctttgaactcaaagcttaaacttgcataaaacctaaaccaactatcaaaaccagcaactaggacccttattcaactcaaattaaacataaaattcgaatcctaaacatacataaacctaacaaccccttactagcaaaatcacacaatcaaaccaagtagaaattaaagaagggtactactagggcataccttgggttcaagaacctttgaatccctactgaaattccagaaaaaggggttgaagtgaggtgattctcctctgatttttgccttagccgaaagagagaaa

SEQ ID NO: 104123 - DNA, 1107 bp, Cannabis sativa
  modified_base (306)..(322): a, c, t, g, unknown or other
ttgccaatgtcctgaaaagaacataacacttatccaaagtgtaagtaaattttatcactgactatcacatcagtgtaaatctagtgcactcatgaatcatgggacataaactattgaagtatataatcacaattaccttccattgtgttgacattactgtaattgtgaataactatatgttctggatttaacaaaaattgtatattaaaccataaacatgaaaaatccatgtaaacataaatgacttctaatcttctattgatattaaataagattataatgaaataaattttatttagggcatannnnnnnnnnnnnnnnncacttgcactaacataaaataagaagtgcattttaatcaatccattgtcttgatatccatatcaagtgtagtttgtttgactaaactcaaataaaattggaactgtaaagctgtggtaagcaactgcattctccaccagtacttcctacctgttcataaaatattatgcaatatcatttttctatatctattactcttctagggatactgaattctttactgtttattaagtgtatctgaatgtacagaagacacatctctaattctatccaaaaccgaatagagataaaaatagttaaaaactttcttcagtttgaataactttgtagtgccttttgaaacaactaagttatttagcttcgctggaggaactaaattattatagatgggtttttagttccttctagaataattcccccatcccctgagcaactaccatctttgaaattaagtactgagttggtgtagatataaggtttctaaaatatacacccctatcatcttacataaaggtcactttcagagattctttcttgattgtttcccaatgctccttgtttgattacatcttaaatggcttccactcaacagtaggagtctggttaaattcatacacaaatgtgcatttaacctcttactattgatacttagggaccttttgtggtgacattttgtcttagtctggaacattaagttccatctagactaagtcatcaacatagcattttagtattaacattaatgtaaaatacttgatgtaacaccctaattagcataggcgtatt

SEQ ID NO: 104124 - DNA, 1605 bp, Cannabis sativa
aaatccactttagatatttttaatacaatacaaatatgaaacctaaaatctataaactattagtccactttctaacaataaaatgcttgacagaacatactctacatgagaaagctttaccttccatttctatattttgttctgtgcctcccatagccagcacattgctcatcagcacctgaaccaactaggagaatcctagctttcgacctgtatctaacacgttcataattctcatgcatccatccatcaccaccagcagctagccataaagctattccaatattcagatcctgaaacatgtgatagaatataagattccatcaaacagaaatgtatagaggaaagatgttgttcatggtatgaacttcggacactaaattgatgatacaaaacatcaaaagaaggtagaatataaaatgtgcttttggacatttggcatattttcttaataacatgctttgcttacaaaattagaaacataccatgaatgtgttcgaaggacttatgagagacataacatgctttgtttcgaaggtcaaggttgacaaatcagaatcaatctcgacaagtttccacctgcatttaatgtctcatgtggtaagaaacatgataaaatttcatgagcagattaagccagcgatggattgaaactaaaccatcagagattaagtaaatgagagattcaattttgaaaaagaagaaaacaaaatttgatgttatctcattcacatctcatgttcagaatgcacaagcaccaagaaacaatacgggattgttcaaaatcaatgagcatactcataataaaatcattgaaatttcattatatacacatgcaagaagaggttcatctaagcaaacacacaagaaaagagagattcacagttgtgcagcatgaaagagtttgtcatgtactttcttgaaggtgcaattcttcttaattcggctaccccagccttagcagaaatcctatcaggtgcagactccccatcaaaactcacattaagtaagtcaatctcatctgtttaaaaaaaaaagaatcaaagtcagccagaaacaaattacaatgaatgatccacaacaaaacttgtaacttttttttttgttgtaaattctaaagaaacagagaaggctgggttttaatgaattcataatcatggaaaattgaagtggaaaaaacaactaacttatacgtcagtacttacatctaggatctaagcactcattcaacaatgctgcaagtatcatggaatctaatccaccagagaagagaacagccactggaatgagttgcttttctacaccacacggttctgactaagatgcaaccacaatccaaacacttcaattagaaccataagcagtgagaaagccaacaattaatgcaagaaaatacaatttctttcccaagcatagccttagaccaaatacaagagtatgacaaaactcaagactacgtgagagaaacagacaagattgacaataatcaaaatgctaaatacaaccacctacagatgggcaactaaactcaggttctttaaggactcaaaatagatgctttcagaagatgatagaagctacaaatgtgggcaacccataagtaaa

SEQ ID NO: 104125 - DNA, 1055 bp, Cannabis sativa
catttaagtaatgtttatttaagtattggaacatcaatttttagtttatttttggattaaattaagaacatatttaaatcattgtttaacgcccaaaacgtgacttccactagcggtggttgtagtatagatcgggcggtcgattccacagggaggtgattatggacaaaaggttagtagaaaaataaacacaaaaggttaataaaaagtaacaaataagtaaccaaatgagtttgaggatttttattttggtaataaatattaaaagaaagtaaatagaggtgtaatcaatagtaaaagagagaaaggcttcaagattcatccatatgcttgtttagctattttgtacctttgattcacaaagtcgacacaaataatataacattaaagttcattatattttgagtatttaagttcttgaaaataaacgaaataatttaatcttatgtagaacctaaaaatgacattatacatcgagcaataatgcaatataagattaaacataaaattaaacaccaatattatttttactaaatagtaacacatagaaagagcatgactaatcctacatatttttaataaaaataatgacaaagagatagagatggaggtggtggtgatagtgaaggaaatgaacattaatatcacttttattaagttttagacacatagagagagcatgactaaacctatatatcatttaacaagagtgaataaaaatgaacataaaagatagaaatgagcaatactaccattactataatcattaaataaaaatatatagaaagagcatgactaagtctatatatatatttagtatataatagtatatatagtagtatagatggaagaagaacataaaaataaaagtggaataaaaacttgcattactcaaataaatattacaacaagtgaatcaaagatacaaaataacctcactttgcatacggtaaccttccaaagaagattaggccattatgctaatcattctcataaaatttctaaagagaaaatatgagaagaaaagttgagagaattttgctatagtttttcta

SEQ ID NO: 104126 - DNA, 983 bp, Cannabis sativa
  modified_base (924)..(924): a, c, t, g, unknown or other
tacaagaagtttccaaacaaaggaaagttcagctgaaaagtgcatcttaccataatagaaaaatattttgtcaactaacttgccatagtaaagagcaactaaaaccgaataaacaaggtaagaaaatcggatatgaatgcaaaacaatcttaccataatagaaaaatattttgtcaactaacttgccaaaaaaaggactttacaattagcaatggtgttagatactatctggtcgagataattcagccttggaacattagagtggtataagagttcttggatgtattttcctgtagaacttcttagattatcaccacaacaaagttaacctttgttgttatttggtatttggagtggaggtggttatgaggcaccatatagaatggctcctaacagaactcaagaaagttaattggtgaccataagggatgatgaacttagggtttacccaacctgttgtgtcactttgggaagctctggggttgtttattaagaagaaagatagatcatttcttataagtattaactattgaagtttatccaagtttttaatcaagaataaatactctctgtttaggatctatacgtggtaaaatcagtttggaggaaaacaattttcttttaaaatgacccgggctcggtttatccttggttgagaacccaagaggaaaatatttcaaatactgccttcgtagtaagtgcaattattatgaatccttggatacgtcctttggactaattagtgctctagtagccttttatggatctgatggataggatagttaaggactttcccgttatgcacgttataagggtacattgatgatatctttaagtactctcaaatagaaacaaaatatggataacttctatggatggatttgtaatatcccaataagtctaatggtaaataattagggtttntatttatattatgagttaatcaggtaataagtggaattatgatccaactaatttatttc

SEQ ID NO: 104127 - DNA, 816 bp, Cannabis sativa
  modified_base (660)..(665): a, c, t, g, unknown or other
caaatctttcatatcgaattgagtgttgaggaattccttgatgtgactcagtttcttgacattgtttccaataatcaaaatgtcatcaatataaaggaccaggaatactactatttattatgggtgtgggttcgcgtcttaggtcatggtctaggtggggtgcgagtcccaagttccaatcccgatctgagtcttgattcagttatgggtctaagtccttggttctgatctttgtctgggttcgagtttgggtccgggtccgggtctagctttgagtctgattttacgtgtgggtttgatttcgggtctgaatctgtgtccgggtttgtgtccaggtctcgaccccgatctgggtctaggttcgggtacaggtccatgttggggtcccgagagcgggtccaagtttgtgtctgggtcgggatctcagtcaagatccaggtccagcatttcaatcctagtctgggtcttggtccgagtcaaggttcgtatcccgatccctctctaggtccaagtctgtttaggatcgggtccccgatttaggtcccaggccgggtctcagttccggtctgggtatgtgttcggttctaggtctgggtctgggtcctgctcacggtcctagtctttaactagggtcctggttcggcgattcttgtttaggtnnnnnntttgggtcccaggtttaggtctgggtttgggtttgattctttgtctgggttctagtcgtaatctgagtcctagatctagacaccgactactagtctgttccaggacccgttacccaaatcccgagtaaggatctggatcactgtcacgggt

SEQ ID NO: 104128 - DNA, 1317 bp, Cannabis sativa
  modified_base (100)..(101): a, c, t, g, unknown or other
aaattagtggagggtctaaattttgatattgggggttttattaagggcaaaaattgaaatttcccatttcaaaaaatcatcaaaaatatttttaataatnngttaactgcataattatcattaaactaataataattatgaaacggagtcaaaaaattaattaaaaatcaccaaaaaattaaaaatcaaattctaaaaatgctggaaaaaagaatcatcgaaaaacgacatcggaaggcagcgcacgtgcccccacgcaccgctgccgagagtgggcttcacagaggggggtcttcttcttcttccagccggatcctcattgggtcgcacgacccggttcggcaccattcgggtctggacgaatttcggccaaaaaacgtgacgaaaacataaaaaaattaagggtttttgttcgggattggatttctactctatctatgggttgaatttgggataaaacaagtaaaacaatgctacatcttattgaaactaattcgaaaatataagaacaaaaaataacccgattctcctatgtatttcatcccattagaaaagtaaatgatgtataaatattgtggattattcattaatatggtttgcacaattaattttattcaatagtcaatagaattaaaaaactcaaatttaatttcatatagaaaatacataaaccctaaaagtttaatcttaaaattctcctaatttactcaacgattttagtcatataagttatcaatagaaagagaattccatgatgaataaaatccctaaacttttaggattaaacaacaaaaaatttaatagaaaataataacaaaattaatttgtaattgaaaaaaattaacatatacatattaattgttatacaattatagttcctaaatcatatacaataggcaatttgataccacatgctaaaaaattaataataaaccaaacatcagtttgtatataatatagaacactttaataatagataacaattatgtatgcatatatgattgatccatagtaatcaccgcaatttgatagtgcaatactatcaactaagtctttcttcctagatctctaaatcagaaatagttttatttatctgattattaaaagtatacgactgtgataagacagcatgtatttatagagttagcgagaggacttagctacgtaccctagttggactaggcctactcatcaaaagtttcagtcaactagaaaaatccacacttttgcacctagactttacacatatagatgctaaacccattaactattgatcaccaacaatatggactaacacagtaaagaactatccaatca

SEQ ID NO: 104129 - DNA, 1231 bp, Cannabis sativa
  modified_base (754)..(754): a, c, t, g, unknown or other
attgaataatagtcatagtcactcatatatatatataaatatataaaatccaaaataatataaaactagttctatataatatatttttttaagggattatttcataattacacaaaaacaacaaaaaaaattacaaaaagggtaaatggcggcaaaacccccaatacttttatttttgttgcatttaaccccaaaactcaaatttgggcagtagaacttccaaaactagaaaacttttagcaatttaacatttccgttcattttaggtgttaagtgccatgctggattgtctatgtgtacatctacgtggacacggtggacacgtgacacaattttattggtcaacgtaaaaaaatatttaaaaatttaaaaaaattaatttgaacttaaaaaaaaattataaataaaaaaataatttttctgtttttttttcttttttttttcttttcctttctctttttttttttcatctgaaacaaatctctctctctcgatctcctctctcttgaccaaatttactacattttgactgaaatagatcacttgaatcatcctattcattcagattagagccacaacccagaacaacatatatatatatcagagttactattatcgttcggaatttgaagaagaagaccattatttgcttcgttcactttctccaatcttctcatctcgaagaataacgccacctcttcatctttctcactcaccaccttccccattttttctctccttctctctctctctntctctctctctctctctatagatatatatatatatatctcaaaataacaaaatacacttccttcactgttcaaacctctcaaaacacgaaaatggaaacctctcaaaattcgggtcccgattccataaaaataaacaaacacaaattaaatccgcaagaaaaaaacttcagattaaagagaaaaaaaatcgcaagggtgagagagagagatcttactgaacacgaggttcaaaagcgactagatcggagtcgaatatctcgaactccatggattccggcgaactccaaggattcggactctgtggatctcctcattggcggctcgtgttaggcggggctcgtgagggtggagaactgccggagtggctgccaagggttttgaaaaccctagattgaaaacccaagagagatagagagaggagtgcgagagagagagagagagttgtttccgataaaagaaaaagaaagaaaagaaaa

SEQ ID NO: 104130 - DNA, 1365 bp, Cannabis sativa
tgaaagtaggtccaaatttttcacgccaacatataaatagatataacaattgcatcatattcgtggtaaatgtgtccattgtaaagtgttaaattgaagattttcttttactaacttctccattttaaaattattgaataaagaacaatactcaacggactgcaagtaatcgctaaccctctgtaaatgcagccaattccaagagcttgttccagattgaggaaaaccgattataagatgaagacttttttatgcttggttgtgttgataaatcatggaccagatatggtactatatactttttcatgtcatttcttgagatttgtagatgatttcctggtacactaatgaatttgactttcccagcttcatctaaatttctcaaaccaatccaatcttcagtgtatagctttgtctgtacatgttatggaaactagtttcagttgaatcgaccggcaaaaggaaaatgaaaatttaaactattctaaagtgcagcttcccaccacttgcttgggatatttaattatctccctaagaacaaaagtaaagtttatggaaataacatattacctcttgtggaggtagaactggatcaaaggtcccatccggataatatccaaaccaggaggtttccttaggtacaacgatagtatcatgctcaaactgctcaatcatgcagagaaaaggagattggcataagccttgagcatcaaattacataatgaactaagaagagaaaataaaaattaatgaaaaaaagtagataaataatatagtaatatttttaaaaaaaataaaatagctgaaacagtaactcaccattataagtaccaaattatctatacttgcaaatctttccttgtaagtggaatttctctcttcaacaatttcattattaagcttggggagaaaatggcatcctttcagataggtatcaatgtcctgatggaaggagaagggaataacctttggtgtcagttttaggaatctgtggtctaaaataacatttgcaaaactggatgatatatccatcaagcaatcaaattttttgtctacaactactcatttcagttccatggaactataagaaataaagttcatccctaaacaaaatgaaaatttaacactgcaataacttttaaactctcatcctttccaatctttgtgaaactgggatcatcatgatgattgttgaggacattactcagaattgttacaagaagaagcatgtaatcagctcaattgaaaagaaatgaggaattaacttacagttgggattttaagatagccactcggagccaagtgttcctgcaaaccaccgaagaaaggggagttaaaagaaacaaaatttctgatcaagccaaa

SEQ ID NO: 104131 - DNA, 528 bp, Cannabis sativa
ttcagctttggtaaggactgagaatagaatgttacatgaaataaattattcttgattattgtaccctattcatcactaaagaagtttttagtttagagagatgctactgcaatggttgcttattatatcaatctgtgacaatgattggtagtgttgcttcaattggctattccttggctacaggtggacatggtaactcctatgtgctctcaattaacatatgaggggcttttagatgaggtaagttactatagctggagtgtggcagtattttacttattaaataacttttatgcgatatgatttgactagaaatatttacgagcaaaagagatgttgatgatacgagcaaaacaagcacatgttgtaaatctttagttggtcatgtggcattcattctcactgttcttgtttaaccagcatgtaaaataatttatgatttttttctctttccaattagtctgattggtgatatttttctctgttatctttctctcagataatctatattctatttgatattaaata

SEQ ID NO: 104132 - DNA, 867 bp, Cannabis sativa
  modified_base (689)..(694): a, c, t, g, unknown or other
tataaaaattattttcttataattatttatttaaatagttaaaactatattaatttattattacatgaaattttattagaataatataactctttaaatatatagttttatatggttttggtgagatgagactattgtgaatattaaatctataggttatatatattttattgtttcaaaattaatattatttatttttacatatttttgcattatttaatttttgtcaaatatttaaatttaaaaaaatcctttagttttttaacaaataaaaataatatatatttttagaattttttattttacattattaattttgttaaatatatctttattttatcatttttctacattttttttatgcttttagtaatatgagagtcatttcacaaaagtcccacattatttaaaaactattgtggatgatataattttacattaaatagatcaatattctttttattttatttgtcacaaagttagcataatttattttctatgtgggtgaataatgaacttaattttacctaattagttatattattttttttttcagtgagtgcaaattatattttatatttttcaatctttatcaagtttaaaataattataaaaaatcatttaaatatttttttcttataaaaagtattttttttataattctttattttaatgtatttaaataattnnnnnnatatgttaaatttataggttatatatatatattttatttgttccaaagttaattttatttattttcacataattttgcactatttaatttttgaaaaatatttaatttttttttttaaaaaaaaaccttaagttttttaacaaataaaaataatatataattttagaattttt

SEQ ID NO: 104133 - DNA, 1219 bp, Cannabis sativa
ctctaatcgtaactctgctaacttccatgcttagtgcgaccgtcattcccaaaataagtgcttcatactcaactttattattagtacaatcaaatgataatttataaacctgaatatgattcttacctgtttgattggtcaacactattcctgcacttccccctttagcggtcgatgacccatcaaatgttattgtccatcttttttgtgtttcttcatcgcaaatcatggcttcaggtaatcctccagggatctcctctatgattgattcttcatggttgtctggtgaacatgccagtagatcagacaaggcttgacttttttgcgctttaggatacatgacagtcatatcaaactcgctaagcatcaatatccaacgaactattctactggaaggtatgggtttactcaacatgaatcttatgggatccgctttagtcattaccaccaccttatgcgccactaggtagtgtcttaatcgttgtgctgtgtacaccaaagccaagcattgtttttcaacatagggataattagtctcaactcctttcatttgtctactgagatagtacatgggtttttcttttccttcgacctcttgcgctaacaatatcccgatggatgtttcagtaacagccaaatataacagtagtggcactcctggtattggtgatatcataactttggaggaagacaatacattttaatcttgtcaaacgatttttgctatttttctccccaatcaaaagacataccttttctcatcaatgattgaagcgggcctgtgagttatgccaaagttggtataaaacgtcgtagatatgaaacttttccgagaaagcttttcaattctttggctgattgcggtaccttcatggctagtatagccttagtcttatcttcgtctatgcttataccatttttgtgtacaacaaatcccaaaaatttcccagcgcttacattaaaggtacatttaagaggattcattttgagcttataccttctacttctttggaatgctttctcgaggttgcaaatgtgatcaaatttgtttttggacttgacaacaatatcatcaacatacacctctatgctttcatgtatcatgtcaaggaatattaccgtcattgctctttgatatgtggcaccagcatttttcaggccaaacaacgtgacagtgtagtagaagtttccgaatggggttcgaaatgccgttttctct

SEQ ID NO: 104134 - DNA, 647 bp, Cannabis sativa
atgtaacttgaagatatagagataaaatgagagtttacatatgatatataaatcatgaattctcatattctagtatttcgcactattcttagactttgtaattaattattcaaaaatatttttttagaaggggtgaaagtttaaattttataaaataatagagttttattgtaaatattataattaaattacttaactgttaaaaaaatataatagagacttaaatataaaaataaaatatttaatattaattgctaaaaagagtcttattaaatatttaaattaaaaattaattattttaagaaataattaatttaattctgaaaaagaaatttttacatgttggtaacctgctattaaaggttaacaaaaatgtaatcattgagtagtcacccttttattatatataatgactatataaatttttttggcatgatatacatattttaatagtaatatatataatttttgtttagcattttatatattttttgagtattaatatactactttatttttgttagtatttttatggttataattttattattatagtattttaatttttcgtgttatgataatatgatatatcaaatattattgtatatacaatatggaagaggtttcaatggttacatttttattgt

SEQ ID NO: 104135 - DNA, 3873 bp, Cannabis sativa
  modified_base (73)..(81): a, c, t, g, unknown or other
gttattcttatttataactggccaaaattgggacttgattttttgataataaattagaggttattcttgaatnnnnnnnnnttaaatagaggttctattgtatatgttatattagggctataaataattagtgataatattatcgtaatgattattttttttttgaatttagacattgaaattataatatgcacatatatatgtatagagacttacacgttgtttctttcaaaagtttacaacttattaatatatcaaaattaatgaacacatgattactcgcaatatttgttcactgtcctgttcgtagcttttgttttttcacaagttgtatccttcaggcacttgatttgtcgcctatatgttatggacgacttttcagtttaatgaaattcaaaaaaaaaaaattaattaatgaacacatgcattgtattgatgttctaatattttataattattaatttcacattaatgaaagaatgtaacaaacaaaataaataattatctaaataaataaataattatctaaattaatatttgtaatacatttattaaaattatttagaaatagaataataataatttatattgtttattttatgagaaaacgtaatcaaaatatgtttaaattgactaaattaattattcttttgagttaaattatattacatgataattattttagaagacatgttttaaaagattttaatattaaaaaataaaatataaataaataaaaattattatccttaatgatattattttttaaaaaattagtgatgtcttttctattattttttatgtttatgttatcaaagttgtccttttataattttaataaattaagtaaataaatataagaaaataactatcataataccatgaattctcaatatttatttgtaacataccattaatatttatatagtgaatcactgataatatttgtaatcacccatgaacgattttatatattttccttaaatatttttttttttttagaaatttgattttgttatcattctttaaaaataagtaaaacagtcaaacaaagactgattctctttgatgagctagtatacctatatatatataatataatatatatacagtacatgcatggctctcttcttgattaacaccttaaaatcctttgatggacacctttcatttcatgcctatacaaatcatatcaaatatccacatgacatatatcatatgcatatatatgtaaacaacattaacattattatattattattattattataataattatcattctttttaattataataatgtgcgtacgtaacaaattataaacatatataacatcatatatattcatgcataaaaaagaaattagtgacgatgtcttatgatcaaaccacatagaattaactattcattaatagttatattaatatatatactaacttttattctcaccaaacatgatcgatctctaagggaatgagagatatatatatatgtctatatatacaaattcatcccgtgatgaattatttttcttttatatttttccatgcatatcacacgcatacattatatatttttttaacaaaaataattaattatattaatacacagataattaattacatatatttttatacatattttataatatttattacacgcgctttaagaaaagaattgggaagataaaaggacccgaagagaaaaaaagctagagagagagagagaagaagagtaataaagaaaaaaggggtttattaattattattttttagtgttttgcagtgaagagaagaaaaattaaattaaattaaaaacaaataaataaataaataaaatgaatgatagtatacgagtcccaataattgttgtacctgtgtttctgtcattctcgagccctgtgtttgttcccatggttgactaccaccttatatagatataaccccaaattaactttatgcttcgaaaaaaaaatgtagaaaaaataaaagaaataaataaataaaacgcgttataatatgaatgttattatcctctctgtgtgtttctgtatcgattttttatatttgtttattggtgaaaaatgtctgtcacacactgcaaaattgcactgatcatttttcactctggtcctccaaactacaactatactctctgtaaaaataaaaataaaataataattgaagggtagtagtcattgggacaatgcccttttttctagattttattattagtactagtattatattcttgaatttttttttttttaaagtatgtatagatatataaaagagaattaataagtatggtaattaattttattttatttttttggccacaaatcccaaagttaactaacccttcttgggtcactagcaaagatagaaaaataaattaatgagttagttactattgcaaatgagacctacacccatgttgttgtcaacttccatttttgggaaacttataaataaattaagagaacccaagaaaattcctttctttttttattttttatttttgtgagaattaggtttatttaattagggtttttgtttttatgttttcccaaatttgtttaagcagtagtagatagagaaaaaactttggtgaaaaatagttgggatattgagagagtcactatcaagtacaataaattttttagggggttttgattgaaactggcatgtgaagatgtggttaaatatttaggagaaattattaagtcaaaaatatgcctaaaagatttggtttctctctctttctcaggagtcccatctaaacctcaaacataaaatttaaataaaataataatgatatgtaaaataaaagaaaaataaagatttgaaagagttttataaaattcctttctattcggtatccatatattccattatccacagagcagagcagaccatatatacaatatgattacaaaatctttatatatacctctctgccaataatatatatatacaatacatatagtctatagagtgatgtatgaatgaaattacaacttgggtaggtcacatgcactgtagtgtggttcttcatgggccaccccaactccaaacccctcttaaattgtgatttgtgctttttaacctctatgcaataaatctaataaagtgttggcttctcttaaaaaagatttttagagccaaaaattaaaatctatactcaatagaaccctcaaacagttgaagaagtgtttttagagcttcaaaaattacttttaaaagctcaattaataacaaattaactatatattatagcttttagaatattattattgggtactagtagtgtctaatacttctaaatatgttattttgtgattggttagtaatactccctaaaaattattatttaattaaattatatagaactcgacacttaatttagaccaatagcgatattgacacataagatggccgggtgctagacatgcttttaagcatttctcttagctcttcatgtgatgcttgtaaattgttaagagaattgttaaaatgtattattggtgcctaacatggtgtcgtatatatattattagtgtaattaagtattgggtctcatataacataagaaaataacttttaataaatatcgccaactagttataagacaccacttaaagaaaatgctagatacctctagacatgctctcacctattttcatttaaggcgttaatgtgtaacatttaaatgatgttaggcactaatatttaatagtaatgctcaataaaaaaaaatactaaaaggtacgtattatttttttttgaaggaaaatggtaactttattaataagaagattcaaccattacaatagaaagaaaatcaggaggaacatcatcctcactaaaaat

SEQ ID NO: 104136 - DNA, 595 bp, Cannabis sativa
  modified_base (239)..(249): a, c, t, g, unknown or other
acacaaaatctcaatccaccattaaaggtcaagatttgagttcttaaactaaaaccttagccaaacctcaacaaagccttccttatcaattcaaatcaactacaagaaacctatttcaatcctaagacacgaaatcaaaccaccctaagacttacagcaacttaaacatcaaaactcaagcttaaccttactttaaaccatggaaaaattcatgaagacaagagagagagagagagagnnnnnnnnnnngagagagagagacagagagagagttataccttgaattgagatcctctaaaaaaacaagattacacagaattgaattaaacacagctaaaaacccagctggttccctttggttttcgaaagagaaagagagagcaattagaaaattctaggttttgttttttttcttcagctaaaattaaatctctctcaattaaaaacaaacctaaattaataatattaattctaaaaataaaattcacaaaggacaaaaagcctttagcaaaagacctaaatgcccctcttgattaaaataaacctaccatgactaacaagggtaaatatgccatttcaaatcccaaaaattcca

SEQ ID NO: 104137 - DNA, 512 bp, Cannabis sativa
atctaataatatatattatcactgctatagtagatatttaatattatttttctgttcttgtttttagtgtttatacatatatgtggtaattttatttagattatttaagtattgatgatagttttggtatatttataacagtgatgaacaaatttgttcttttttatgcttttttatttttaataatttgagtaattttttgttttgaattgttggcagtaaacttgaggcaagaatcactaaaggaagaagactattagatgttattttggtcaagtttgtaatcactatttaattagtattgtattatagacatttttatttataattttaaaactttggattactgtaatgatattttaatacttgagaatgatgagatttagatctaaaaaatttaatgtataaaataagagttgtaacccgacccaacccaacccaacccataatgtattgggttgggttgggttgtgcataaaatatgatatgaatgggttagaattttctaggcc

SEQ ID NO: 104138 - DNA, 753 bp, Cannabis sativa
ttatgtattttattaaaaaaaatcttataaaattaccataatttgtactatagataataaatatttattttttaataaataaatatttaacttgtttatttttataaaactgtttaattaattttacgaaattatttattttgatttttaataaacatattttattatttaatgattaaaatgtatggttttatgtaataagttttcaaaatatataagtttttaaaataatttttttttgtatattttttgtaattatgttatttttgttgtacatttatgaaaaaaccattaaaaaaatatgtaaataagtagtggaaagttaaaatataattaattcaagaaaaaatatattctaatggtgtgctaaaatttaatgtaaatttgacaaataacaaatcaataaataaatatttttttttatatatttaatggtgtgctaaaaatggttgttggtttaatttctttggctatttggttatcatttccaaatgggtaataataatgctagtcatttttgcaaagccaatttcaaataaagataattttgtttctgaagggcatatttagttttggtaattttgaacataaacacgaacagaggagaagaaaatacaaatctaaacacaagagatttccatctctctcacataaagatagggaaatttgattttctatacttaaaaaacttaattttttttttaaaccaatatattttacactacaaaaaatatgacaattttttgaaaaccc

SEQ ID NO: 104139 - DNA, 3097 bp, Cannabis sativa
tttcttaattattcaaaatattttcttttctaattttttaagatttgaaatattattttaagaattatccaaaaaaaaaaaaagaaaagagagattgaattttctcatttgtttaggggtaagatttgatagttattaaaatttaggggacaaaaatattaatttacaaaaacacttctctattcaaacgacaagataggacgaaactttacaaagagactaaattactataaatataaaatttgaaaaaaaaaatattagcaattcatatattttaagaaacacgatctaattggatcttacaaatttaagaaataaaaatactaattattcttaaaaataaccaacatcttaacccataaaatatttttatgtatttagcaacatatattatagcatagcatcctcatttccactaaagacatgttccatgcatttttaataatattattattattataaaaataaataaatcaataaattaagatgctcatccggaccacatttctggttgcagctagatttaaagttatgccttatcttttacttttttttttcccaaaagttatgcctgatctctttgacaaaagttaagtttaaatagtatataaatttcaaaaaattaaattaaataacttgaagaatgaatcgagaggccatcttatatgataaattcacgtttttaatttactaattaaactttcatcacctataaaattgagaaattagactaatataaggattgacatcactctccaaccgaatataacaaaagggaagaattagaaaaggcatattaaaatttcagcacaaaatgactcaaaaatagtacttaacaacaaagagtgattctataatgattagtctattatgaaataaaataaattgataatatgactgccacactataaattcagagattgtgcactgaccattctcaagtaaaaaacaaagaaagaaagaaaaaaagaaaacaatatgggaggagggtggtcacaagatgaggcatctcagagtcagtttcatcaaacaagtaaggaagaaagtaaaaatagttcaaaaatcctgaaagaaacaaaacttaataatggcaataaggctattattaatacagagaaatcacctaataaatctatacataaattggatgagatcataagagatgcagatgtcaccatagatcactcatctatggagaagctattgcctcagctccaaaatgggatattattgaaccaaaaaacacaggtacttaattatttggaatatcaaactatagatgtatgttgtttgcttcttttattgagttaactcataattattactaattttttttgttctcacatcaaatatttatgtgaatatggcagaagtactggattgacaagatgttggataattgctttatggtgtatgcaagaaaactgtcaattacttggggagaagataatcgttattggacatggcaacagcataaagacacaaggtgataacttttgtcccatattgcccatatgatttgtattctttatattacacacaaagtcttaacccatgataccatcttggtaatagagtaaatgttgtgtttagtataattaaatttatcaaaataataataataataagtggtacagtggaatttctttaactctcttattgttaactcttcaatctgtctaattaatttctatctaattcttctgatctatatatttttattatgaaccattttactatctatacatattctttttctcttctctaactctttatttagtgtcgattatttttttgtacatttgtaagaatccaaaactataccagctcaaagaagtgagatcatgtatgtggaagaaataattatacaccactcgtgctaggatcgtttggtaaaaaattgtttcaaatcaaattcaatccaataattgaagttttttttttttctaacaaaataacagatgattaacataactaatcatgttaaaggtagttataaatatgaatttctccaacatataaaaagaaaatatgatctcacattgttaatataagaaaaaacaatagataattacataaagtattatgttttgtaaaaatttataattttacgtttaaagatttttttttaatatttaatatgatttttttataaaaacaacacaaaacacaaaaactaaataaaagtaacagaaatacttactatatttattcaatcaatattaacaaaatttataaaatgtacaataatcatatggaaattttaatatttatattctgataaagctattatttggtacaatcgatcattagttaaggaattcactgataatgattttaattaataaaataaaattttgatgttgtacagtgaggagttaatcgaggtggctcgacttaagcaagtgtgctggctagaagtaaatggaaaatttgagatgagaaagctgtcacctgtaactttgtatgaagtagcatttgtggtaatgatggatgattcagctaatggttggagttttcctgtaaacatttcactgtctcttccagatggaaccaaccaacaacacaaccaagatatgaccaaattgccaacaaaccaatggactcacatcacagctggcaagtttaaaacatctcatcataatgatcaatttggggaggacatccacttctctatgcataattatgattcaccctggaaagcaggcctatccatcaaaggtgttttaatacagactaccaattaacaccattaattatattatatattatgtttggttcatgaaacaatttatagggaaacttcttgtaataagaacaacaacaatgtttatgatccatgtttatttccaaataagatacatgcagtcaattatagtaaaaaaggtaaaagaatattttgagtagaactacagatattattgtgacaaaatgttctatcaagtcctgaaacacaatgaactcaaaccagcaaattaagaccaaagaaagtaacgattaatatagaactcgaacaaacaattggagtttcctttcctttctttaaaaaaaaaaaaaaaaaaaaacaaaaaactaagaaaaaaaaaacagagaacag

SEQ ID NO: 104140 - DNA, 1688 bp, Cannabis sativa
  modified_base (1611)..(1620): a, c, t, g, unknown or other
ttggtttggcaaaacaagagttttgtttccaatgaagttgttgcatttgctctagcttaccttaatcactggacggatgcttaacaacatgatactaatgtagaggaatctgcttcttcctctgctgtcggtagtgagcattggaggatacctagctattgttaacatgagtatgatcaatgtggatgcctctatttttagtgggactggtagctttgaggttggttagatagcgcgtgatcatgatgaaaagtttttaaggtcgattggttgagtcgaaatcggtggctagttatatacaatcgtatatggcaaaagcattggctatcaaggaaattcttaattggattaaatattagactctttctcaagtggttgttgaaattgattagcaattggttgttcatacaatttgtcagacatatcaaacggcttccccgtttggtttgattattaatttctgtaaataatatttcatttgtctttgttaagcgctttatgaataaggtggtcaattgtttagggcgttctatttgttctttgtcaggtcgtcaacttagtgaaagcttataccttctcatctttaaactattttattagattatctacttaattaataatacaacaatattttcatttaaaaaaaatatatctgtccaagaaatttaaacaattaataaaataataattgtaacttaccatgccaaaaaaatgtcaatatcttcaataaaacatgtaaaattttcatgttacatgatacgtatcatcattttccatttcaataattatttaaactataaatttaacctttttttaaataaatatatataataacattatacatatattgtcttcgtaaataaatatacatgtattgtccaaataaaaaaccatcattcagatgtatatttttgtttgtttgggacattaatacatgtagtattttgcacacattttgttacattaaatatattaatataatataaaaaaaaagtactatattactatgtaaacggttgatgatcacactttttacacaaactgttatagaatttatatacaatagcctatttccttcgcaatagttttcgtgaaactgaaaagcgctaaattattttaagaaagataagaaattcttatgtaatttcattagaatagcaataagctcagttaccaccaaataaaaatagattacctctagtgacctcaaatttagtccactaatcacaacagagcattatctatgatcggaatcatgactacgtgtaaataattaaaataagtaaataaaataaacacaacaatattagaaaggtttggcccccttggttaacgggtaacaacctactctccttttacttgtattgatttaagagatactaccactcagataacaaactttgttatatatagagtagctccctatgaattacatgttggagattggtttactatgatctagatttactatcatgtatattgttaacatcctaaatattaatttttaaaacaataaaatttagacacaaataaagtttaagaaacatttggttgcagtggaattaaatgactccttccactctaataatttctaacccttgtatcctttcnnnnnnnnnntattatcaagatctgagctcgattctccttcaggtgttgaattcttcacagtcttacacactataatt

SEQ ID NO: 104141 - DNA, 1003 bp, Cannabis sativa
  modified_base (538)..(540): a, c, t, g, unknown or other
acatatttttgagagttctgtaatggggttgctctattttataatgttattaaaaaaaaattattttaagttactcattttattattttatttctaggttcgaaatttacacttatattttattttcaaattattggtatgattatatttgtgattgatatattttttttttgtatttttatatgtgtttttctttttttatttttcatttgattgtttgatgaaactggtttcagttaactatattatttaacatttattattttttatgatttttatagcgtcaaaactagttttacagggtcgaaactggtttcagtggttttaactgttctgtaatggggttgcttcatttttatgatgttattgtatattttttagtttgtataaaatcggttttattattgtaagatatttgaacaaaattttttgatttattttaaataatcagtttctaacacacattattttattatttttataactggttttttaagtaactagttttcataactgtttttttttttattgttgttcnnnattgagttttaagtttcaattttttatttgattatttcaggaaactgatttttattttagttgttttactaactggtttctcacattctaatatttttttagtcttataatttttattgcattttgtctctttaattttctaagtgtttttttttttcctctttgattttattttatgattttctttgatatatttgctgcataatgtatgcttaaatcaactctggtttttgagcaagtaaataaaaaattaaatgccaaaataaagaatgaagttagaaatttgattattaggtattgatataaaatttatcgattcgaaactggtttttaaatgccaaaataaagagtaaagtttagttattgggtattgtgtatttttcattatggtattgatgaaattatttttttcctcttttaatgaaataattagtttatcttaatattgatgaaactggttttt

SEQ ID NO: 104142 - DNA, 1437 bp, Cannabis sativa
  modified_base (504)..(506): a, c, t, g, unknown or other
tacttttcattgtcctcaaagaatacaagaacatatataaatatgtattcatctctttcatcatataccagtcaactatataataaatattacgtttgtataatcttcaggatatatgcaagattttattgaggatgcataatcttcaatatatatgtaatattttatcgaggacacataatcttctgaatatatgtataatttatatagattttctctactatatcatagatacatatattgtaaatattataaatgataagaacatataatatatatttatgaaatcaataataaacataaatatatatatatacatatataatatataaatatatagataaaaagaaaaaaaaaattcttgaaattgtttcagtcagatgagtatatatatacatatatatttagtgtatcgtgactttaaaacaattcaagaaccttaataaaatatttatattggggcttggatctctggcttggacagagactcgtgctgataacgtnnnataaaataatataaaatagataagaagaaaagaagaagaagatgatgaagagataaagagaaagtgaataagaaattatcagttatttaagtatggactaaaagaatagaaaactaaattaataagtaggaaaataaatcaaacatggtgataattttcataataatttttaattatatacatatatttataaataattctataaatatcgttgaattaaataatacctataaacagggacggatccaattgttttaatgtgggggctatagcccacactagcaaaaatattgccttttaaaaaattaaattatttttttttaatttgataattatagactaaaatagtaaaaaaaaaccccacaaaattaaataaatctagtaaaaatgattataatatatgtacaaatattttttaataataaaaatccccacaaagaaaaatttcagactccgtcactgcctataaaatactgttggcgctactccctttacatgcccaaatcaatgtttggcagtttgggttatttaaatctttttttttttgtctctttctaataatccacagtagttttttttttttcttttttaattctttccaataatttctataatttttttgtaattttatttctctcttcttgcgtgtaatcatcaattttttattttattttttaaaaaaaagaaatctgtctccttcttgcctccctcgtgcactccttattcttattttatttctttatttcttttacaaaaatatttatctattatctttaacttcgaaacattatgaaaagtaaaaataataattacaaaatgtggaaattgatcctctaaaccaacttattatccaactcatttaaaccaactaacttaactaactttcagttatgttagttagttagttggtgctatccttgtttgagttagg

SEQ ID NO: 104143 - DNA, 556 bp, Cannabis sativa
attgtacattgggtatttttactactaaaaataaatattaggtatttaagtgtataaaatcagaaacattaggtatttatgcccaatttaccctaagaataattagcatttttattccttaaatttttggcattacttaattttgccccttaaaatatatggtttgttaaaaattctccttaaaatatacggcttgttagcatttttaccctcacaactttgaccaatacaaaattttgcccatttttttttttaaaaaaaaaaattaattttaaaaattgtaatattttattttttttaaaacaattataatattttattaattttggaaaaaaataaataaaaattattaaaaaactgataaaaatattaatttattttaaaaaaacttaaattaatcctaaaaaaaactattttcaaactttattttatttataatcaggtatcttaaaagattaaaccaaaattgttgagaatctaataaataatttaaataaactaagattttttgaagaaaaattaaacttatttttatttataaattcatatcttaaca

SEQ ID NO: 104144 - DNA, 582 bp, Cannabis sativa
cacaggttggagttgggctttccaactcacacagttccctcctagtaaaaacatgtaagatgaagtagactttctgctgtctctatccccggcatagtcagcatctctatatccctctatgttggtgttgaacttttattgcttgtagacgagtccaaccttaggggttcctactaggtacctgaaaacccatttcattgcaagccaatgaatctttcctgggtttgccatgtatttgctcaaggtacttatggcaaaggccagatctggccttgtagaaaccatcaagtacataatagccccaacagcacttgagtaaggcactttactcattgcttccttttttgcttcagtcttaggacattgttcctttgttaaaatgtactggctagttattagctgagaagttttctttgaatctttcattgaaaacttctctataatcttttgaatgtagtcctcttgtgtcaagaacagattgcgtaactttctgtccgtctttatagtgatacccagtatcttagatgctattcccaagtctttcatttcgaactcagccttgagttgcctcttcatctcatc

SEQ ID NO: 104145 - DNA, 2572 bp, Cannabis sativa
  modified_base (2515)..(2523): a, c, t, g, unknown or other
caaaaatttctaaagatgcgccattataataatttatattttatataaaatctatatctttaattgaactaaattttttaaacttttttctgtcaattcatattcttaaaaaatatacatatcaaataaaaataaactatattttaaacattaagataaaaaaaattatatgaaattttcttagaaaaaaaataatacatgatttagaaaaaaaaaaaattatacatgtaaaatcaaaataagtatttaatgaacataaaataatgtgaagaaaattttataaaaaaaaaatattaagagtaattttaaaaaataatttaagtttatttttttaataatggggtgtagttattatttttaggggtgtaaatagaactcccgtagaattattttagtattgcatcaatttttgtaaaaaaaaagttgtttaaaaaaaattcaatttctaaaaaaaaaaatctatagttgagatcattttttttattttagtgttttttttaaaaaaaaaaatgataagaaaaagaaacacaattttcaagttttttagagcattcctctttatataaaaagattttttcccatatttttaagttttttttaaaaaaaaaatcatatttagtgtaattaagtttctatgacatataagatacaaaagttatcgccaataataatcaaaaaaggtgcgcataaccctcattttctctatccatggtgaagaggaagagcgtggttcgaaagccaagatctcgtgtgactgttcgtgaaaatggccaggacttacaggaagagaaggaaattgatgaaacggctttgcatactggactgaatttgattgctaataggttgaaggattctccataattgaatcctgatgctgagaactcgatgtcaggaggattaaattgggcgactgaggtggagaatgagactaatctgatagctaacaaggatgaaattcaggaatcaacaaagaaggtctgtagctcttttgcgaaggagaagatgaactacacagatcctaaattgatctacagataatcgataatcaaggagggaatcaagattgcttaaattgatctcgaagaagtaaatgagcaattgatctgtatggtccttggggccaaccctccaatggcaatttttgaaggttttataaaaagaacttgggatcatcttggagtagctcaagtagttcatatgtcaaaagttctgataatggtcagattcaactacgaagcaactagagaccatgttttggaggtaggagttctacaatttgacaggaaaccggtgattattagaccctggtctagggatttgaatgctatgaaattggttcgtactgtgcctctttggatccgtcttcatgatctaggactccaatattgggggaatagatgcctcagtgctttaattagtatagctgggaatcctatcatggtggacaaacatactaaagatcacactagggttcaattcgctagagtttggtggagatggatataattgattcccctcttagatcaatttagtatttcaattagtatgggacattagtggagcaaatcatcgattacgaatggttaccagtgaaatgcaaaagttgctcgggctatggtcacattatggcagattaccgtaagatgattcctaaggccaaatggactaaaacagagggtgtgaaaactaaaacagaggatgcgaaactaaaagatgctgacaagcagagtaaagtattcactaaggagactattgataatcatgttgaagagaaatgtgagcaagaggatgctgagccagttgatgataatcagagaaaggattggattacttttcaaggaggatagtgaatggaagatctctgagaaacatggagaacaaaaactagaacaaagaaaacaaatttggtaattgctttgctattttacaggataatgttcaaatagtggatagtttgtgtgtgtctaaagaataggggatgttaggaatactacctcagtccattcatctaatcagggatagctgtaatatagtgagttggaatgtttaggagtgaataacatggataagcaggatacagttctagagttttgtaataagaataaaattggtataggggctcttcttgagacaaaattgaaagaggatagaataaaatagatgatggaaaataagtttgctaattgggactattttttgagtcctactatagagggtctaattttagtagtttggaggagaaattttattaatagctcagacaccacaatttctgcattgttttgtcaagatagttggtcataacactgctttttgtattactttctttatggttttaatactatggatgaaaggaaaactttatggcaggacctgttgatgttaagacaccttgtggagccttggctggttttaggggactttaatgttgtcttcaatcttgatgacagaacaggagggaagatgatcactcttgcatgttggaatatcttttaccaagatctagatttactannnnnnnnntttttaacatcctaaatatgaatctctgaaacgatgaaaataaacacat

SEQ ID NO: 104146 - DNA, 907 bp, Cannabis sativa
ccttatttcatttagaggaaaaaataaataaaagccaaaaaatcaaataacaccctctctttcccttctctctcttcgaaccagcaagaaccaaggggatttgttgctgatttttgtgttttcagcaagaaattgaggaggttctaaccaaggtaagccctagacactctttgttatgaatttctcaaggttttagttggttttaacttgagattttagagaataggggctgttatgatttgattaggttatggttcagtttttaagtccattttaagttgatattgagttctggatgctggttttgatgtgttgtgatggaattaaacaagtttgtgtttggaaactcaaacttagatctttaatggcatattttgattctaagtatttttcttagttctattgcttggaatatattgtggaaggttattttagatactctgaaaggtttggtggcatttggataagttttgagaaagtttagagttgtttggggaaacttggtgcaaattggttaaccaatttaccaagttaaccagtttgccaagatctgtaaaagtggttaaccgattttggtagattccctaaaaaacttgttttctcaattcttgcccattcaatgccttagttgggtgtttccctgtttcctaggttattgtagttcctattaagaataaaagaaccttaagttatagtctcgggtttcccgaattagggttttgacgtatgatttacccagttgtgtcatgtgattagggcatccatccagcacgagattgtccgttcaggtcggccaactcagttgaattcggaaaggaggtaagaactgtgtataatatgtaatatgaatatgcgaatgtatatatgtgttaaagtatatgcatgcttgttataattgttacactac

SEQ ID NO: 104147 - DNA, 1045 bp, Cannabis sativa
tgtgtcatcataggtagatcaggtgtgcactcacctgtaggtgaaagacctagaatctacaaggaatgaattaaatctgagcctcggtattatggtgaatatcaggtgcgactactcggttttgaatatcgttttctatgattggtattgagagctaagggtctagtggacggtgtgatatgcatttgacgtttgatttgtgattatttgtggtctctccactttatttatacattttgatactggtgatgagatattttatttttacaaagctaactatgcaggaattttatcaaaccaaaggtcatttgatattagttgttttcctactatgctttataagcccaccccctattttctcccatttcaggaactcaatttaatgctagtggatgaggatggtaccgttgaggaagaaagtcgttattagtttagtcttattctactcattaatctttcaatgacactgatttcgtatttaagctgaaatggatggtatggatgacgtaaattagctatgtactagttagaaatgaggaatgatggatgctaggtattattttggtattttattgacttattaaatctatctattcggtgactacataactgtggggatattattgttcttttatattcatgagtggtcttgattttgttactaatatttttttattaatatagcatttaatccattgcttttaaattagtattttgtgatataaattaaaggattatttataaatcttcctacaaatgtcaaagtgtgatttttgaccaccagttatggataatatatatctgtcacggcctagagctcgagtcgtgacagatccatttacactcctagttttttaccttcttttttttttactcgagtatttagttattatatgccgagattatgctttcttctaaattttctcctacctaatttatgagtattgctattaggcaccagtggtacctaacaccttctcgacatgtcgcgttgcgattggctagcgatactccctaaaaactgttatattaaattatatgggac

SEQ ID NO: 104148 - DNA, 567 bp, Cannabis sativa
  modified_base (32)..(32): a, c, t, g, unknown or other
tgattaacataaataactgctaatttccaaantaactaagcgggctttacactggtttcatactattaatattcaacaacaaagacctataacccaagccagaaaccagtttcaagaaattgaaaaaaaaaacgtatcacaacccaacccaatacaaaaactagtttcaactaactgtcaaaaatcatataataacacacccaagatagaaaatagtttcaactaattgataaataactataataacaccaaaaacaacaaacctataatcaaataacactaaacgaagaaactagttacctctcttacaggggatgaaaaaaattcagaatccttagaatttccatcactcttcttcttcaatccattgagaatttctcctaaattagcaaactcgcccaaaaactcaatcctcaaactagaaatttcatccttaatttgttgttgacactctttcatggaattcagatctacacaaatatggtccaacttttcatgagaaacctgaatattagacaaaaaaataccttgacctcatcattaacttcatcagaacacacaacatca

SEQ ID NO: 104149 - DNA, 757 bp, Cannabis sativa
aatagttttgaaattttactatatatatattagatttcttaattcaaatgaaattttaaattctttttaagatttgaattaagtttttaagaattataactaaaaaaaatcatttttttagaaagtatgatatgattgttgtccaagttagatggtaaaatgctaatttacagttacatgtgaatatttaaagtacaaaacgaaattaactttttataaattaaaaagttcactgaaaatttttagcaagcctatatttgaaagggcataatatgagtgtcataagttgatttacaaaaaataataattattgtttaattattagtgagaaagtattatgataattttgattgttgactaatgagaaagaaggggagacagaagaagagtgataggaatggcagccttatcatacccacgtgcggctcctaatccgaaaccccaccactcactcactcactcactcactcactctcttcatactcataaccacatcagattctcttccagtcacactcacacctggctcccacacttgacttgtcccttcttcttgcccccaccttacttaattttcaaaataataataccattcccatctccacctcaccaaaccaacatacataaacataactcttaattaatcctttctttttttatttatttttttaataaaaatcataatatctattaattaataaattcgttcaaaataacagaacgcaccccagaaaaacagtcctccaactgaagcaca

SEQ ID NO: 104150 - DNA, 513 bp, Cannabis sativa
tagttgtatgatcaagattgatctaaggaaggcatatgatacagtggactgggatttcatggaggagatgttagttgcttttggtttccctattcagttcatccaactaattatgaattgtattaggacaccaaagttttctcttctcctcaatggctctatgtgtggattttttgaagcaaagagagggctcagacaaggtgatcccatgtcccctctcctttttgtccttggcatggaatacttgtctcgaatttttaagaagattggggaatggccaggattcaagttccatgacaggtgtacaggtctcaaactaaatcatctttgttttgcagatgatttattggtgttttgcaatggtgattttatttcagttatgctcatgctccaaggtttgaagctcttctcctccacttctggtttggagcctaatgttcagaagacctcagtgtattgttcagggatgccagatttggaggtgaatcggatcttagaagcatcaaacttctc

SEQ ID NO: 104151 - DNA, 1692 bp, Cannabis sativa
cctagctagctactataaactacgacttcattttgtatcccttataattcaaactattttgtatcccttataattcaaactaaatataataaactaacttaaatatataatgtaaacaaaccaacagtttcgaataataaaaatctagaacattcattttcatatatatttcaaactatgaatcttaatttattttataatttgttgttttaagaacctataatatataatctattaacttctaatctagtgaaaaaattaattcaattaactaacaagatatagttattcattattaattaatcaagcattagtaagataatttgtttctctctaaaaaaaactcatagaattagtagaatctcttaatctcacactttttttatgttatacaattataagtctaattttagattacctctctataaaacttaaaatcttaatacaaattaatagtgattaagcattaacaagatgataattatatagcacaaaaattgcataaacaaacatggaaataatctaaaaactttgattcataatctaaaatagttccattcacattctagaaaagagtgtacttcataatgacaaacataataacaacaataatcatgttcataattaagcaactaaacaaaagaataaaaaagaagaagaagcaaataattctaataatgattggtgatgattacttggaatctctctcttgctcttcaataatctaatctgcaaaagtatttttgtctctcactcgtcgttagaagtcaaattacataatttttataggccaaaaaagatagaaaatatgacattttaaaatttgaaactaaattgaaatgttgtgcaaggcgacatgtcgcctgaaaatatgacattttaaaattcaaatttaaattgaaaagctgcgttaggagacatgtcgcctacatattgtcatcttttgtatccaccacttgccaaaattattaggatttttaccctaaagccaagtagttgatgaataatatattacagattatatgaaatgcaattataagctaaatgaatacattaattatagaagtgtaattaatatatatctgaaaaattctttattcatatggagaagatataatcttgcaaggatgtacaagagaaggtataatcttgctaagtacgacttacacttgttgattttatggcactaaatcggatacgtagcgaaggagtttcatattaattgattatcattttaccatatctaaatagatctacagatgtgtgtacattaaatcaaaacataaattaaccagtttaaaatatataactcttgaagattgctatcaaggtatccttaaaacttctcgtatgttgtatcacttaatccagatgatgaggatgatgcaattggactctcaccagtatctttcaaatcaatacaccacacactaaaaatagtgtgggctattaggataaagtgtataggctttttcttgttgagttctcaacacatgagtaagaacaaatgggagaaaaaaataatttcctttccctctataatttcaaaaattaagtattttgggaactattctgattcctcaaatcaaacttttatttatagtagttaaatctctttaattaatttatatttaattgttcaaataaataaataaatatctataacttaatttggttacagatatttatgag

SEQ ID NO: 104152 - DNA, 506 bp, Cannabis sativa
tacatcctaagacaacttgggacaagagcagtgatgaagattctccctctatttccaacaatgatcaagaacatggcagcaacaataaagatgtgtcctatgagtcttctaaagatattgaccaagaaagcaacactgaagactcccaatgagagagggagggaccttatatcatcactgaagcattagaacccatgacaaacaagatggagccaactatgacttctacttaaatccagtttcggtaccagtgtacttgaataggaagtacctgagatgatattactaataaagtgactgttccctagacagttcacttcatagtgagattcactttaccttgtgcaagtgaatcgattgcctcttgagctgaaaagatacatcaaagccatctgcaagccaaggggtccatcaccaagttatggcccctatacttaaaccgagcatcagtgtaatggggatcaacttagcttctttgattaaattgtaaacctacaagtgttgtt

SEQ ID NO: 104153 - DNA, 589 bp, Cannabis sativa
atgcaacataaaatgttattttttatcttaattatttagtaaatctaattatattgaaatgagttttatttagggaacaaaatccaacaaaagcaacaacgcttaaaagagatatgtgaaaaaaaataaagaacgagcagtcggtcttttcccctgaaccttccaaaaaggtgaaaaccgaggaaccccccattacgttcatagaggaagacgagaagaacgtgagataccctcacgttgatccgctggtcataaccatccaactcgccaataagaggatcaagagagtgttaatcgataatggaagcccggtaaatatcatttataaggagactctaaggaaaatggggctcgaaaaggccaagttaaggccttatatggtgaatctctacggattcaccggagatagcatcgccagccttggcataatcgagctcgcattaaccgtaggcgagtcacctttaatagctactattatgcaagacttcttggttatctgtaataaccaaaagtattttgttattatattctctactatgttattaatatatatatatattttttttagttaactcgatgtggagatagt

SEQ ID NO: 104154 - DNA, 622 bp, Cannabis sativa
atggagctttagaaacaggttcgactccagatgccatatcaattacgaaatcaatttctcgttgtggcggcgcggcaaccctggcaactactcgaaaaacacgtcgagaaaatcttccaccgccctgactgcctcaggcccaaatgtttcaggtctgctgaaatcaattaccattgctagaaattttacacagtcactgcatggtaaatctctaacccttaatacaaagataaccgagatccaagaccccaggactgatccatcctaaacaaatggatcttcaccttcagctgaaaaagttaccattttttgcttacaatctatactggccgaacacttaaacaaaaaatccattcccagtataatgtcaaactcaataaattccaattttataaggtctgcgctcaacttcctatcttcgatcctaaccagcatagacttaaagcgcctattagagataaccaacgccccactaggcattagggttccaaaccctatttctaaaatatcacaaggccttacccaaaaagattaattattcacataattatgtatgaacgtatggctcccgaatcaaacaacacaaaataaaagaagccgtttacagggagctgacctgcca

SEQ ID NO: 104155 - DNA, 680 bp, Cannabis sativa
atagggatccggatacgaacctggactcggacgaagaccaagactgggatcgaaatgcttgacttagatttggaccgagatcctgacccacactcgaacttggacccgcaatcgggacccgaacttggacctggacccgaacctacacttagatcgaggtccagacctggacacaagcacggacacaaactcggtccctaactcaaacccacacctagacttagacccaaagctagaccctgacacgcacccaaactcgaaccaagaccagtatcaaaactaagtagtaagactcaaaactgaatccagactcaaatttggattggaaccctagactttgacccaacctagaccaagacccatgatgcgaacgcacacccaaagcctgatctggacctagactgaaattcggacccgaaccgaaactcagaccaggaatagaactctgacccgaactcaaacccaaactcaaactcagaatagcaaatggaactagaaccgaactacgactaggactaggaccaggacctaaaccaaaacccgaacccaaatcaaaacccaaacagagacctaatcccgaaccgagactaggactcaaacacgaaccttaatcgggacccaaacccacacaataacgaggacctggacccagaatcaggatagggacctggtaaacagaa

SEQ ID NO: 104156 - DNA, 647 bp, Cannabis sativa
gttatggatgctgcaacaccttccttcatgacatggtggattgccgaatggaggaccacatttgtgatcgggtctttcatctgcataaaccattccaaggcataatatattagccaaagatagtgtgatgataaggctgctcaagtacttcatatcttttcttctccttttgtaagatatgacaagtagcaaagtttgagtagttttgttgtgtgtgctttttgaaagagggtttcatggctatttataggtgaactagctcaattaattaggctgtctattataatttacacttacatttacatacagaatcaatatcttctcttaaaaagtggtatatcatactgtgttaaactaattaaaatttgataagtcaactaaatttttatttataaaaaaattaaatctttaattcagacaacaaaagtagttaacatatttaatataaagaggagtgctaccgtcaacttcatgttataacctcttagtcaactttcacgccaaaaacacatggcggtatattttttttcaatttttttttcacgagagtgttcgttatatttacaaatttttgaaatatttcgaatagtttatagtgccgaaaatacgtttgatgtttttttaacacgcgtagtaaactaaaatat

SEQ ID NO: 104157 - DNA, 726 bp, Cannabis sativa
tgggtctgccgaatattatgggccgaaataagactgccattttaggttttcttaaggacaaattacaaaagcgtattcaagggtggggaggtcgtttactctctcgagcagggaaggaggtccttctcaaaacggttgcacaggctattcctagctatgcaatgagtgtctttctgcttctggtggaaacttgtaaggctttagaaggtattatggctaaattctggtggaaaacaggctcttcgactacaaggagtattagttggatgagttgggtgggggcgtatgtgtagacacaaacatgcgggtggactgggcttccgaagccttcatgattttaatttatctctactaggaaagcaagggtggcagctccttacaaatgaatcttctctgattggaaaggtgtttaaggctcgttactatccaaatagaacgtttttggatgctagattgggtaataatcccaactttgtttggcggagtgtgcatgaggcgcagtctattgttcgggcgggtgctcgaaggatggtgggagatggttttacgatctcaattttacatgacccttggttaccttgccctgtagatccgtatgtgtattcggaccaccctgggtcacaagacaaaacagttcacagtctctttcgattggatgataaggtgtgggacatggaaatcataaatgacttgttctctgctcgagacagggctcttattacatct

SEQ ID NO: 104158 - DNA, 767 bp, Cannabis sativa
gtgtcaagttggttacaaaaactctttgaaagcttaaaacaactcataacatatgtgggaatggattgaacaacatctttcaagagaacctctttcccaccaattgaaaataacttgcattccaagcatgcaataacttcagattctatccttgatatcagcaaacaaatgttttttatcttgctcagagtaggctgggaggcctaaatatttttcatgacattcacttattggcataccaagaatattactgaaagagtgttaaacatgctcaggagtattaggagagaaagacataaccgatttgcctacgttaagcaactgtcctgaggctcgatgatagatgtccaatgctctttttattgcaacacaagacctgtcattggcttgacaaaaaagtaaactatcatctacaaataaaagatgtgtaactgatggagcactgcgggcaacagctaagctttgaggcgtccaatggattcctcatattgtaagagacgtgagagaccttcagagcatactaagaataagtacggagataatggatcaccttgatggagccccctcggaggaataaccgagccagttacttctccatttatcagaaatgaaaaagaagtagagtgtaaacacgacatgataagagaaatccatctaatgttgaaactcattttctccataacagctgcaatgtatgaccattcaacacgatcgaaggctttactcaagtccaattttaaagctgcatatcccttagagcctctcct

SEQ ID NO: 104159 - DNA, 811 bp, Cannabis sativa
ccatgatggatttcttggatgaggacgatagtgaacagttaatgccttaaatcctccaactaccaaaagttaaagaagccacgaagatcgctagagcagctgaggaggttgaccctacaacttcccactcgaaaagtgagaacttggaggattcaaatcttctagttgttgatgctccttccttgctgattcttccattctagaggcctctactaaaaatcaatcatacaatacccagccaccaagtgacccacccttgccataatcaaacttgtattattgtccttcttttctctattaatctttaggggataaggatcccccttctatgaatgcagagacaattttatgcctttgccgtagggattttaattatgcgattttttttttttgatattacatacttttaactctttagatatttgtaactttatctattaagtcttgattttactaagttttaaccttatattcagctccctgaggttttggttgtaaaggccaaaatttgtagactttcaattaaatgcttagacttgacttttcttttttttttttcccacaaattgtcttttgttattccttgaagcatggttcaagcccgagccttagaattttaacaatttgtttttagaaaatttttagtaagtgttacttactagctttagattaacctgagttaattatgaagcttgaacttattttttaaattagcctgagttaattaaaaattttactaaattaattttaagtataataacgcagtaaccgttgggaatattttactaggatgtagatttactaacaagta

SEQ ID NO: 104160 - DNA, 1169 bp, Cannabis sativa
aatgaggagaaatgttgtacggtacatcatagtagatggattcatgtatagaagaggattctcaatgccattactcaggtgtgttacacaagaagaagccgcatgacttttgtcttaggtacatgatggattttgcgccaaccacgcagctgggcagagtttatccaagaaaattctgaggcaaggttatttttggccgaccgtgattgaagattccaaggcctacctcaagaaatgtgataagtgccagacattttcaaagatacctggagcaccaaccaatgaactaactcagatgcaaagtcctaggccgtttgccatttggggaattgacctaatcggaaaattgtccaaaggcaaagggtggagtatagtacgcggtggttggagatgattatttcactaaatggacagaagccaagccgttgacaaccatcacatccaagaaagtgcaagacttcattgtgaaaaatataatttgttggttcagactaccatacaagatagtctcggacaatggcaaacaatttgacagtcaatacttcactgatttctatgcaaaaaccaccatgggatgatcataaaatgtttctctgcagtggcacatccccaagcaaaaggtcaagtcgaagctgtcaacaagacactcaaagacactctaaagaaacgacatgaagatgctaaaagaacttcttgaagtattatggtcgtactgcacaactgagaaaacagcgaccgggcagactccatttgccatggcatatgattatgaagctatgctgcaggtagaacttgaccctccatctcacagaagattgacatatgaccaagaagttaatcatgcactcctcgcagatcacttgatgaaagaagaaaagcgaaccgcagcaaacctgaaattggtagcccatcccatcaacaaaaggttgttcagttcagtactgtactttaacaagcaagtgaaagcacataaattctttgtgggagatgtggtcctctaaagggtaattcttgaacaccatagataacacgacaggtgtgctttgaccgaactgggaagaaccatatcaagtgagtgaagttcaggaatcaggagcatacaagctaggtaagtacaacaaaaaaatggaacttgttgtggtaccaaggttgtaatatcccagaaaata

SEQ ID NO: 104161 - DNA, 675 bp, Cannabis sativa
gtgactaatttcagccctcaaatgattttcattgctgaatccaagattggtaaagtgcgtgcggagtcgttgcgagttaagttgggttttgttggttgtttcgtggttgaagctagggggaaaagtggggggcttatgcttttgtggtccacggatgtggaaacccaagtgctctccttctctcccttccatatcgattctttcgttagaattgagaatggtcaatggtggcgatttacgaggttttatggcgatccggatccatgtcaaaggtgtcactcttggaagttattacgaataataagccgaatgtattaagggccttgggcagtaggaggggatttccatgaaattgttaaccaaaaggaaaaaatgggaggcctccccaagccaaggtacctcattaacaactttcaaaaggccttggacagctgccatttgcgagatgttggctatgaaggaagtgagtatacttggtgtaatgggaggaagaatgatctcatcttcgaaagactcgatcgggtttgcggcaacgaagactggtttgatatgttcccttcaatgaaagttcgtcatttggatcgtacaaactcggaccattgtcctttactgcttatggaatatgaccctcatgtacagaatcataataaaactagatggcgaaccagattccat

SEQ ID NO: 104162 - DNA, 570 bp, Cannabis sativa
aaaagttttaattaaaccacacttttcataaactaaatgattagtaataataagtttacaaaagcacacacgtggcgtccctaagagtcagggcgttgcaggtttgcgacacgaaaagaaaaagttgacaagtggacgaagaccttagcaccaaaaatgaaggaggaattggcattgtaatttgaaaaatctcggtatttgaacgttgactcatgtggaccttacacgtttcaggttcaccctagaggaacagttcagaccggtggcgtagtggacttgcaggaacagacttgcacttgcggcttgttccagtgcatgaagttccattgtcctcatgcatgtgctacagctcaacagcgaagtattatcatgtacgcactatgctcgccatattacacaacaaaatattggaggagcacatatgaaggtacaattatgccagttggtgacgtggatgattgtgaatttcctgacaacataaagaacatgacagttggagtgcctgttgagaagcaaccagtagggcgacccaagaagcaaaaggttggaagaattaagaacaaccgaact

SEQ ID NO: 104163 - DNA, 580 bp, Cannabis sativa
gttgatctgatagaattaaatttggagaattttgatgttattttgggtatggaatggcttgcaaaatacaacgccactattgattgcaaaagaaagattgtaactttttagcttgagggcgaggacccctttgtatttgtgggtaagatgcagggatcccgaattcccttaatctcagcgcttaaggcaagagatttgttgtgtgaggggtgcatcagtttcttagcaagtgtagtggatactactaaagaaccaccagcaggaccgaagcatgtcccagtgtggttcgagaatttctagatgtttttccaaaggagttaccaaggttaccaccaaagcgtgagattgattttgagattgatctaataccaggggcagagcctgtatcaagagccccatataggatggcacctgtggaactgaaagagttgaaagtcctattacaggggatgttggatttaaaatttactagaccaagtacctcaccttagggtgcaccaattttgttcgtgaaaaagaaggacggaactctacaaatgtgcattgattaccgggagttaaataagttgacagtgaagaa

SEQ ID NO: 104164 - DNA, 602 bp, Cannabis sativa
aagcagtgttttgggataaacacttgttggtttaccgttgttgtgacatagggctgagatcatcgggaatagttctccacttgggtcggctaacatgtatgaacctagattaaaggtaagaaaagtatattgtactgcatagtacgttgtattgtagtgcaattagtattgttgtgaactgataatattgagatatggttattattgttatataatgaaaagattgattggttaagcaatgataacgtgatgatactatggacataatatatgggctcacctgataaggtgatgcgatatttctggcaacgtaccgggcgttagtgacatatgatgagtatcgagtgtaggtacgggctcacctgattaggtgatgcactattcctggtaacatatcgggtgtaggtacgggcatcagtgatataaaatttcttggttatggcttagattgaaactattgttgggtttcttcctggtgacgtattgggcataggtacgggcgtcagtgatatatgatgattactcgatgcaggtacgggctcgtctaattagacaatgcaatatattggtgccaggttgtggcacgggctcacctgattagg

SEQ ID NO: 104165 - DNA, 764 bp, Cannabis sativa
gctacaacctaaatcgcaataaaattcgtatcaaaactcttattgtaactagcgttgcaactactttataaacacaaaccgtaaattaaaaaaaaattaaaaaaagagtatttaaaataattcccaaaaaaataataaaagcaaaattttaccctatttctttcttattttgaaaatataaataaataataaataaaataagaatatttttgtcaattcaattctaattataatgttcatatggtaataatatttctgttattatttttattatatacttctttactatttttattaccattattatttggtaaaccaatcaccacctaagtttctctaaaagaatgagataggttcctccaagtattcatattatccgtaactaactattaagatttggtcagaccttgttttactatatatatatatgatgccaaaaactcagtgtgtcccgtccccatagtatttattacatttatgccaaatattaattttgttattaaatacttagccgatggccttttgtaacaacgacaacaaagcattaaatagtacatttgattgaatggttattattttatgtacttattttatttttattttaggatatttttaataatataatatacgatttttgggcagatgcctcaggtagatgctgaaggatttactaaagttcaggggaaaaaagataatgatgggtgaatctggggtacaagagcaagacttagatatgcataagacaagtgggggggggggggggg

SEQ ID NO: 104166 - DNA, 558 bp, Cannabis sativa
aaatcttgaatggagttttaatttggattatattacctgacttgtggggcgatactcgggcaatatgagatggagagaagcttccgttgagagcttcgtcagagcagagacctccaaaccaccactgttacgttagagtagaaagcttcaaaccaccaccgcgaggaagaggacgatcgaaacggaaaggggttcgagtggccagtttcgaagaggacaataggaagggtagagaggctgattttagagaggacgatcaagtagccggtttggagaaaggtgtctatcttcggagagcactggcctgattcgaaagggttcaaaggagtggttttgttctgtgtactcgaagtttaggttggatgtgaacaatactggcaataatttgttggttttagggtatttattaaatttgcatctgttaatatttctcacattttcattttgcctcagttttaaacctcacaaacacaataatccacagttaataacagacgcaaaatgaaagcaagttttcaacaattttttggcttttgtcgtcggtttatcttttaccgt

SEQ ID NO: 104167 - DNA, 569 bp, Cannabis sativa
  modified_base (420)..(420): a, c, t, g, unknown or other
tctaccacaacccaaatagaattagacaaacctgtggttctaggtaacccaaccacaaaatccatcgtgatgtcctccaacttccattcagaaagggttaaaggctgtaacaaccctgccggtctctgatgctcagccttgatctgcttgcaggttaggcatttctatacgaattctaccaaattcttcttcattccgctccaccaaaaataaagtttaagatcctgatacatcttggtggtgcctggatgtagggaatatggggttgtatgagcctcctcgagaattttgtttctaagttcaacactatttggaacacaaaccctggctttaaacaataacatcccactgtctgacactgtaaaatgtctagcttaccagttgaaacctcttcactgatttttactaactctggatcantcatctgagcgactttaattcgttctagcagatcagattgcaacgtcaagttgtgaagcttgcctacaacaagctcaatgctggatatgaccatgtcctctactaactgaggtgaaatctgaatcatactagctacttgcccgggaccc

SEQ ID NO: 104168 - DNA, 528 bp, Cannabis sativa
ataaacaaggtaagaaaattgggtatgaatgcaaaataatcttaccataaaagaaaaatattttctcatctaacttgccaaaaaaggactttacatacgttactgctcgcaaagaagctttatctacatgtatcaggaaaaaaaattgggaaattatagtaaatgaccccaaatcttaggactatgttagtatatgtcctcactttaaaaaattatagcaaatgaccctaaatcataggactatgttagtaaatgtcctcatttcaaaattgttaattttttttttagaattagaagcaaattatttaaagatcatggtatatctatattagttttgttaaaatcttttttatttaaaagttatgtcgtttttttttaattttttatgagttgttgtggttgttagtatatagattttgccgtacgttatatttctattttgttgtatggtatattattatttttagatgatatttatattttattatgatatatataatagtggtatataattttattagtataata

SEQ ID NO: 104169 - DNA, 1083 bp, Cannabis sativa
ggttaagaaagctgtaaggctcactttgaagaagtctactgagaaatattcctgtataattagtaggtagcactgtttgataaaccacattatattatatgctattttgactacatatttgtataatttagaagtatggatgttgaaaagtttacgtttgcgtcccatgaaaagtatccatccttaattgagatagctggaagcccatgttgaagaggggggtttggttgtagagttctctcttcagctaagagtagctcctccaaacgttgtaatgatatatttgcattcacaacctttcaaagcagagtcatatcatattttaatcaaccatcgatgaacacagaataataaggccaaagaaaaactttactagaataaatacctgacttaatagattaggcagcatgttcagtggaaatctcagcactgcaaagagagaaagcgatgtgaaggcccttgcaggagtcaaatcccctccaagcaacgtaaaaagtccaaatgataccaccgttacaacaactgggatactgtttagtatgaagctattaaactgcaaccgaaaagaaactattataaaaattacagttatgaaacaggacaaatcgaacatagcttgctctcttttagaggcttgatcccatattattataattttttttttcaatctaaatatcctttctaaccatatttatgtttcaactactagttttcacacatacagcagctagtaattgagctttacggaaccatgatagctcatcatttcgcatattctgaacacaagattggaagcttctttcccatgcatagcatctggaacatgttcaacagagtgtcagtgcatttagttctgatgatatgaagctttattacaaaaataaaagagaaaaacaatacttcacaatatccatggctgaaagaatttcattcatgaggccaactctcttgtcagtgcgcagtaatccttcttcggtgagttttctcattttggaaagtataattgtctgttttgtcacaaagaaaatcattttatcaagaatcaaaagggagtaatgctgaaagatatgagcatatgtttga

SEQ ID NO: 104170 - DNA, 561 bp, Cannabis sativa
gaagatgttgtggcatttgaccacgtaaggtgagtttacggcggaggatctccatctcgcggtagagctggggacagtaatttgaatcggatcgaatattatcttggatgatttcagagcatagaattttgaggtttccttatggcggactttgtaaactgttttgccatctccccttccgagaacttgaatcttcttgagatcggtagctgagtaaggcgcagaggaagatgaccagttgaattcggtggcggtgggtggaagtgagaggtagtgggagagagatcctttttcttatgtttagaaatattaatttttaaaaattatcattttatgtatttttaattcttacaaaatgatttaaagaattgaagtaaatttaaaaataaatatttctatttcagaaaaaaaaagatatataattataggttaaatggcggcaaaacccccaatactttcgttttagtttcattaaacccccacaacgcaaatttctgcgggtaaacctccaatactcgggttctattagcaatttaacacttccgtccaaatttagctgtt

SEQ ID NO: 104171 - DNA, 773 bp, Cannabis sativa
  modified_base (397)..(405): a, c, t, g, unknown or other
  modified_base (622)..(624): a, c, t, g, unknown or other
gagtactcatttcacttcgctgaaatatcatttttacggggatatgagttttcgttatgttcttaaatagataactctagatttcacgttaggcaaagaaatttgaaatgtttgagaaatttcataaatttctagcaatggtggaaaaccattaagttaagtggttaaagatcttgcgaactgataggggtggagaaatatttggatatgcagttaaaagatcatcaagttgaattttgaattgtattcaaacttacctccccagaaattcgatttgcatattgatgatagtataagatctatgattagttactagttgttgcataagtccttctagggatttaccctagtgataggaaaatttcagaatgttggaatggttgtgtacttagtgtannnnnnnnntagattcatggatgacctaaccgtgatcttaagaaagctaaaactgttaaccaaggtttgcatgtttgatagctgttctaagtgattagggatggaccatcccatggtcaatatataagaaagtgtttgcttcaacaaatagtacttttttaagaaaatgactaagtctgaaaacaaagtagcaaaatagaggagatattttttttttcttgattcnnnaagtgttctatcatcttattttgtataagatggtccgtcttcctctgttgtcttgatacagccaaagaggacaataccatttagtgttcttagacagaaagtcacggtacctcgtcgtagtgggagagtttcaaggaactcaccctgtt

SEQ ID NO: 104172 - DNA, 694 bp, Cannabis sativa
accggatgatgatgacatgttctgtacacctgagaagacgaatatcaccagcatcggggatactcaggattctaaggtacaggtgttagagacatctccagaactagtggagaatcggaggaagagaaagcagcctaggtggttcgatgagtacactgaaatgaaaaagaagtccagggcatcgaagacacttgtgaatgcggacccacttagagtggttgatcggaagctgctcaagacttttcacagttgggtactcggccagattgggaacaagtacccgagagagtgcttctccagtagacacgattcagcttggttcctcgaacaagatactccgaagacatggcttggagacgatgtaagtttttaagatttttttacttctttggtttttaaagactttatctaaccttttttatttaatctctgacatatttaattatcatgttttagcatttggatgcggcatttcatttgatgaggaggcgacaacacttttatccagaagtgtacccaaatagatgtgtcatcttgccgtgtattttcccatcaggagttattggttggtgggaagctgcgggtaggggtgtgcagaaagtcatccaatccaattccaaccgaccgatccaatcccaaccgatccaatagaatcggatatccaatcataattggatcggatcggatgcaaatt

SEQ ID NO: 104173 - DNA, 578 bp, Cannabis sativa
tttattttaattatatatttattaatttatatattattttatttaatttaaattacatatttattttttaaaatttaaattaaatattattagtccaaaatattaataacttaataaatctaactacaagttaatcttaaaaaattacagaaggaaaaaaaattcttgggcctttcaacctcaattatcatcgtgaatcagcgccatcaatcattctatcaactgtcgctgtaatggtaacaattacgtttttagatcgtattgccccttaccccgaaactgttaaaaaaattaaaaatttatattagttgatatatatgtatattatatatatttgttattataataagtactataatcaataataaaaattacagctttttgatcttgtatgtaacggttggggtttgcacgtgtgacgatgtcagtcatgtatttcaaaacataaaaaccacattcttggcttttaggctgtcttggacaatttgctagttaaatttgccacggggcaagatactcatgtgcgtcccttatatatctaaatgcactgttttaaaaaaattatattaacatttcaa

SEQ ID NO: 104174 - DNA, 717 bp, Cannabis sativa
cccaagccatgtcgcggcacctgggacacatcccaggttccacctatagggggcaccccgcggcatgctcagagcatgctgcagcacctaggttccaaacccagaaaccagccagcaaaactcaaatttttagcctccaatcaataccaaatcaccccaaaactcaaccaaactctcaaaacatgatgacaacttatcaagctccaagataggatattaaaatacatacaacatgcattaaaactcacactttaccctaaaatttagattgcacactcatctcagaatcatgcttaaacttagcatcttcaagttcatgaacttgagcatgcttcaccaaagatccaacctcaaaagctcaaatattaaccaaaaatccaagcttcaaacaatagccaacatcactaatacaagaaaagcaccctacaccaattcctactcaaacatgcatgaattaacaaaatcacacccatatccaattcaagcataccaagagcattcaaagcttaaaaactcacaagttcttttcaatttcagcaagaattcaaagcttaaaacagtaggaacactacctcaattccttgaacacacactagcaccaagaattaaaagcttcctaggcaaaataccaagcaaatttcttcaattcaagttgaaactcaaaaagggttaaagagagagagagagagcggggtttaggtttgagagagaacaacc

SEQ ID NO: 104175 - DNA, 1357 bp, Cannabis sativa
  modified_base (246)..(252): a, c, t, g, unknown or other
tttttcaatttgaaaaacagaaaacaaaagtgtgttctctaaagttcattttcattttttaattttatttacgtcgggtctaggtccggggtcgtattcgggttcaagtgagaggtcggattcagcttcaggaccgtggggggatttgggtctgagtcatgatcgaagtccaagatattgattaagagaaaaaaaactgtttaataaaatattgaaagtgatttctttttgtttttaaaattttgnnnnnnnattaaaaaattaaaaagtaaaaacagttttataaaacatgtttttgaaaaatatgttcactttttcaattttaaaaacagaaaactaattaaaaaaaatattactaaacggcactaaaatgaactgaaacataaataattctgataaaatttgatattaaattacaccaataacaattttatatcacttagtaatacttgccacaataagatacgactttaacatttctctatatattaggaagaaaatcaaactttatatatatggctatacccatttattgttaatattctttaatttttaaatttagtgtaactgcttaccctttaaggaaatataaaatgataagaacgccagcaaggtatacattagtgtatatatatagagagaaagagtttgatgaaacatatatattttgtaagccaatacatcagtaaaatctatatatatatctaagaattatattatataggatataatacagtcctcagccatgaacaccattgcactactctcgttcagtctggccttggccatgattttcttgtccggtatatatagctattgtcctttatttttattctctgtatatatactaatttttttctactatataattgtaaacctaaaatattatgtatgcacattttatcaattcatatagctagagttttgaactttgtcttgcataaatataggggctcaatcagctacattcacaataaaaaacaactgtccattcaccatctggcccggaacccttaccggcgcagggaagcctccactatcatctacaggtttcgaattagcatcgggcgcaacacaatccattgatgctccggcaggatggtcaggcaggttctgggcccgatccggatgtaccaccgatgccaccggaaaattcacatgcgaaacagccgactgcggatccggtaaggtttcatgcaacggggctggcggaattcctccggcgtctttagtggaactcactctggccgaaaatggcggccaagatttctacgacataagtcttgttgacggcttcaacttgcccgttgggctagttccgtcgagctcgtgcgctagcacgagctgtcctgcgaat

SEQ ID NO: 104176 - DNA, 967 bp, Cannabis sativa
aaaatcaaaatatcaaaaaatatcaatgtaacaaaaataccaataaacaattcttaatactatattatattagaattaatttcgagtacatataattaatatttatacatgtactataatttgaaataaaattattaattctacataaataaatttataaagaataagtatatatatttttaagatgtaattattcttatatggatgtatattttattaatacgagacttaaaaaatgtataactaattacaatatataggttattcttatttataactgacctaaattgagatttcatttttttataacaaattagaggtcattcttgaatagagtattcttaaacagaggttctactgtaattccaaatttcttaaatttaacaagatgtcttaaataactataatgtacacaactatactataatataaaaaaaaattgaactaatttatttattttttgataccaaacaataaggaatggatcaatgcaccattttttggggtgtgcaatcgtagaatctcccataatttttttagttgtgttttaataaactttatcatgacttttttttaagttttttttaattttatattagtgagtgagattcaaacttatgatctactttaaatgaggagaggtgtgaaacactaatatgataatataactttttagttaacttttaaaaatatttctggcataattttctaaaaatttatatttatattttgtaaccgacatatacacttaataatttttttttttattttggttgatttaagtaagagaggaagcaagaatgatccattaatcatgggtagccaagcagtacatgttttttacatttatgatccgactgatgaataatggtgtgttattttatcgacaccagaaatgaaatttttagagaatgaagaatataagggggaatgctgatttatgttatgatgacttcattgttggaca

SEQ ID NO: 104177 - DNA, 860 bp, Cannabis sativa
cttttatggtaggaaataaaggcaaaattatgatcttggctttatatagaaagtgtactaattttttctgagttataattacagagtgcttaattgtctctacatatcagggtttaatttagaaaaattttgtatagttgtaaaaacgtgttatggttatctctaggatttctatgtattataaataggacccagagagcaaccaaacaaatttatctcttcaagtcttattattttatattttcatatttgtgttaagagtattttcttgtgagaaaatctaaagtgttctactaggttttagtttttgttttattattctttcattattcttggaataaggtgaagagcttcattgaacaagagaagaattcttttaaagaggacttgtccaaggcttactttgggaggaagtaagcacactcacatcaaaagttgaaggattgcggcaaagctatataggaagtgtaaacttatttaagttaattgtattaataatttttgtgactatactaattgatttcattctttgagagtggcctcgtggaatagtagtgtttgaaaaaatactgataccaaattctcttatgtcgagttttgaattctacacaatttatttatgtttctattctattacagcaagtttgtgttttgcagtaacaagttttcaatctgttactgcaagtcattacgtcgcattttaattaatttttttttgaagaaataaattggtatatgcaaaaatactgtttttctattggtatcagagcaggacactaaactcttaggtggcgtttggttggagatgatgaaatggaatgaaatggaaatgaaataaatttcattctattcctttgttt

SEQ ID NO: 104178 - DNA, 940 bp, Cannabis sativa
  modified_base (237)..(243): a, c, t, g, unknown or other
tgtctggcagcgtgatttccacagaatccgtcgtgaacttcagatagtagtcgtacagcttcgtcttgtgtgacacatctgagtaatggcatcgggaatactcttctttacatgactccttctactatgatataccgtgctgccttccttatcattttctgagcttcatttcggttatttgggagttccccagaatcgaggtaggctgctattggtgtcatccagtttggggacgtnnnnnnnatttcgatttcttccgtgccagtgctgctaggctcttcaaggaactggataggggccaaatttgccttgtcacttacattgctgcttgccaatttagctaacgcgtctgcagttgtattttcttctcttggaatttgtctgagatcgtagcttttgaattgtgcgagcaggatgtatattttgctcagatttgctatcatcttttctccccgagcctcgtattcgctggatacatgatttaccaccagctgtgaatgactgcagatttcattgtgttcgaccttcatttcccaggctagttttagtccagcgattagagcttcgtaatcggcttcgttgttagatgccttgaatccgaacttgaccgcagcatgcaggtgttgcccccaggcgtgacgagggaaatccctgcgccagatagttgatctgtagccgacccatccacatgtagtttccaggtcagtttatcttcattgttacttggctgaggtgctggctcggggttgctttctggtatgctttcttctttgcctgtgcattctacaacaaagtcggccaaggcctggcctttgattgttgttcggggttggaagttgatttcatagtgacccaattctacagcccacttaagtaaccgtccagaagcatctggcttttgcaatatttgtcataacggctggtcggtatatacccgaac

SEQ ID NO: 104179 - DNA, 517 bp, Cannabis sativa
gcatctctcagccattagatcttccattcgatgaacaaattacattaaacaaaaacgcttacccatcttcatctaataaagtgatataattatctaaattgattttaaatagaattatttttaaaattaactaacaagtacatatctatataattgtgatatatatatatatgtatctattaatttatataaaatagttaaaatattttgtagttaaaactactattttgaagattcacaaaaatttgtgatacacataacaactaattgacactgttattaatactggaaggagtatgaaaagttggttttgatgatgtaaaacgattaatatttgtttgacgtgctattattgctactgttattgttgtcgtggttacttgtatagtttccattagatagtagaagttggagttggagttagagtgatgatgcatgatcaagtaaaagataattattccaatgcatctctcacccattatatcttcaatacgatatattttttttttttttttaa

SEQ ID NO: 104180 - DNA, 627 bp, Cannabis sativa
agaacactttcgagaaaaaattccagaaaccataaattttttaccgctatttctccattgttgtcaatccgcgttccaccgtcgatcaacaccaatccccagttctcaaccttcgtgtaagttttctaggtactttatgtttttgttgttcacttgcatgttagggtaggacttttggttaagtgcttgatttctgggaaatggctttggcgaagactaccgtatggtgtatataccctctcttatttgtgtcccgttacttttttattccttttgtttcacaatcgacctctctgttgagagattgcctagaatatgaggcagtttttgttcccacgttctgtttcttttatttctcctctacttttgctgctttcgagatacttgcacccgatgtttgcctaggagaatccttggaatttccatctttggtaaacatccggagggggcctctttgagcggttaggggacccccattccctcttttcacattagggtttggtttgggggctaactgctagattttctttttatagaatctcaacaccttcaggaaatgtctacctctacgtctggagccaaatcttcttgaaagggggtggttactctggccaccctggaagaagt

SEQ ID NO: 104181 - DNA, 639 bp, Cannabis sativa
ttgcgccactatagattcgaaatcacactcttaattatatagaacgctctatacgtaccaagatataaatacgctattaattatgatctattgttataatccaatagtcaaaaatcctctatagatgatctacatcaaataaggacaaatttactattctacccttcaatgtattttatccgtaaaatacttagctacatataaatgatatttcaataaactaatataattactgaaatgaggcctcaataatttaccgaaaaggttttagcaagttgcttacccgacttgtatgattatgacatagggcctccgttcagcacatgaatttccattcaggttgaccgacacacttgaataagaaaatgaggtaagattagcataaaatgtgtatacgtatatatgcatgtgtattatatgcaagttgtattatgtgatttgtatactaccaatattagtatagttgcgatacggagtgaattggtactgtatatgatgttcaaagggtacgataaagtattacaaatactagtacgagatgagtacgtagtacatgtggtacaacactcagtggtactcgaggtgttcagccctaccaacactagtacaagacgagtacttagtgcatgtggtacaggg

SEQ ID NO: 104182 - DNA, 621 bp, Cannabis sativa
ataccaacaccgagtaacaagatattttaataagaagatgaagaaaaggttatttaacgtcggtgacttggtactaaggtgagtatttgcaaacatgagagatgcatctactagagtatttaacccaaactgggaaggtccttatgtgatcgaggcaatagttgaaatcgtggtttataaattagctcagcttaacgactcactaataaaaaaacactggaatgtggagaatttacgaccctagtaccagtaaactaatgttgtaatctctctttgtaatgtaatttttaaaattcaattattaataaagttgaagtattttccaagtaattacaaagttttattctttcaaattacttgaggggcatatatatgtgtatgatcaactagaatttatctagaaatacataatatattgcaaacccactccattttaaaaattttaattttttaaagtttttcaagtaattgattgaagtcatctatggacgatgcaaagtcaaaagtagcagttgtaaatgagatttaactcatgaaaataacactaagctacatgcgaagctgaatatccaatggctcgcattttataggaatgtataaaacaaggtaccaagatgcctt

SEQ ID NO: 104183 - DNA, 535 bp, Cannabis sativa
ttttattaattctaaatataaaaagaaagtattcttgtaaaaaatttcgtatgacaataaaattataaatttttacgcaaaatctaatatttttgtaaaaattcttaaacaaaatgagtccaagaacatggcatagacccttattcacaagaaaacccaaacgaaatataaaaggaagatacaaatgacacaatttagcaccactcttcattatttaaaattaatttaaatttaaatatgtgagacatgatattcatttgcaccactcttctctatttatcagctcatttgtcaattaagaagtactaaatcaacttgggttgcaaattcaattgtgacccaaataatggcaattttgagggaattgtagtgaagaaactagagcattgctatgaagttttgccactataagtgtgggtttggtagggtcattccaagtattttaatactcatgaaactagtcataattaaataggagtaagttgaaaaatacctattttattaatcaattaatcaaatttacctttaattttat

SEQ ID NO: 104184 - DNA, 543 bp, Cannabis sativa
aatccagactcagattgggattgaaacttgggactcagacccaacctagaccaagacccaggacgcaaacccacacccagagcctgatctagacctagactgaaatccggacccgaaccataactgaaacaaggactcgaactccgacccgaactaaaacccaaactcgaactcagaatcgcaaatgaaactagaaccgaactaggattaggaccaggacaaggacctaaactgaaacccaaacctagatcaaaaaatagacatagacctaaacccgaaccgaaactagtactcgaacctgaacctagaccgggagccaaacccacataataaccgtgacatggagccaaaatcgggacagggacctgggaaacagaactaggaccgggacctagtacccgaccagacctgaacttgaacctaggacccagctcgtgatccggcaccagaaatggaaccagattgggacacgaaattgggatcccgatatggacccagggcttggacaaaacccgtagtcggtgtttggatttgggacccagc

SEQ ID NO: 104185 - DNA, 891 bp, Cannabis sativa
ccttaatcgtcgcaactcttcctcttgacgaattatgacacttcgcatttcttgaatgccagtcagcaggaagattagcattgccaaccctcgcataattccctaggttctacggaggtggaggcagtgtcggtagattgatttggtatacacaaggctctactaactcgccctgtggtctggatgattaacgagggtccattactagtacccgtgtaatcaacaaccccagcgagttaagcaccaataccacacttaagcactcattgccctaaaccctaactcatccatttatcccatataaataaacacttaatcatatggcattttaaagcatggcatcgcatgacacatatatatattctagatgcttgcatagtgcctaaaatggaaagcggtaacaaaatgatcacacaaatagtaaagtatttactctcaatacttactgcacaatgagtcgagcttgtctctgacgatgaatgtacatgttcggccggtctacaggaagtttaaaaacctttgagctctcataccaaattgtaacgccctgaataataggcacgctacccaagtaacttattaaatcctaatcccctaaacgagattactaataaaaaatggcgcgaaatttaaactttaataacaataggaatgaaaaaaacttgtaatactttaaactttataaactaaaagttacagatgttgggatctcaaaaacatttacaaaatattattacaagtccttttctttcagccggcctatgcggcaaaaccgagtttcaaaaacataacactagtagaccccaacccgcttggtctgatatggcccggccatgtacattcttcgtccagctcctgcactcatgactgatcagcaatagtcttaccctt

SEQ ID NO: 104186 - DNA, 696 bp, Cannabis sativa
  modified_base (567)..(578): a, c, t, g, unknown or other
ggaacagagacctcgacctggaccaaaatttgggacctgatcccaaacacagacttggaccaagatagggatccggatacgatcctggactcggaccaagacccagaatgggattaaaatgctcgccctaaatctggaccgagatcctgaccaagaccctaacttggacccgcactcgggaccccaacttggacctggacccgaacctagacctagattggggtctagatttggacccggacccaaactcgaacccagacaaggaccagaaccaaggacttagacccaaagtaaatccagactcagatcgagaatggaactttggactcggacccaacctagaccaagacccaggatgcgaacttacacctggagcctgatctggacctagacttaaatctggacccgaacccgaactcagaactggactcaaactctgactcgaactcaaacccaaactcgaactgagaatagcaaatggaactataaccgaactgggaccaagaccaggacaaggacctaaacccaaacccaaacccagggcaaaacccagacagagacctaaannnnnnnnnnnnctaggactcgaacccgaaccaagagtagggcccaaacccacacaataatcgggagctggacccagaatcaggatagggacctggaaaaaagaactaggaccgggaccaagtacccgac

SEQ ID NO: 104187 - DNA, 515 bp, Cannabis sativa
agaaacccctattgcaactagcgcataattaataaggaatagggtcacgttttgtgcagttttaaaaattttatcaattacatattcgaatttttttaacaaattttgtttaattataaatcatatataatacaataaaaatcaggttttaatttatttataataattaaaagctatatatttaatttaatcactttttcaattatataattatatagtacatttttgtttatatttattgtatatcaattaataaaaacggtattttaataatattaataataattaatcacaacaaaaatcttattttcaaagcctcaactacattaggattcatgttaaaaaaaaatagtcttaatatacatgatttatttttgattagttattaatataacatattaaagactttttaaggaaattaccccatataaatattatgcaatttaatattaaatgatgtttatttttttaaatatattatatatatagtaacttctataattaattgtattaat

SEQ ID NO: 104188 - DNA, 685 bp, Cannabis sativa
cgctgaaatatcaattgagcagtccatagtattagcttgtctattttttcatttcttttattgatcaatatcgataggatatcgacattttttcgataaagttgcttgtgctttatattttctagataattttgaattgtcgatgggatatcgacatagtgttagtattttctcgactgttaccaataatttatcgattatttctagtttgcctatggcttgtttttttactattatcaattgagcaattgatagtgttagcttatctattttttcatttcctttattgaatattgataggacatcaacattttgttgatgtttgtcgataaagttgcttgtactttatattttctggataattatcaaattattgatagaatatcgacatattgtcgatattttctcgactactatcaatggtttgtcgattttttatatgtgttttgatttttaaggaataataattttgtcgatagttttttgatatttttttaattatgtggctgacctttttctccttttgcagatgcctccgaagcttatagttccattttttgagcattttacaggtcgtggacctacagaggcagtggtattttaagtaattttatcaaacaagaatttgataaatacgatttgactgatatatagggaaaaggctaggctttatcctgtatcttta

SEQ ID NO: 104189 - DNA, 534 bp, Cannabis sativa
atgtgatgaagtacatggaggctgcgactaatgaggaagaagtagttgatcaggtatacccctgtttatttagttcagaatgtactacccaagtttcattgagattaatgttatgtaattgaaatttaattcagtgttctactgttaacttgatcagagttaattacattttataagtttttgtttttgtttatgtatttttccacagtttcacccgattgaggcatgtttggaaatctctgcgaggataataaatgatgaacaaaatgaacttcgttcaaaagtggttgaagatcgaagggctgtacaagacagctcatttgcatcatcctcagcccctttgcgtactccgtcaaagtctccaggcgatcctcggttcagtacggtgaagtctcgccacgcaaacatgtatcctccctcaaaagcctcccctaggtttcggtctaccaaggctaagatttcatatggtgaatagtccgtaaaaaaacttgagttattattaggttgtgttattattaggttgtttagtttgga

SEQ ID NO: 104190 - DNA, 531 bp, Cannabis sativa
caactttttcattgatctataaatctccaaaataaatataataagtcttgaaaatataaaataagagaaagaagtaaatagcaaattgaaaaaaatacttaaacataaggtattacatattaactttcatttttttcttggcttgatcatttttcttgctcggtaattttggctgcgtaggactatcggtagtcaactttggctttgtaggacagtttcttttatcgtgatcagtcccactacagatggcacaatgtctatcgtcgcttttacgtttatttttgtcctttccttgaggggatgatcgagatgagcttgctatagttggcctgcctcttgtttttaagatcgtagagtccaatatattattagggaattctccttcattttttgttaagaatattgaactctttgtctggaggtattttttccaattctgcattcaagttagatataactgacatggccttctcgaatgcttcttgagatcttgaagcaaggtaagatgtgatacatgtttgggaggtaaca

SEQ ID NO: 104191 - DNA, 2377 bp, Cannabis sativa
gatcttgtgttgatgacgaagtgttccgggtatttcctgagcaacattagaaggccataccatggttttccctttgattcaggaccgggccaatcctcagatgtaagatatctccttactcgactatgatgccaaacattacgaaactgctccatcaactgaagaagagtaacattggagttaggaatcttaaaaaggttcacatgtaatgatgtaagataaagaaaaagaaacacaatgaggccataatactctcgtaaacacacaaccgaagacttagacctaacacaggatcccaagccaacaacccacagtagactccactaaaattatctcattgtggaatcttaaagcctagattttccctttcttctaggagaaatatctcaaggtagatcagaaataactacctcggctgtgaattatcactaccgataactaaactaaaggacatggaaaaagaaaatcagtaactgtgtaggtcaaaggagaaaagaaaaggtaagatggcctacagcctaatctgatttgacattaaagagagacataactaattcagcatcaacttcaagagaaaattactcccatacaaagaatttacaactctcatcaggtaggtgtaaggttagatcctttcaatttcattctattctcacaacacattcaataggaaaggatgaaagactaacctcagcatgaagtttctccataggcatccactctccaggaccacataaatcagaaagcactgtagcaacagatgacacaacatccttttcctccaactgcagaagctgttggttatcgctatctcgatcaattcttgaccttccatctcccttcttctctgcaaggaccggagatgaacgctaatgaaattgagtaaatatattgaattgattacaacactgaatattacacttaatacaccaaagagagagctgctgcaacttgtgggaaaactaaacacgaaaatgaaagcgggcaacaagtcatatgatatcctgaaaaagatccttagacatctcataagttgtttaaccataagatggacacaaaatgaacctttaaaacagtttctaaagttgatttggaacctaaatatttgtccatgtttacatccactctcgtctgttcctaatttagaaacaaagataataattctaagccacaaatgtaggttcaaaatagcaaaccttacttggttttagcaaccctctaaagcccagaatgtatatacaaactcatgatttacaaaatcatagctttcaaagtcttcttcaataagtactcgcattgattcatagtataacaaattacaaacttccaaacaacaatcacaccattacccaaaatttcaaacagataaaacatttaatcctacaacataattcaaagtgaagtgttaattatataaccatataagtaatatcccaaaatcacatccttaatatctctgttttgtacaaaaaaaaaaaaaaactttccattgctaaactttctatttagataacatgaagtttaatcattaaaaaccaaacaaaaaaaactaacctaaagccccagccttgccgctggatcctccagcaccaccatagccataaccatcatacccctctcttctcgatttcttaccactactcccaccaccaccaccgccaccacctaattcatcatcatcgtcatactcctcttcataatactcccttcctctccccttcttcccaaccgatccagccccagcaggaccagacccaacgtgataattataatgagcaggaacaattgctccgcctgcaaccgccgcggcggcaacggaagaaccgtgaccgacgtaatgtcttggcccaaccggcccacccaaaatactcctaacgggaagcaagaagtaaaactccttatccccaatctgaagcagatcctgagaatcgagcttgacgggagggtttccaggtaggtgaagaacaccctcaacgagacagccattctttccgatgacttcgagggcaaaacgacggcgggagaagtcgtagaagatgcgtgcgtgatgacgggatatattcatgccgccaccgagacttgagaggtcgacatcgacgttggatttcttggaattgcggcctaagattatggagtaagtctgcatgtagtactcgaaatcctcgccttgaagcttggcgaaacctgcttcgacgtcgctactggtagcccccattgaattggatcaacaattctattcgagagagagagagagagtagtttagagagagaaagtgtaatagtggtaactggtaattggtaaattgggctccattggacctgtttggataccagtaatttcatattctcggacgggatttcgtatgcttctcttctt

SEQ ID NO: 104192 - DNA, 506 bp, Cannabis sativa
tattagtttaagtttgaggtatagttatatttcactaggaaatattatctttatgttcattagtatatatcgtgaaggaaagaaaaagaaaaagaaaaaacataaggaatattaaattaaataatttttggtattatatattttttccaatatactagtggtatattaatttttcactatatatagtatttatgcttatgattgcagaatatagtttttatatgctattgtatatcgtagaaaaaaattatttaatagtatattcgtttaagtttatggtatattcatattggtctaaggtatatgatttatatgtgatatggtatattgtgaaggatagaaagaaagaaaaaattattaaatattaatttaagtttttagtattttttttatttagcacggtatatctttattatgtgctatgtgttggattaaaaattttattgtgggcacatatgtataatgtatatgctattataaactgtgatacaaaattaagtgaccaa

SEQ ID NO: 104193 - DNA, 545 bp, Cannabis sativa
  modified_base (476)..(477): a, c, t, g, unknown or other
atgcttcctctccaagactactttattaattttttagtttttgtcggccttgcgccataccaacttcttcctcaagcataccgcctgctctcaggcttatatattttactccgcccgggatgggtctctcccagcccggcggagatatccccaagaagggggacaaacttgaggacggtttttatgggttccaggcccaccctaccaatgatggggtggtcccgtataataggcaaactcacgtcaaggagtatcgccatcgtcttttcttctcttctgggttccgggcagtggaacatccggagctcctcacggagtgggttagcatccccccttacgagcggaccgcgcctactcaggtctttcttcggagagcccagaccttcgcctcttatgaccgggcggacctcgacgtcgggggcctggttacgacgaagaattgccagaaggcaaaactcatcctgccgcaccaatcnntggaggactctaacctttcccgggttatctgtcccaatgtgagggtgcctgccgcggagaagaccttc

SEQ ID NO: 104194 - DNA, 599 bp, Cannabis sativa
atattttatcacattaataggtgataattgttattcttagacttttttattttaaaatttattattttgatttgcctaataattagttagctatttctgtgcatatattttttttaatttttatgtataatgtgtatataaattaattcattttaataagtaactattttgttttttttaaatgtttttcagattttaatttagaaaattaattattaatataatatttaaaaaactaaactaattatttatttaaaatgtttctttcaaaagattatataaatttacatataaatgtaaatgccaatttttttccattacttctcgtttctccttttaattttcattcttctcaaaattcttgaatccattgtataatatacactgtaatatctatttgttggacaaaatttaagagattattaaaaaggtatgtcttttttgttaacagataaattgttgttagagatgcatatgtatatattgcttttcatatgtacaatttagtgaagaattttgataaataagattattattttaactaaatattgatcaagtgtatgtataagatgtggaagtatttttattaaaatattaaa

SEQ ID NO: 104195 - DNA, 1072 bp, Cannabis sativa
aattattaaataaacattagtaaaaagagagtatatatttattttattataaattttggtaataatttaatgataatatttttaaaagactattattttttagtctccaataataatctatgtcattttttttattaacctaattattttttttttcatatatttacagatttttcaataatggcaatttgttcttcaaacctatactacccttcccaatctcttgggtggggagtgttgacaccttcaacaacacaaataaaggtttttttcttttaaaaaaataaaaaataaataaatttgttgattttattaatggtacaaattaaaaaagagaaattaattattattattatttttttacagatacctgaaaataatatttataaaccaatttggtacttactatgggaaaaattatgcggcaatattcgatgttggaattgcgtaagtaatattatttttttctttatatttaaaaaaaataaaaaattaaaaaattatgatataaaatgttataatatatattaatacatagaaatgttattgaaatacagaatgcaaatataacaatttctggatatgatcacaaccaatatattggtaatttgggagacttgatggctaatcaatttgaaaatattactgaaacttttactgctcgaccaacttctaagggcttaatattcataaggtataaataatattttctattgtgctatttttatattctcttcttaaattatttaggggtttttacaccacatactaaagtttttaatttttttatttttttattgtgggacaaaatttttttcaaaaataatgtataaattttttactatgtgctgtgttaagttttcattgttgttcggttattttttagttgttaaactgttgttttaattattcagttttgctattttacgattgtttcataagagaatatttttgtaagaaattctatgtgagagtaaaattataaatttttgtccaaaatcctatatttttgtgaaagttttattatttatctaattagtaattgcatactagaaaatttaagagcatttat

SEQ ID NO: 104196 - DNA, 695 bp, Cannabis sativa
agatcagtctaaatcttgagtatacatgaactcctattatgtgttcattgagttctttgattcactcattaaattttctctaagaagatgattcttataaattattttggggaactttataacataagtggctagaaacatgttatacaataatagaattaaaactttctgaaatgatcgaatattagttctcttatagtgttaattctaggagtattaacagttggattcaaatttataattagattatagattaattgttcatattgaattaatggtacataagaaataaatagataattagaaaggtaaaatggtaattttgaccaactctaattatgaactaattaataattagagggcaaactacttatattgattatatcaatggggctactagtaagagttttgtaaatataattctatattgtcaaagagtgcaattctatatgggaaatttgaaaaaatatgcataaaatacccttaaattttatgcctaaactaatgcatttcaaaatttaaaaaaatatgaccactttataataaacccaaaaatacccctctcattttcaaacctcaactctctctcttcctctatctctctccgttctctctcaacatcccacccttaccaaaatcgaacctacccctcaccgcctacacagacgaccaccgtgagacccgactacctccga

SEQ ID NO: 104197 - DNA, 733 bp, Cannabis sativa
cattaatagatcaatcttaatcttcaatattcatgtgaattcatgtttgtcttcattaagttctttaattcactcattaatgtttctcagagaagatgattcttacaacttctattttaggagcttaataacatgagtggttgagaacatgttatatagaaatagaatctaagctttccaaaaggatcggatattcattctcttacagtgttaattctgtgagtgctaacagtttgatctaaatctataattagattatagattaactgttcacattgaattaatggtacataaggaatcaacagataattagaaggataaaatggtaattttgaccaactattattattaactaataattggaaggcaaactaattatattagttatatcaatagactacacataagaattatgtaaatataaatctatattatcaaagagttcaatatatatttatagtagagtaataatagaattaataaactaaattattctataaatgagttcaataataatcaagtatttattggaccttcaaaatgtaagtccatggtcctcagatcacctctttacaatactgtacaggagaatgtttgacttaaagaatgaaatgagaaatgattaatttttacaagagataattcttgatggaaaataataattttgtgtaaattattatttatgtaaattatgaattgaataattaatatgaatttacctatttagttttat

SEQ ID NO: 104198 - DNA, 2538 bp, Cannabis sativa
gccaaaaaagcattgatcttcagttatttttttttgagagatttgatcttcagtattggtgttctcaattctcatcatactgcctcaagtgttctaattattcacccaatcatgttatgtgtagaatgcaatgaaaagacatttaagaatgaccctctgccaccaaattattgcagcaccagccaaatattataaggtacaacaaaagacagaccaccaaaagaataattttacatacagaatattgagagacatgagatatttctctgcaaatgcagtggtggcattcaatatgaatatttacctgcaaagtgtgaagctgatcggaatttttgacactcaaaacccctttgcaacgatatacatccattccatatttcttatcccaaagaatctcctcaatccacaggcgaaccttcaatgtcattttttcataaggcaccaataagtaaaacgtgccaacataataatgctgagatttagtagaggtaagtaacacattgtacctatatatacatatttcctcaataaattatattgtacttttttaggacatggatgcgcttcttatgcacaaaatagtgtggataagctagtagtttacttaagcaatcaatattttgtggagcaataaacatatttatacacagaatagtgtgtgtgtaacaatcaagttattttaagaaaaaaaaaccttatcaatatcaacttgttggtgctcagaaatgcataaggttcgcaccccactatcatgcagactttgggttgatagagcatgacttccatccagcagtccttctaatcgggtgttgtgctgagaaggcaaacttagcaaaattagttttttgagaactggagatgaataatttagttagcagattgaaatataaaaactaactgtagcatcataggcccggcagtccaaaatcttggacagatcaacttgacagcgaactgtagggatgatacaagcaagtgcgttaatattgtgtatctccttctccagttcatccaaaacacccccagacccctctggagaaaccaaatcaactttgttaagaattacaacatcctacaaagagcaacaaaactaataagactccagaataagcaggcttacacctataattctttataagagtattagatccacgacgtagtactgttgtggagaaacagaaatagctaagatgcaaataatacactaccagaggcatacagagttggtcattatgataatcatatgcaaaactagaagaccattgcttttaatgaaataatatgacgagtaccgcaaatgcaatttgagaaaatgcttcagcaaatgaagatgaactgtgtcgctcattcagctgaaaccggaggtttttggcatcaacaacctatacaattatgaaacaaaaattaataagatatgaaaattgttatttatttttgtcaccacccaaacacacccacccaagcacttcaattagtctatggtggcaattactgtaaataaagctgcatcaaatgaagaaagaaaatttaaccgagagcatctcacgctacatgtaatgtgttaagtttggtaaaatcaagttatggaccacatgtaatactacttttcataaatttcaaaatagaagctacaccagaacttacagtgataattgagtcaagcttgaccgaggattccagctgatcgtccaaccacagaacagatgcaagaggagccggatttgctaatccagtagtctccagcaatatatgatcgattctacaaacaatgcaataataacaatgagtacccttgcatgcatgacaattaacaagatacccaggtcgagctatgaaattaaatgaaatgggaagagtagtgtaggtatagcagtaaaaaaaggtattgctttcactcttatgtattcattcatgtaattaattaaggcctaaaagaagaaatccacaaatgtcaaaacaatctccatgtctatacaataaggtttaagttcttcaatacctttccttcctctggacaagttgctccagagcttgaaccaaactatgtttgacagtacagcaaacacacccatttgcaagctcaatccattcttcaataagtgctcctccatcaccttcattaatcattgctctttccacaccgatttcctcaccaaactcattcaaaatcacagcaatcttttttccatggttggagttcaatatataattaacgagctgagatttcaaaaaagaccagaagaagaaatcaatattttataaaaacaacgagtaaatgagcatagggaaaatcggagtgggagtcgagttttagcttacagtggatttaccagcacccaaatagccagtgatgacggtaaccccgacggagacctctgcgtcttcgtttaagggtcggtctttggtataaggctctgtggattggtcaatttcaactgcaagtggtggattttcttcgtcgtcctccatttccgattgtgtttttcttcctccggatactgtaaaacgatttggactactgccattggggtttaagtt

SEQ ID NO: 104199 - DNA, 792 bp, Cannabis sativa
  modified_base (559)..(562): a, c, t, g, unknown or other
ggctgggtcccaaatccagacaccgactacgggttttgtccatgccctttgtctagattttgatcctaatcttgggtcccagtctagttccatttctggtgccgggtcacgagctgggtcctaggttgaagttcgagtctgggtggggtactaggtcccgctcctagttttgtttcctaggtccctatcctgattcagggtccaggtgccggttattgtgtgggtttgggtcccggtctaggttagggttcaagtcctagtttcggttcgggtttaggtctctttcttgtgtttgatctgagttcaagttgtcatttaggtcctgtagctgttcctagtcctagttcggttctagttccatttgcgattgtgagttcgagtttggttttgagttcaggtcagagttcaagtccaggtctgagtttcggttcaggtccggatttcagtctaagtcgagatcaggctccgggtgtgggttcgcgtcttgggtcttggtctaggtttggtcggagtcccaagtaccaatcccgatctgagtctggattaagttctgggtctnnnnccttggttctgatcctggtctgggttcgagtttgggttcggctccgggtctagctttgggtctgattctaggtgtgggtttgagttcgggtttgagtctgtgtccaggtttgtgtccaggtctggagccgatctgggtttacgtttgggtccaggtccaagtttgggtcccgagtgtgggtccaagtttgggtctggttcaggatttcggttcagatctaggtccagcat

SEQ ID NO: 104200 - DNA, 888 bp, Cannabis sativa
  modified_base (821)..(839): a, c, t, g, unknown or other
ttttagtgcccattgcctctcggattccaagggtctccttttctgtctcttcgctgggtagcttggatcaacatttaaataatggcaaataatatagggtcgatatatcttcatggctccaggtgaactaatcctggttcgccttcaaaaagcttattagctgctatttgagctgctcgtccaggttcttcccaatgtatacacactttgtgggatttccttggtcgagaataacctcttccaattcctcgattggtttcaatgggtttctctcatcttgaactcgggggttaagatcttcgtctttcttctcgttttcttctgccaagatcgccatcaactgatgaccagctttcctatgctgcagctcaatgcaatagcaatcgcaaactagcatatagtcgccccgcaccactcccacgccatctagtgtttagaatttcaaagataggtgcttgatcgaactgactgcccctagtccgatcagtgctagacgacccaataatatgttgtaagccgagggcaggtccacagctaagaagtcttgcataacagcagcagataaaggtgcctcaccaaaggttaaggcaagctcgattatacgaaggctagcgatactgtctctgatgaatcacaaaggttcaccatacaaggccttaatttggccttttcacgtcccattttctgtagagtctccttataaaggatatttgccgagctctcattgtctattaacagtcttttgatccttttattggcaagttgaatggttatcaccaatggattgatgtgagggtatttttgggttttatgccctaaannnnnnnnnnnnnnnnnnnatcagatttacttattaataaagaccagaaataacattttatgttgcat

SEQ ID NO: 104201 - DNA, 839 bp, Cannabis sativa
gcacagtgtaaggggatcaacttagcttctttgattaaattgtaaacctacaagtgttgttttaattttatccaaactagctagagttgcgcaacccccctcaacctatgtaattacaccaaaactcaacctggtgacatgaacataaatgtttgatacgtggtaaaaaagaaaacatctcgaagttgagtagtctcaattcataacattcgacttaggaggggtccttagccctaggcccaatttggctttgagaactctgaaatgggtgtttggatccctccatattgtttccaactcacaatatttcaatattctgaaccaagaagacaagaagaatccaagtccaaggcctagaagctgaaaatacacgaaacaacaccccgaaagtcaactcgggcacctagggttttcacccagtgcctaggttaacattctaactagggtttcagtttctgggttagtctaagtgaaaatggctcaaaatttgtacttgcatgaataagacctatcacaaacatatttgagaaaacataatcagaattaaagcactttcagttttgagcaccaggtaccccaggcacccagtgcccaggttaacatattgtcaacctggggtacttccaaccataatactaaagaactatcccaagaattttcttcgtcttcattcaaaatgaggaaacaagtgctttttagggagaaacagatcaacttggaggccagaacagagacctagcgcccaggttaacactttgtcaacctgggccacttccatcatcagtttagatgaaattttagggcatattcttcgctttcatcaacaattaagatttgag

SEQ ID NO: 104202 - DNA, 641 bp, Cannabis sativa
atgcttcaattgactaaattgcctttttcagttaaactatattataggatagttattttgtaagatatattttaaaagacaaaattatcattatatattatatattaaaatataatataaaaataattaaaatccattaccattttctccctcatttaatcaagttcttcattttctaattttaatgatgtaagtaaacaaatgtaagggaataattaccttactattgattcccattacttattagtaaacatgccataaaccctgaaccctaaaccttaaccccaaacccctacccatacccctaccctctaaccctaacatctaacccctaaacctgaaccctaaactgtaaaccccaaacctcaaaacccaaatgctacaccattcccattcctcggcccaatcccattcccatttgcattcacattcatattctcattatggcatgtttactaataagtaatgggaatcaatggtaaggtaatcattctcttagatttgtttacttacattatttatattacgaaagggagaacatgattaaatataggagaaaagaaagggagaacttcccccaccaattttgtaaggaatgccattaagggtaatggatttttattatttttattttatttttt

SEQ ID NO: 104203 - DNA, 862 bp, Cannabis sativa
ttttggagggggtttacttttgttgtggaaggctgatgtttctgtaaatatttttaactattcctctaatcatatagattgtactgtaagttttaatgttaatgaactatggcattttacttgtttttatggttcccctgttcattctcaaaagcaccttacttggaaacttttgcatgatatttattataatgcttcacatttgccttggctaataatgggggattttaatagttacctttttaatactgataagcttgggggtcaggcccctgatcagggtgttatgacccttttctctgattttattaataaattttctatgtttcctcttccttatgtgggctgtaaatatacttggactaataatactataagcgaacgtttagattgggcagttgcttctgaatcttggtgtgatatttttcctgaaaatagtttacatcatctaggctactatggatctgatcatcgtgctttaaaacttctttttgccaatgatactagtagctctattaattttgttaataagcgatttcgttttgaaaatagttggttagaggatccagatttttataaccttatgcaaaataaatggcatgattttctcactaataattcaccttccaatcattttaagtatttcctggataaacaagcccattgtgctagttttttaaaggattggaataagactcataatcatcttttcaaatctagaatccaggaattgacacaggaaatagaaaaatttcataaccaagatgttctcactcaaactgatagacttcatttgaataaattgaattcaatgttagatgctcttctctataaggaagaagtctattggaagcaaagggct

SEQ ID NO: 104204 - DNA, 607 bp, Cannabis sativa
ttgtctattatgttaataacaaaattacttttaagtaaagcccaatacctaatgtctaagtgaaaatataattttaaataattagggagtaggcacaatatctttaatcatataaaattatatgttaattaaaatttaccttaatggacataacttgtaattaattatatatataataattttatcccacatggaatttattatatttttataattagttaggataatagattaaactaaattctcttaatttaccccaatgggagttatgaggatttaatttaataattttatcacaaactttaattaagctagatttcatttctcattttcctaaattaaatattttattaaatctatcataaagttcatataattttattagatttaaaagttagctcacaggattttaaatttagtaaaatttttatcttcatcatgtttctacattggtaaaacatgaattcattaaagtcttgattttttaacatctaaatttgtaagcctattcttgcaactatttcatccacctctaaatatgctgaaatcactagtgaaatctctgagcttaggagtgacaacttcaaaatctggaaggaacgagttc

SEQ ID NO: 104205 - DNA, 615 bp, Cannabis sativa
ataaatattaaaaagtaaccaatctaaaataaccgattcaatctgtatttttactgattgaattggattgaatttgagctattgtgcaaattgaattggacccaataaattcacacttagtacgaatctatgagcaaaatagtgtggattgaattagatgaacacaacaacactccgttatcataggagacattatttagtagatgtcataaatttataggtaaaaatgttattattttttttaaaaaaaaatgtatttctaatttaaaatatgtaatttgacacttagtattggtatatttttgtgtttttagatctttaatagttataatcttaatttttcatgatatatattattgttattgaaatattatatatttaaaccgcttggggcctggttataggagagtgtgtgcgtgttggaggttttggattcgagtcccaaattatatattgtaatatataaacccttaattcaaaaaaattatatatattatatataatttgtagtcactaataacttataattgaattatgaaatttttaaaatgctcaaagcctcaaacccaacatcatgccgcctgtatttgataaagcaggttttttttttttttt

SEQ ID NO: 104206 - DNA, 521 bp, Cannabis sativa
  modified_base (219)..(221): a, c, t, g, unknown or other
tccattaacgtcgtgacatttctgaccacatcgctaaatttccagaattgtcgggcccaaaaaatattttatttcgaaattgatatcctcggtatttacatatcccaatataatctccgtaattaataaattacgctatttatttcattgagtaaattttaataattaccctaagaaagatcataatcttacttcgttaccaaaataattacatatttnnnaaaatatgtctatttaaatattatttatttttcgggatattacaacccatgttggtcacttgaattgggtcaacattatcgcgaacatattgaacatcatccaactgtggaagttgaacgactaaagaaattcctgaagagtttctttcttgtatagtcgtggtctcatcatcatccgcatccgaaaagttccagacattgcaggggtgtaaaaattgacaaggttccaatcaactccattcttcaagtcaggaatgtaatatattaatttttcttgggatgcaagtatgaatggttcat

SEQ ID NO: 104207 - DNA, 612 bp, Cannabis sativa
gaacttgagattcttttgtgtgtcgtgccatgtatgtatagttttgtaactgtgttttttgtttgcagatactcagttgagaaaattcctctgtatgattctgccgaggatgattctttctcctttcatcaatttccaatttccaatttccatcagattctcgataaacaaacatcaacaacaagagcggtttttccccatggtccccaacggagaggaggcgtggaaaggtcgaaagccaattgagaagccatctccgactggagcttgctctgaagtctttgggtatcaatcatgacggcctccgcgtacttctcctcttgttccatgtagatatccatgtgacacattgctactttgtcattcaagcttgacatccaactataagggtcctcccattggagagttgaaagtccaaagcttttacatagctttaaataagagtccatggagaagtgacaactatgtttgtacacacttaaaataattcatttgcattatgatgaccaagttatgcagtcatgcagttaatttatatcagaggtagctgagaataacaatatatctcatcaacccaaaactcatttatatctcatctcttctctctctttt

SEQ ID NO: 104208 - DNA, 1586 bp, Cannabis sativa
tcgacctcactcctagtgagtctactacttgaaacggtacgtacacttgcgtgtgctaaatatcgcaacaacagaaggaagaaagccttgagaaataagacgattgcactggtaaaagtattatggaggaacactaaagtagaagaggcaacctgggaactcgagacggatatgcaacagaaatatccagagttgttcaagtaaatttcgggacgaaatttctataaggagggggtaattgtaataccctaggtttatgaatggattagcaaaaccctaactagttaattgtgtattactgcaaaattatattagtatataatttattataatgtgaattaatatgaaatatgacatgttaataccttgttggtgagccaggggtattttagtaattttgaaccgagaagggtgaaacagtgaaatttatttatttaagtgcttatggaactatattattatatagtatgcatgtattgtcttattcaggtgtgttctaacaagttggtgcggtaagtcacaaccgagtattttggaccgaatcgggttcggggtcaaaatacaattctgggataagttattggcattttaattatgtgtgaataatctgaaatttatttgactataattgtgtatggaatgtcatatttgcccttgaatgttgatgtgtatgcttttggcccttggggcaaatcggtcattttgacccttgaattatattcaacaaaagaaaaaaaattgagaaataagaattttttttttgcattttttcccacatcccaaacgaccccttccttctctctctatctatctttgaactttgttaaaattgtggtattttggcttggattcaaacttagagttggtggctcttgtgcttatgattggaaggagttaaggtagctctttttgttgaattttatttgatttccttgctgtgatttctattgttgagaagcatgaattaggttgagatgctcttgtttgtatgtttgtaagatatgggttattttggtgttgtaaacttggttttgttatgatttatgtttgttgagctttaggtgagattttaggatgttttctatgttttaattcagagtttatttgatgcgttgttgctggaaataaaacaaggttgaaattagtttgaagttgaagttcttgagcttgtattttggtggtttatactcatgtggggagtttgatgttgtttgttgtaatctgaattttgggggttggatttttaatgctctaaatggtgttttaaactatctatttaatggttgaaaatctatttgatggttttaagttttggttaagatttgggttgatttgtaagtgattttggggctgaaatttgaagttggagctggttattcttggtttggaacccaggggccgcggcccagctttttgggcgtcgcggcccgcccttttctttctggtcagattcgaatgctgacttcgaatactcataactttgttatctagactccgttttgggagttctatataccattggaaagctcgttttgagctctatgtgaatatctgtgttttgaatgccaagtatatattttataaat

SEQ ID NO: 104209 - DNA, 1133 bp, Cannabis sativa
tttatgcttatcattgttaaacccctttactcaaaaaattaggcctatacaccttggactcgacaatcgcattgatctgtagtccttctgtccactttggtctgttaagtgccaaagtggactgccatagtgtacataagtgtacacgtgacaaaatctcatttatccacctaatattaataatatatattaaaagataatttaaaattttaaaaattaggaaaaaaaataaataaaaattctttttttttcctcttttttctttttcttcttcccgacctttccaacattggcttcccaaaccttaataactctgtctgagatcagtttctcttcaccacatgccatgaaaacctgcacctccaagccatctaacccaacccatattcgacccgacacccaaacgaaacccctaaatccctcccaaacacaaccctgcacaaattggagagatgaacacaatgacgtgttcggtgctagaaaaattacgcgagagagcagatctgagaaggagaaagcaagagagaacatatctaaaatgaaaacggtacttgcgatggcaatggcgatgacattggagaatgacgttgggatctcagggtttgggtctcagtcctgaaagttcttggtgatggcgacgaaggtagatctcggggtctgtggttttcggtgacggtgacaacattgggatctcggggttctcggtcagcagtgtgagattggtcggcgacaacacataggtctcggggttagctggatagagaaaaaacaaaagaaaggaggaagaagaagaaagaggaggaggaggagttaattggtgatcgttccagattaaacaaaagaaaaagaaaaagaaaggaataaaggaaaaaaattgtaatttatttttatttttaaaattttttaaataattattattatatttaaataattattatttttaattttttttattttgaaatttttaaaatttttttaattattaatattaggtggaacaataaaagtttaccacgtttatatttatgtacactgtgacagttgactttggcacttaacagatcaaagttgacagaagaactatagagtaaaatgattgtcgagtccagggagtatagccataatttttcgag

SEQ ID NO: 104210 - DNA, 523 bp, Cannabis sativa
tttatttcaatgctttgtatttattgtttctattgtcgtgtattattccacacttaatacaactccaattaaacataattatcaaaaaaaaaaaaacaaaacaattctcactctttgaatattagaaggcactatgtcttttagttctctgaaattgttagatcgtccactttgttgaaaaaattgggtaattaaaaggtttgaatctcccagaaatgtttactttctcggcgatgtcttcaatgccggaccggaggaatgagcgatttattctccgtccgtaagtacaaaattttgtgatcctatcatctttttttttttcttccgttactgtgagtcccgcgtctcttgtaaagtaataatcattaatgacatgctaaataatgaaatttgggtatttgccttgcactgaattctcctttaaaaatatacaaaaatggtggttagaactaatttaagcttgttggcgatcgctttcgagataattttgtagattatgttgcacaagcttatgggtctaaaa

SEQ ID NO: 104211 - DNA, 546 bp, Cannabis sativa
taaacaaaatcttaataattgcttcagaattaacaattattcataaactttaaattgaaaattctaagtgtttatgtggtattaactctttgcagagaagaatatatcatagattttatattaataataaaacacaaacacacataaacatttaaatataattggtattggcatacacaagataaagaaatatgaagctcaactcataaatgcaattcattaccaaaagagaaaactttattataatattctcaaaaaaaaaaatgaattgtctgcaataatatgaaaaatagggaataaaaatcccaaaccaataattgaaatcaaattgttcataaattaaaacaattaattcaaaaattataaatagaagattcgaagcttcatcttcaatcttggactatctccacccatctgtccaaccatccgactcaactcgctaggatagcattccaaatttaagcaactggagctgaaataagaagaaaaaacaaacatggttagtaagtccagaattaataacccaaggggataataattctctaa

SEQ ID NO: 104212 - DNA, 821 bp, Cannabis sativa
  modified_base (370)..(370): a, c, t, g, unknown or other
gggtaaaacaaactgtaaataaattgaattaatttatttaattgttgcatgcttatggactatattattatatacgtttacttgttgtgtcctttttcaggtattttctgacaagtcggcgcggtatagacacaatcgagtatttcggaccgaactgggttcggggccgaaatacattttcgggattttatattggcattttatggttgagtgaataactttaaatttatttgagtatgtatgtgatgaaaatgacatttttgcccttgatttatgtatatgtcatatataggccctaggggcattttggtcctttgacccattagttagtaatcatcaaaaagggaattttgacaaaatgagaaaatcnttttctggtttgtttagccctagctgaaccccttttgctcttcctaattcatcatttttcagtttttgctttaatcttgaaatcttgcttggaatggagttaattgttgctgatggaagctcgtgggtgatggtaagcttcaaactttgctactcttgagcttaattctgagttttgttgctgaaattgatgattaaaaaagcatgtctttgggtattgagtgttctttgatgcatgtagattggagtttataaatgattaatttgttgtttgaacttgtttaattatgggctatgcatctttatttattagtgagtttttagggttgtttttagaggtagaaagtctgatctctttagccattattgttgtttggatgagtaaagcttgttgtgatattcaagctcttgattatgtggttgagttgaattttgctcaagtgttgagcttg

SEQ ID NO: 104213 - DNA, 512 bp, Cannabis sativa
ttctgtaatggagattacaagagtatatacctcatgctacaaggtcttgagcttttctcgcaaacttcaggtttgaaaccgaatccttctaaaacagcggtctattgtaataatatgtgtgatgtggatgttcaaaggattttagatgcttctggtttctctcaacaagaagtccctttcaaatacttgggtgttcctatttgtccaaaaaagctctctgctaagcaatgtaatcttttagttgaaaaaatgattggccgaattagaacttggagttctagaaatctttcttttgcaggtagaactgtgcttatcaactctgtgttaatggctatccactcttactggagtcaaataatggttcttcccaagatcattattaagcagattgaggctatttgtagaggcttcctttggagtgggactcatcaattaaagggagtagctgcggttgcttggagtaaggtttgtcactctaaatcagtaggtggtttgggcttgaaatctgttgg

SEQ ID NO: 104214 - DNA, 627 bp, Cannabis sativa
gatcaatttaatgtataatgcagtttgttctctgctgcatttcctcaaaattagaagcgtgcgaaagagtttaaataacattactacttgttttcactcatttactgtactgcgtttctgaactagaaaagcaaatgcaatggaggaaaggggtatgtgcttgttttattaagataatcttcatagcagaatgaggaattttatcaagcagatggtagctattcctaagaggaaccactaatttcaatgattttaacatttgataaatccaaactaacaacggtaaacaacagatgttaaaataagaaagaatgttaccagatgtgatagtcttccaatgctcggccagaggagatgattggtcggaagcaattttcagccagagtagatgatcggagtcagaggaaatgaaccgtggcagagtagagaatcagcacagtcaacggagatagaagaatgggtgagaaaggtgtggtggtgtggtattaatttgatttttattaatgaagtgatattaatttaagagaaatttaacacaagcaaaatattactatactgccccaaataggtagtattactagggaacatgcttacattaggctcggggtgttcgcagtgtgagtggtg

SEQ ID NO: 104215 - DNA, 510 bp, Cannabis sativa
tggtctcctcaaaacggtcagcaacctcgagatccttagtcagcacggagatcttcttctcagcagcaaacagcttcttgttggcctctcccaacaccaaccgaacagctccggcttctgccctggcttcttcaccttccttcttggccaagtctgcctccgccttcaaggtgtcagacagagccgcgttcttggaagcaacagacttagctcgagagtaagtgtaggccaacttcagactggcctgcacagagaaaaaactttagcatattgagctaagtgtggaaagttaaagggaagtatcaaaaaagacttaccctggtgagctccttcaagacaccgcccaccagcacatccaaagacgagtcattgtcagcaccagttcagacccagctgttggtggtctagagtccttggacttggcagttttggggatagaggggtttgcagcagttagctccttggaaagatcaataacctccctgaaagttctcctttcctttgaagagg

SEQ ID NO: 104216 - DNA, 531 bp, Cannabis sativa
gcaagctcatagttagtttgcccaacaagacaaattttaaagatgacttcttctagacgatgggtttatctccagtaaacactactgccttccgaatcatacgtaagttcctttccttgtgaattcattaatattaacttgtagatttttttaagtttcttactaactttttatatgtttgcagtggctccttggagaccaattcctaccccaaagatagccgagcgtcacaaaaccttactgagcttgccatatgggttgcgatctgtagatttctcgctaaacgagcaaaacctgaagagcgtaggcctccttgctttggacgagtatacttgcaattataaaataaactagtataccttgtgacaaaaggtcctcgtcccagatgaagaggaaagtgatgactttgtggctcgggcacactatctcgagagagtccttcctcaggtagatggaagatcccaaggtaatcaatgtgggtggttgcccacagtgcttagggccgagcgtaataccttagtctcctttcga

SEQ ID NO: 104217 - DNA, 1249 bp, Cannabis sativa
aaactcagtgcccaagtaagtaagcaagtaatatgacattttcttgattaaatatttattgtcctttgaaaaaaatgaacatttattgtatttaagttagttggttgatttagaacttctcataatataaaaattgctaaagtactttctttctttcaaaacaaacaaaaaatctcaaatttatttagctatttagaatttttgttcttaaattatgacttatatattattatgcctccggaacttttcagctatttaaaaatagattatgaactattcacggtgttgtaaattgattattctgtcaagctttgtcacatgtagcaaataaaatgatgaaatggatatttaatcagttgtcacgtcagtgtcatgtcaataacacatgtataataattaaaaaaataatttatttttttgatttaattttacgtaattttcttaatcacttattgatttttagtttactaattttataaaatacataatttttatattttaattttaaattatatacatagcattaacatagtaagtggctaagtagtcatgttattattttatttgtcatgctcgataaaatttaatagaatgaccaatttacaacagtgtgaatagtccagtaactatttgtaacgggctaaaaatttcaaggagcacaataatacataagtcatagttcggttagtaaaaatttaaaataaccaatttatttgaagttgaaatgacatgtcgtttattttattaaacgacaaaggagctccataaaacgttgacaaattaaagtatttgtagttatccttaaattttaagacaagtagtgaataaaagcattttcaataatagatgaagtataatagcaactaaaatattttataaaatcacttctagatgatgatttataatacattaactttttagtttgttaagaaaaaaatattccacatttttctactctatcatttaaaaattaaaatacattattaaaactctacatattttttctatttttctattttacagcatacttttatattataccatacatcaaattctttaaaatacatcaccaaaattttactttttaaaaattttattatactttattcattttaaatatataatattaatacatacacatatttatacaaaaattaatcatcaaaacttaaaacaattaataaaatatgtttagagtaatgaatagtattctataaatgtagaacataaatagtatattttaaagaaa

SEQ ID NO: 104218 - DNA, 950 bp, Cannabis sativa
  modified_base (59)..(71): a, c, t, g, unknown or other
  modified_base (402)..(404): a, c, t, g, unknown or other
tactggtgttttattaaaatacagtatttttgaaaagattttcgtgtgacagtattttnnnnnnnnnnnnnccaaattccagtatttttgtaaacacaaagtatgtggctttctatattttttctttatatttgtcaaattttgtaagaatttcgtattgatgtcataaaaaataaaaattatttacaaagcttactctttaaaaatctcacattgtttagaaagtatagtggatttttacatatatactataaataaatcctttaatttgcctgtttatttgttccaaagtttatatttttctacttctttggtagttgattaaattagtcttacccaattaattagttgtaatttttaaatttatttaatttatagtttgtattattattattattattnnnattattattattattataaaaagcatataattttttattctatttaagcaaatctaaaaatctcatattgtttaaaaagtatagtacatctttacatatatactataaataaattatgtaatttttctttttactatctcacaatttatatttttctcattatttgatagttgattaaataagccttacctaattaattaattataatttttttaaaatttatttaatctatagttttgtattattattattgttacccttactttttcccaaaatacgtggaccaatgcgactgagacacgtggacttgagggaatatggtttgagataatttgactaagtccttttagattaagagtatcaacattaaaatacctcccggagaaggtatgaggagtccacgtactcccagagggcagagctatagcaaggcacatccgggaggcatcagaccccatctgaacagtcacctcgcatttaatgccgcatgggagaaggcgtattggaactgccataagtattaagtctgacggcataacccccctt

SEQ ID NO: 104219 - DNA, 1754 bp, Cannabis sativa
aaagaattaattagaaagttaaaatggtattttgaacaaaactaattacgaaccaacacatggagggctaatcactagaattgattatatcaatgttcactggagttaaactcagtaaatataattctataattactaagagtttaattttatatttatagtggagtaatcatggaattaataaacaaggaattatttggtcgatgagactcaataaataatctagtttataggagcgtagaattataggtccatggtccctgaatcgccaccttaaatactgtgaagggtagggataaagagttgtataaagatgtttggaaaaatctatgttgaattgaaaaaatagtaattatttattttgtaataaataaatatttttttcaaaataattaaatagggaaaagataaaaagtgttaagacaaaatttatcgagacaagatttgtttgaacaaaagacacaaccttgtcctgaagacaatggtaggcgcctagctaatgtcgtgtccctatttgttttgtcttttgggttaattaattatttaattaatttaattaggtaaatatctaatttaaaatgtggttatagatatttcaatattattgagatattctctcaagtagttgagagattccctcataaatatcaacgaattcagttgtagatattttttttaaattaaataagatttaattaaagggatttaactactataagtagaagtctcctttgagaaattagactgacttgacatcactttcactctaatattttcaaaatatagagagtagaaagaaaattattttctgtcacaactgttcttgctcatgtgttgacaattcaacaagaacaatgatatacactttattctaatagtccacactatttcttgtgtgcggtggattgatttagaagatattggtgtgagcccaattataatttcctcatcatcttgattaagggatacaacttacgagaagtttcgaggataccctgataggcttcaagatgtatactctaaacttatatcttttatttaattgatttaatgtacacacatatggagatcctatgggctatagtacagtaatcattaggtaatacgaaagtcttccgttgcgtacctaatttagtaccataaaaccaacaaaaaaatgttgcatattttttaccttgttatctttttacaatgaaagcctccagacatttttgataggatgcatttaccgtcaaaagattaagaaattagaagaaggttaatgatgaaaaaaattgtgcctttttgaattatgtaagggaagatcctcgttctactcataataatgttatgaagtcatggatttattaaagcagtcacaacatattgataaagtaatgaatgcacaaagttctaagtaaattctcaagaattggctacaagtgagaacatcaattgatgttgttcattggcttgcatttcaaggatgtgcttttagagatcatgatgagactcttgattcaaaacatcgaggtaattttcttaaaatagttaaaatactagcttcatatgatgaaaatgttaaacaagttgttttgaaaaatgcccctaaatctatgaagtatacttcacccaaaatttaaaaagagattttaaaagttcttgcaaataaagtgtgaaaaaaaaatcatgaagagacacgagatgagtctaagagggagcaaaaggctataatcttaaggtttgttgaagatgatggttttatacaagaacga

SEQ ID NO: 104220 - DNA, 901 bp, Cannabis sativa
  modified_base (427)..(430): a, c, t, g, unknown or other
tggtgggatccatcacttcagggttggagtcaccaatacccaccatattgcccgaactcaccccaaccaaccgagaaagaggagaaactactatcacttctacaatcacttccaggagagattaatcgcttaacggacatggtgagatccttatgtgataattcaatggctcatgattcagattgaaaaaaaaaatcaaataatgaaagttatgagagttattggtacaatgaagaagggtcattagttgaatacacagacgataatgagcctacaatttgttatacccaaaagtcggttgccacctcaatgaaagacacgtgtcagaatgaagggaatatgaatcaatgcaatttcccttatgcaataactcattaattacataagagtcagagtatattctaacctgctgactgtaaggtcttannnnaggaatcaatgtacaaactgacacttagtgtattagcgagaaaccatacatagctaaatgcaaatagcgaggcaccggagaaagcgatacgtattaaccgtgaaataccttagcgtgcaatgatcatactaagtgaaaaagacggatcgactcaaagaacaaataagcgaggtagccatctcggtaagacttcttatagcttcatccagctaacaggagcgaggcttacaaccctagcgagtcagaagaattctttgtaaataaccacaatcgacacaagacatacatcgttgacctcagaaggaagaatggccctagctcgctattggatcactgtaagcaagtttctgtcgagacatctctagagacaataatcaaagacgtgtttaatacacgatatttttgattcagtagaagcgggaaaatcacagcagtatgattttcaagtcataaaccgcatttacactacgt

SEQ ID NO: 104221 - DNA, 1049 bp, Cannabis sativa
gtcatatattaccaattttactaagtatatgtttagggaaaaaataatatggttttgtaagtatgggaattcaaatttcccatttaaaatatgagtattgctattaggcattaatcaatacataaaacagttacatttagttataaaattttagttacaatataaattttatgtgattaaatgtgactattagtcacaacaaaaagttacttgtgaccaaaacatagtatttagatacaaattctcactaatttagtttatgtgattaaatatgacttttagtcacaacaaaaagttacttgtgattaaaacatagtatttagatataagcatgtcactaatttaattttagtcacaacaacaagtattgtgactaaaacgcactcaattacaataatttgtgatttttgtgactaatacttttagccttaaactttttagtcacaacataagaatgataatttataattagtcataatttttttactttcagtcataagttttgttgtgactaaaactaaaattttttgtagtgaattatgagataacaccttatgatcatgcataactattttttatatatatattttcaaattaaaataaatgtgacgatttgatacttaatactaaaaaaaatcttacttttagtcacaacaaaatttgtgactaattttaaattatcatttctatgttgtgactaaaaggtccgtagctaaatatattagccacaaaaattacaacttgttgtgacttaaatgtatttttaatcataatatgtgttgcaattaaaactaaattagtaacaaattatgtttaaatactatattttggttacaagtgagtcacctttaatcaaaaaaaattatattatgactaaaatattatcactaaaagtaatttttttttatagtgtaattataccaataacgatagggaaatttcattagttgcccctaataaaataccccatgtcaaaatttataccctccattaatttgtacaaattaattccattatttcccaaaactacccaaaatacccttttattt

SEQ ID NO: 104222 - DNA, 1052 bp, Cannabis sativa
  modified_base (216)..(221): a, c, t, g, unknown or other
atatgcattttcttgaaatgtataaagaagattttggtgaaatgtgttctaattctatctccttcaatgtaccctccttttagttgagcaatgagagcagtattatcttcatagagaactacttgtgttgatatttctttattgagtacaatccatatatttcccggatatgctatgtcaatgatctcaatcccacacattctctacttgcttcannnnnngcaagtatgttaacatgatttaaacttgcctcgttaaaaatcttgtcagaaaaactcagtgggacaaaatctgagctaagaaaaaaagagtacaatatatatttcatattcataattcataactatttgcaagttgcctcgttaaaaaccttgccaggaaatccaagtgggacaaaacctaaaccaagggaaaaagagtacaagatgaatatgtctccccctcatggacatatgatccacaattattttggtgataatatatctcataagattatcgactaattattgactgattgttgactgattattgactgattgttgactaattatcgactgactgcccactgatttagaatggaataattatgtattctttgttgtgatggttcattattatcgattgattactatattaagtatgtgtgatgtaattgataggtgtcgacaaaatattaacaatatattgataatattatgtcgacaaaatctcaagatgcatgaatcttaaataccttaaaatcgacattatgtcgacaaaatttcgatataatatcgacatatctcaacatgcaagaatcaaaaaacattggccattacattaataaaatatcgacaatgtttcgataatatgtagacaaaatttaagatacaaacatttcaaatgcagactttaacatctaaaaaatgtcgagaaagcgtcgataaaccatcgataaactgtcggtaaaggaaaaataagaagttttatataacaaatccagttcaaaaaatatattattacaactaatattattacaactaatagtagactacgcctcaaatacgggcttt

SEQ ID NO: 104223 - DNA, 545 bp, Cannabis sativa
  modified_base (26)..(40): a, c, t, g, unknown or other
  modified_base (382)..(389): a, c, t, g, unknown or other
actcagtgaattgattttaattaatnnnnnnnnnnnnnnnaattagactatgttttatttatgaatttttactaagcgagggcttaattgtgaagaaaagagatttcgggatccatttagactttgtatggtctaattaataaataatataaatggcaaatttatttgataattaattataattattaaataaatagttttggtatttataggattgaattggaaaatatggtattattgagagaagaataagtggttgaaataaagtggcaaaattgtaactagagattggtcttattagtggtcggccttagtgttttcccaatactttattattttttaatccatataattcaactctaagccctagttgaaacactannnnnnnnacatgatgctctcatctcatctaattgatttttcaacctaccaaatttacttttcattctctgacaactagtaggtgagagacaccttctatacagtttttaagcctccttcattgttcttcatactcgaacccttaatgatagagtgccatgccc

SEQ ID NO: 104224 - DNA, 1025 bp, Cannabis sativa
  modified_base (64)..(64): a, c, t, g, unknown or other
  modified_base (364)..(381): a, c, t, g, unknown or other
  modified_base (604)..(605): a, c, t, g, unknown or other
gatctttttgtttatacgcattgtgacgagaggggaaaactcttcctctccaagcttactagcnctataaatagtgatgcatgttcacagggcaaggggtcaaaaacagttgagctgagattataccctaaatatattatcttagaattatacattcagagatactgttgtaagagctataagaaaaagaacctttgtccttgatcttaagtcaatacaaagaacgaggattaggctattaccgaactgctcggggctaaacctctataaaattcgtgtgtctttacattgttttattatatatcgattgctataaatcacttatcgcttattaaattctactcgttgtcgttggctaaaagcnnnnnnnnnnnnnnnnnnctttcattgagagaaggatcacgaaccgctctttattcagcatctaaccacaaatacgatggtggaaactcgtagagccctgactgatccagcaaattcacagacggtggatcctgcattgaagaaccaggaaacacaagggttctgccagctgttaatcctggacagccggcgaacgtggggaatggtgtaacaattcctatagatgaaatcgcgcctggtnngcaagagactgggaataacagtttcgcacccaaccagtgcactcataacacaactgttccgcctggaaccaacacccagacgaccatcgcagatgccactgagttacaaaatctttgtgacgctctcggactcatgctgtaaagaccgcttatggttaatggttaataccttgaattatttcataattaaggtttatgtatgagaataattaataattatgaaatgtatattttggaaatatatttaatatcatttatgttattatgctatttaatgtaaattacccaatttctgtgtttgtgtttggaagtggtggaatgcggcgttgggcctttagagagtcatattttgtatttctagaatattagtggggtgttatggttaaattttggagacgttagaattttcggggtttgtta

SEQ ID NO: 104225 - DNA, 667 bp, Cannabis sativa
tccctgtgatagcttcggtatgggtattcaaacatcctcactctttcaactctctttagatggaattttgctgtttttttaaaagaatttgtgaagagctcagggaccgagaccctatatttataggtgagatactccaacagtatttgtgccacattaattgtcaacatattttgacaattaatttaggaaatcaaaataggcaataaatattgaaaactaaccatatatatagaatattacgtaaataattttgtccagatttaatgaatataaaatattcatttattactgctgtgaaaattttttatacgcaagtgcacacaatcgtaacaagtaataaagtgataaatcgagtatcatctccatagggattgaaaattacaaattaatttataaaactaataactcacaaattagtttcaacaaaataaaataaagtgatgagaatatgtaaaaaaattaacaaacacaaactatgaagaaacaaggtagaattattaaattggcctaaaaatgtaaagctgataaaaaggtgcaaatgagtattattataaattgataatgtcaactaggaatttaaaagttataatcctttttcaaaagtgtttatgatttgattctctaattaataaacatattcctatgcccaattaattttaagaat

SEQ ID NO: 104226 - DNA, 802 bp, Cannabis sativa
gcctaatcttaatcatgtttacatctatattatgattatgcttttcttactgtgtctgtcgactcacagatattgtttgcatgtataggtaagggcaaggctaaggttcagcagtcgtgagagcgagcagatgaagattgtacatgtcaggaaggttaggcctggagcgtacaatctttgggatagctgagcgtatttatatagtcgctaggcgacaacttttatattatgcactatgagacttttgtaaatattttgtaaacagatcctggttttatataagtatgttaattttatatttataaataattaaataaagttttaattattcacgattttcaataaactcgttaattagcaacgagctgcacaattaagttaaaaatcacattaacacgcctaaactagtagggtgtttcatgtctgttctttggtgcaagtaatctcggtttagattatggatgtagtatgacatcgaagtgaaggtgttgtatataatagagattatatatgacaagaaccgatatgaataaagttgtctttatctaacatgccctttactataaatacctaattcatatcataacgatgatcaataatagatcggcctaaatcctgagtaatcatgaactcctattcatgttattagttgctttgattcactcgtaaatatttctctaagaaaatgattcttaaaacttctattttgggaagctaataatgtggatggctgagaacatgatttacaattatggaatccttactttcctaacgaattaaatgtttgttccctttaagagtt

SEQ ID NO: 104227 - DNA, 979 bp, Cannabis sativa
tatatacacatttatataaacttatcaattataaatgacaaaccaaacaaataaatagattcactttaggaaaagtcatttcattcccggatccatttcaatcaactaaacactaccctagttagttaattataacttatacaacttaataacataaaccaaactaaaacaagaattataataatatataaattaatatgaattaattgtgagaaacctagttagttatattgtgtaagtagtaactagttataattagttactaaatactgatttttcttggtcaggatatttgttatggataaatcatggatgcatgaggagagagacacactgcgatttcaagtagggttcgatgcatttttagagtttgctttaaagaattctaaaaatccttaacatattcattgtctgtgtgtagattgttgtaatggatctaaatgaaatattacaatgattaaggaccatgtgtatttacaaggtttcaataaaagttatactacttagtattggcatgacaaacatttagctgatgatccatatccattagggaagtagggggtagatgatatagagggtaatgatttcgatgatcatccattggacttgcttaacgaagcacaagaggaatttcttaatgatcttgaaaaatttgataatttctaagtgatgcagataaacccttgttcgatggttgtaaaaaattaagattaccaacaatggtaaagttttacaacatcaaagcaaaaaatggagtgagcgataaatattttactcaattttttgctgcttgtaaagatatctttctatttgacaactgcttcccagaatctacatatgaagtgaaaaaaactttaaattccataggattgaagtatgaaaatattcatgcatgtccgaacaatcgcattttatattgtaaggaatatgcagacatgaattattgtctaacttgtggtttatcatgccataaagtaaa

SEQ ID NO: 104228 - DNA, 522 bp, Cannabis sativa
attttttatgacttttggaaggctaacccccaagaaaatttcgattacctgggcgaggccaaagacatgtatctcgagtactgtgcttctcaagtggcttatattgaacccaatacgactgcttctttttctggccagaatgttgaggtaccttccgttcagacaatagatcctccagctcctatcggcccagaagatccgaaccgagaccctaggactccagctgtttagatacttctctttttatctttcttttttatatatatcttattcggccatcaggccttttttaaagacatcatgaccggccaagcggtctttaaacttggaattatttttcattttacagaccacaggctgaccggacagcttttaatcccggtattacgtgcttttgttatctttaatgaatttcattctctaatcataatcatcgaggaattgtgtttgatttatctttaccaaatgctttgtacaggtataggtgccccccaagtgactgagcagacttatgactcttgg

SEQ ID NO: 104229 - DNA, 622 bp, Cannabis sativa
gggcacgaccgcggcctctaccgcgtccacgggggttttggggatttctaccaccccgaccacctccggtctcaaccaattcaccctgtcttctaacgtttcgttgggcgcccattagttaggacttagcctgcgaacccacaaggcacgtaggtcagacagtggtcaaaatattttccaagaccgtaattagggtttaataacctctatttaatcatatatgcaacatatcttaaaacagtttgcaaaaaaagtaaagcttacagaaccgtgagttgagctcgacagtggccttgattgtacatatcttgacggtctacagtgaacaacctggtggctctgataccaaattgaaacactcgtatttataacttactaaattcaaaagataattttaatatattataactttataaacatatgggtcgggatcccgagtatcaaaataagatttaaagtaccttactagcatatacagatatatgtttatttagtattattttttttttacaaattcgtgaaaaggcaactcaaaacacggactcaaaatagtaaaagaccgaaaccctccaggttgcactgccgcgatatgtacaagctctgccgagctctatctcactgt

SEQ ID NO: 104230 - DNA, 1922 bp, Cannabis sativa
aaacaaatcgttcaaataattatactattttaattattaattaaaataaaaaactaaaatattaaataaaactaaacaatcacctagtatatcttaatgacaccatgtgaagttatcctcttaggtaacaaaacatgtacaactctcttaaatgtactacttttcctccccaactcaaactaacaacccactcctggatttcgttgattgatctcttacctaaaataataataaaaatgttgaatttaaataattcactatatatattcacgttgaaaataaggcatatttattattgtcaataatgatatataccactcttcattaatttgaattgataaatttttggttaattaataagtaaaactatttatcagctgctaaatcataaatcataataatacgactttaatttagaagttagttataataataatttcatatatatgctatttaaacaaatttggtttggatttttgcaatgatctagtagtcaacaaaaactagctcgtggaaaatgtttaattgttatttggagtagatagatacatgtatgttatataagtcaataagtaattaaacacgtgtgggggttagtcaaggattcatttttgcaataactaatagaacaagttttagcaaaaaaaaaaaaaaagaaagaaagaaaataatgaatagaacaacactctgactgttaaaaaaagaattaatgaaaatactatttaactttaaccatttctataccaaaatctgatttgtagggtcaataaatggagcaaatatgaagacattggggtcctgtttgacttgtcaactcttcatttttttttttaataaatcagcaaatatattattaccctaacaaatacaatatacaacttaatagcactctcttaaattacaaaagacatcttaatctataaaactttacaagttgtcaaaccaatctttttcactattttttgataggggttgccaataccattcagaatttattaactaaaataagcacttacaagggggcagaggctcgaacaggaaccaacaaaccctaaacataacaacgaaccaagcaacaagaaaaaaacagagcacaaataaaaaaagcaacctaaccaaaaccgaaaacaaagaaccaagtccctacagtcatcaaccattcttgtgtctccactcaatgtagtcatccaaaattggagtacccagatccttaggattgatgatgccagtggtattcgtcgctttgggccaactttttcactattagttacatttttgggcaaactacaagtaaatattctttttattgtgtctttcactttgtacaatattctatcaatattatccaatgaatcatgccagagtttgccattcatgttgcaccaaatatagtataccaaaacacaaatagtagccgacaataccttctttttaaatttactcatctcggtctttccaaaccacctgataatccgatgcaaggaatttgtgcaaattccctaatccaaccagtctttcacctgcttcaaacagttgataaaaaatgaacactaaaaaattagtgatcaattgtttcagttgccctattacataatagacaagtagcattatcagtaatgccaaacttcagccatctatctttaattttaattctaccaagcataatatggcataagatgaagctatgcttaggaatattgtgtctgctccaaacaatattactccatgtgactttatctggattagaggcaagcatttgctatcctttggtaatttgaaacctgttggatacaaactggtttatatctaccaatctcttagctttttctttgatcatgactagtttcttccaataccaactagcttgagttggagctttatacgttccaccagtcctcttctttcacatagacattatgaat

SEQ ID NO: 104231 - DNA, 795 bp, Cannabis sativa
tagacgacatgttggtcaagtctaaagcatgcgagagtcatgcggacgacctcgaagaatgcttcgaagtagtccggaggtatgggatgaaacttaacccaaagaagtgcactttcgaggtcaaatcagggaaattttcgggattcatcatcagccaaaggggaatagaggcaaatcctgaaaaaattcaagctgtactgaacatgccttcccccaggaagcataaagatgtgcaaagctttactggaaaagttgccgccctgggccaattcatttcccgaacaacagacaagtacattcccttcctcaacattttaaagaattgtcacaaatttgagtggactgaagaatgtgaggaggcattttaaaaactaaaagaacatatggccaaacctccgattctatcaaagcaagttcacggagaggacttgttattgtacttggccatctccgagaacgctatcagcggagccttagtctgggaagaagaaaaagtccaacatcctatgtactacgtcagcaagcgtatgataggggctaagatacggtatccattgattgaaaagttagttttttgcctcctaatggcttcaagaaagttaagaccctaattccaggctcaccccatcaaagtattaactaaccattcgcttcggcaagtcctacagaagcaaaaagcatccaaaagactcgtcaaatgggcgatggagttaagccagttccacgtacactacatatcgcacacttctataaaaggacaagcactagctgacttcataacagagtgcaacgaag

SEQ ID NO: 104232 - DNA, 522 bp, Cannabis sativa
aatttaaattatttttatataagtactgtctattattttttagctatgtaattgtaaagattttaaatttttttttacataaatagttattatttttgttaagtctccaaaaaaattttgatgctcgttaaaatatgacaatatatacaaaaaaaattaattgtctaaatttttatatatctctaatccatttgaataaattttgaattttttatttttaacaaaaatagtgtgtaaatgaagcataaatttcacaactctatctcgttaataattcttctatttgcctcgtggtatctttcaccatggcagccattttccaagagagtgggtgtgaaactaaattatgagtggtttcaaaaaaaaaaaaaaatagcttcgattatagtgtaggttttttgtgatacatactcatttgcttgtttttttaatatacaaagcttaattaacttgtctaatttataatattagtaaaaagataaagttgtgaaacttttacttcattcaacacaatgtttttgt

SEQ ID NO: 104233 - DNA, 523 bp, Cannabis sativa
  modified_base (105)..(117): a, c, t, g, unknown or other
gaaaatacaaaactatcatatcttaaataatttccaaggttttgaacaaactggtacaatgtcccggttggcgagagtcacagatatcattcattgaatagagtnnnnnnnnnnnnnaaaatggacaccattctagcaaccatttattcgatcaaaataagaatttaacgttgtcccggtaggggagagtcaaggttattcttattttatgagcttccaccaacatttcatacttcgtaaatttatctctaagtagtcactgtaggcgaaagtctaatagagacgaaaacttacaaaatacatatcataagagatagttacagttttaaatgctttaacgagtaaccatccataagggagcaaagtctagcatcccgaggttatattcaaaacaattaaccatgtaggacaaagaatagcgaacgaatgtccttataactaaagctcattattataaagagttgtattttttttggatacttattttaatctatttatttaattaaaattactaatttagata

SEQ ID NO: 104234 - DNA, 1304 bp, Cannabis sativa
taaataattagtttaggcatttaagtggttgaattggaaaaaagacatttttgagaaaataagataaatagttgaaaaaaatagtaaaattgcaaagtgggccccatgtccatggccggccacttaagggctaatttaccatttgttttttcaatattttaatgccaaataattctaacctaaccctagttggattcctataaatagatagtgatggcctaaaaggaaaagatgatgcaaagactttccttcagtaaaaacttgagccatcttctctaccaatttcgaatccttctctctctcattctctcttcaatttcaaaccctatagtgatagagtaagttcccacacacatcaagtggtactcaacatagtgtgaaaggctgtgaagaatccaaattcaagagaaggagaatcaggctcagatcttggtgattctttgctacagaaaggatacaagggttagagatctcagcggaaggagtcatttaacacagtataaaaagagttgttgacaagaagctgacctctcaccacagaaggactggttgcagcatcagcttgagtgatggcaaacacccgagcaggtatgggttttgcctctggcttctgttcttctttcttcgtctgagggcaatttttcttgaaattccccaccatgccgtactaaaagcatgtcttccggttgcactcatccagatgatgtttcgtacaacgtgggcactcagggtaagagtaaccatggcgtccacctctgccttggttcccacagaaccatttgctttgtctcgaaccaccagatgttggggtaacgtttcctttctgattagtggtggaatcaccaccatctctaccatagataggagtatgaagagtgggggtcccaccaacactcagagtcacacggggctcctgaagaaacttaactgcaccctcagctcacagagccttttcaaccatatccgcatatgatgtcacctcattggtagtaattactaagtcgtgtctaattcttaaattcagacctgccaagtatttctctttcttattgaagtccgtaggcacaatacctgaagcaagcttggcctgacgattaaatttcattgtgtactcagttaccgccataccctcaatttgcactaattctgtaaattcttccagcttagcactacggacagcctcattgtaatacttggtgttgaacaaatctcacaactcttcccaggtcgtaacagtgatgtctcgggtgagtgacaccaattcccaccacacgagggcatctttgttggaaattattttacta

SEQ ID NO: 104235 - DNA, 608 bp, Cannabis sativa
  modified_base (438)..(443): a, c, t, g, unknown or other
ttctttgtctttgtatatttgtgcttcttctatttcaggatgttgcggatctgtgattagtagttcgtcataatctgttatttctaattccctggttttgttgttttccagttgctcaaccatctcctctgccacaagttttgcatagtccataaagtcaaaattttctcccccatcttccggttctgtagcttcaattgtatgtttttgatttgttgagtcttctgttgttgctgcattgtattcgatcggttcaaaggggcttgtatgtgtaattaatgaattaacatttcccaagaatgatggattgatggttgttgttgggttgttgatgacattcacacgcaatgggtatgttgtgaagtcggggttagtttgagttgtacgtagaaatgcaggctttgatcatcctttatccttaatggttggtatccttcnnnnnnttgatatttcagttgcaaaacagtattttcttggttgcattccaggacatctttcagcttcgtttgtaattcttcatagttacaattggctgaaatgtaatgtccactagcttcataattttcataattcattcgatcatcaaattgtccattgcagaagactag

SEQ ID NO: 104236 - DNA, 1062 bp, Cannabis sativa
tagtcacaacaaaacttatgattgaaagggaaaaaattatgactaattataaattatcatttttatgttgtggttaaaagtattagtcataaaaaattataatttattgtaactaaatgtgttttttattgtgactaaaattaaattattaacaacttgtatctaaatagtattttaatcacaagtaactttttgttgtgactaaacgtcacatttactcacaaaaaaattatgttatgactaaaagtttgtcactaaagatattttttttataacattgaataataatattaattaattactaaacaatattaagtttttatacaaatactaactattttgtagaataaaataataagaattatatgtaataattatattatattcaaagaaaccatagatatataaatatatatagtgtaattactagacttatttacgaaaccatagatatatattatatatagtgtatagatatatatatactttttggagcctttacacaaatattatcaaattgtattgtttaatttattggtaaatctatgtttaaagtttaaggtggtcacaaattcaaaactctacaccttaacttttcttcttgtattattgttggaatttaaatttagattaatttaaaatattattattattttatgttagtcaataatttttattaaatattaaagtgtaaatattggtaaatctattaagtattatgatatctttattatttagtatcattataaagtgacgccttataaatagttactgatttttaataattattattaaacttaaaataagtagaattcaataaaaaaatttccttaataatttactataaaaataaataattgtctcatttaaattttatttctagctttgttcccaactcacttacacgccctataagcagcctcttatgtcattaggtttagttaatataattgaaacaacccacaaaaatggccaacttgatcattgatgtgtcatgtgtgtatgttttgaaatgatatcagataatattattaaaaattagcaacttacatcaataattaa

SEQ ID NO: 104237 - DNA, 597 bp, Cannabis sativa
  modified_base (56)..(57): a, c, t, g, unknown or other
  modified_base (528)..(528): a, c, t, g, unknown or other
ttctatttccaaggtccctatccttattctgggtccaggtcccggttattgtgtgnntttgggtcctggtctaggttcgagttcaagtcctattatcggttcaggtttaggtctctgtttgggttttgatctgggttcgggtttcggtttaggtcctggtcatggaactagtcctagttcggttctagttccatttgcgattttgagttcgatgttgggtttgagttctggtcggagttcgagtcatggtctgagtttgggttcgggtccggatatcagtctaggtccagatcaggcttcgggtctgggttcgcgtccttggtcttggtttcggttgggtcggagtcctaagttccaatccttatccgagtctagattcagttctgggactaagtccttggttctgatccttgtgtgggttcgagtttgggtctgggtccgggtttatctttgggtctgattataggtgtgggtgtctaagttctgctccgagtctatgtctacgtttgtgtccaggtctggaccccnatctgggtctaggtttgggtccaagtccaagttcgggtcccgagtgagggtccaagtttgggtctgggt

SEQ ID NO: 104238 - DNA, 1746 bp, Cannabis sativa
aaataatccctaattttaatttatcttttttgcaacaatgtaaatggatgttatgcaaaatttataaaatgaaatcaaaagaaaagatgacgtttacaaataatgagaataaagaaccaaacacaaaaagacaaaaaaataatacacgaaaatattacgctagcagaacaagagccaactgaagtatttatgattaatgagaagaatatcgcagtagagcaagaaccaacaaatgatgcatcaacagaattaatgagcaatgagctcaagagcataactgccaatctcgataacttgttagaagatccaaatttgatttagatcaaatatttcaaaattaatagaagcgctcataagcagaatgactttcatattgccattaacaacctcacaacctgtcatttaccgaaaatattaaaccaaaatcccaaacaatatataacagaattaagtgccttttctttctttttatatttcaatccttaattaaaccaccaagaaaagatagcgatgcaataaaccatgaactaagtatggagattcggagaagaagaatttcattgtcatcaaacaattcatattgtacgtgttttcttgaatgagatcgaggaccatggagactacccatcgcaacagctccaaaccaatgatgaagcactgccacttattccttttcttccatcacaacctgaattctaattttgaacatctttctttaagtggtgaaatgtttgatgaacttgaagaactaatgttacattgcatttattaatttttttaagacattgtaattttctttaattaagaaaatgtaatataatgatgatgtttagatttaatacataaaatatatattaattgtttctttttgtttatgaattattcaagtcataatatatatagcatagcacagtcacaatctaattggagaaaatgcagaagaattgtattgtaatatggattggatgtaacatatacttaattctgtacttaaagatatatgtattatgtatgtatacacacacaacacatgatccttcatgcaagttttgtaatagagagaatggtaagagttgtaagagacaattcatttaattctataagtaatattctacatacacattggaaatgactccaactcaggactctatctctaattgttgtagtgaatgcaattgacttgaaaaaaagattcaatttcttacaatgtatcacttctagaattctagtgaggttaaaattggatattttgaaagaaagtgtgaaattagatcctccaaattttggagacaaaagctgaatttgaagtgaagaagcaagctctggggagcctaatgcatcaatttattatctcaagttttcttactaatgtttacacaaaaaaaaagagaaagtttggttatttgaagagtatgtgtagtgaatcaatcactattgaacaacacaattgttataacccaacagttgagacaacatggcataaaaaaccagaaaatagaatggaacattaattaattacgttatttttctgacaaaaaataaaatctaaaatatagaatttcttaaaatcaaaagatcctaaaagcattatggagttagcaaaagattgtcgctctcttctcaatgctgcatcaacaattttggacagtaaagatggttacatgatcacgagattcgagggaaaatgattgtgtttacaaaacaagctcactgtcccaacattccacatcttctcaagtgtgaatc

SEQ ID NO: 104239 - DNA, 613 bp, Cannabis sativa
accttttatctttactagattaaatgagggagagaatcctaggcttgtcgaaatcaaccatgttgatatgtgggttcaacttcataatttacaatctggaaatatgacactcagtgttgttatgaccttaggaaactatattggaacgtttgtcgaatcggattcgaataactttgtgggtgtttggagggattatttacgcgtccgggttcggattgatgttcgcaaaccaatcaagcgttgtatgaagattatcaatgaggatacatcatggtactgggtgaactttaagtatgagagactgcctactttctgtttcatatgcggtatcatcggacattcggaaaagttttgtccaaggttgttcttgaagccgctacacctccaagaaaagccatacagcttggagttaaaagcattgacacaacgaagacaatcaacctttggggcgcagtggctccagtcagaggcggcgatacgagatgaatcacgacatgaaggccaacctagcaaatcagatcattcagcggttttaattcctagaaatctggaggtagtgggggaagtagttggcaaattttaaggctgtgcaatcactaataatcagccacaa

SEQ ID NO: 104240 - DNA, 839 bp, Cannabis sativa
  modified_base (219)..(224): a, c, t, g, unknown or other
gcgcccatttctttctgggcagatcctttttgaaaacttcaaatagccataactttgtgatccagactccgatttgggagttctatataccgttggaaagctcttttcgacctctatcagaatatctgaattttaaatgccatgtgaatattttatgaaagtgaaatcaggggttaaccctatttgtgaaatcccgaattgtgtgactaggattaccgnnnnnngatcaggagcacccggggatttggaatctctaatattgcgagacaacaggtaagacagtgattagcacgtagagaatgcgtattggcgcttatatggaaagtgatttgtataattgtttaataactgggattagggttattgtcctaataggaacggtatagttgcctagggttattaccctagtgatatatgtatgaaaatgccatgtcatgatatatgtaatgagattcaagggttatgcgcttaaggcataatcaggttggagtcggtaaccataaccgagatgaaccaattctaaggccttaatgtatttagatgtgtgagagcaacacgtaggtctatgccacgtagatttaaatagatgtgtgagcgcaacacataggtctacaccatgtagatataaatgggcatgtcaatgcgatatgcagggctgtgtcacacagccatatgtgaatggcattattgttaaaatagtatgttgagcatattattattactgttatgttttatactgtcttcctggtattggctcacgggtgctctactgtacaggaaagggtaaggcattagctgatcagccatgagttcaggagttgggcgaagaatgtacatgt

SEQ ID NO: 104241 - DNA, 583 bp, Cannabis sativa
  modified_base (128)..(136): a, c, t, g, unknown or other
attcaataattctaaaggtgtcttagggactgatttagatgtaacaacatttaaaatgtcagtttccatctgaatagcatatcctgagaagaacataggcagagttgagtagctaagcatggacctannnnnnnnnaaaagcgtgcgatttcttctttttgaaatccatttttctatggagtgctaggggcagtcatgggattctattccaagttgaattaaatgatctttgaactgcatatccatatattctccacccatatccgttcgtaagatctttaaagttttacccaattgattttgagccaatgctagaaattcctaaaacttctcaaacgtttcagatttcttatccataaggtaaatatgaccatatctagagtaatcatcaataaaagtgacaaaatactcataacgacctttagctttgacatttagtggtccacaaagatatgaatgcactatgcctagtagttctttcgcatgctctccctttgtagagaaaaaatgttttgttaattttgccttctaggcaagattcacaaactggtaattcaagatcggaagagcgtcgtgtagggaa

SEQ ID NO: 104242 - DNA, 521 bp, Cannabis sativa
caccggagctattattaaacgttgcttcaactcctgaaaacttgcttcacatttgtctgaccacatgaatcgctgatttttgttactcaactcactttgggacatagagattttacaaaatccctcgacgaatagtcgttaataccctgctaaaccgagaaaacttcaaatttctgtcactgatttcagcctcggccaattctttactgactcaatcttactaggatcaaccataatcccattcttccctacaatatgtcctagaaaagacacctttgacaaccagaattcacactttttgaactttgcatacaacttgtaatccctaagtcgctgcaataccattcgaagatgatgctcgtgctcctcttctgagtaagagtatacaaggatgtcatcgataaacactatgatgcagttatcgaggaagtccttgaatactctattgatgagatccataaaggcaacaggagcattagtcaatccgaatgacattaccagaaactcatagtgcccatatc

SEQ ID NO: 104243 - DNA, 559 bp, Cannabis sativa
ggtaaaataattccaacagtttgccctcaaaaatcacttgcagaaatcgcctataatgactgccaacttcttcctggttcgacttaatcaaatggtctctaattctggcatcatttatctccaatttggaccgaggttggaaatttctgggtttgaatgggtgggctaattgcttaggatattttgtttctaaggtctctggagaataaacttctgaactagattgggacatctctacaaaaaagaacaatctcaattcctggatgaaatttatttaaccagaggctcaaagaatatgataaacctaaatttatatcatgcctaaaccctaaaaattacccaaaaaacttaaaccagaatcactaaaaccaaatggagtgacaagatgcaaaagaaaaacgatcataacccataaaaataaataaaaaatgagaagaacagggaagactgcgtcacttactgtttgaagtcgggtagtcgtgtgatgaaaagtcttacaaccgaagatggagtgaacagcgtgatgaactttttgaacacttaaggtcgataagtaaat

SEQ ID NO: 104244 - DNA, 609 bp, Cannabis sativa
caccattttcgatctgaaagggaagatgaacagtaacaacaagagaaacaagaaacgaggttcgggtaggtggtgagataaatgataaagattggtttaaatagaaaaaagctaaaagagaaaaggaaaccaattttgaaaatttgaaaaataaccgccagcccatgaacaaaaaggaaactgcccactctcttgcaactcctttccctttttcttaaaaaaaaataaaaggaaactagaattaccaacaatatttccaaaaataagacaatctttcaagattaaaaacacattaccatataaaagatcaatatttaaatggaaacatatcaaaataaatcaaggaagaataaatattgatacttaccaattaagcacaaaatttccttagcacatgaatcaagacaccacgcctccttttttttattattttttttttatttttcaagaaacaaaaataaaatatgtacaataaatataagaaattctaaccaagcaatttaatcaaatgccattaaaaaatagacaaaataaaatacatgttatgctttcaaacgaaaataactaattagtatctcaggaacaaatcatacttaattgatgttgagg

SEQ ID NO: 104245 - DNA, 683 bp, Cannabis sativa
ttgcgactaaaggagtttgtagtagtgtagttatgtactttaagttgagtgcttaagctacgaggttgaatgaacctactggaacagtttctactattgttaatcagtagataaaactcaatataagtgttcttaaggtttaagtgatgttgcaatccttttaatctaattttctttttaatatttttatcaagcaatctgaaaaattgaacgacttactatttgtcttatttttttaattctgaccgtaatcgtattttggaaatgtgaagattggattgcatgttattttttttgagcaatttgcgtcaaaactcctttatattttaatttttataaacttttatctttttttggtagtaaaacccttttaaatttatttttatttgcaaatttagtagtcagttaaatattatcgttaaatatcaactggatgaccaccgtatacaccattatatgtaacagtaaaacttcaaaatcggattttgccacaaaaaaaaaaagttaaatatataaaaattaaaatataaaataatttcaccaaaaattcctctatttttttaggaaattgctattaataaaattacaaaatttatgttcattgtcaaaaaaaaaaattacaaaatttataattaattaataattagtgaatattattaataatatatatttgacgtggatag

SEQ ID NO: 104246 - DNA, 860 bp, Cannabis sativa
gtacttctttaaaagtggcgtactgatatactcctatatttttcggcattcgagagacttgtttagtctttttttttcatggttgtgtacattatagttatttaagacaccttacaaaattatgaaaaattttgaaaaaattaacacgctgaaaaaaaaattcagtattattattttatctaattaataggtttatttaaattattaattaaatataataattgtgtttgttaattaatatgatattattatttttattttattaaaaaattaatataataataaggaatttttcttagtgtaattttttgtgttgtaggttggagtaaaaatattttttttatgccaaatgtgtctatgaagatgctcttagaagttaatatgcaatgacttagagtgattatgtttgtgatgatcaataagtaatgtcattaaagcaaaagagtgaacttttctgtaggtggattgcatgtcaccgtgaccagtgccttattattagggatgattgattcactcgatctgcaacatgcacaagttgctccaagtatatacaatcaagggtataatatcctttctaaaccaatcatatttattagaatgaaattttattattttataaaatatttattgtagggctttatttcatctcggttgattgttatttaaaaaataatatatagttatttggtattttatgtttttttttaaaattcacgtttgttattttttatttgggataataatcaattagtacttttttattttaaaaaactacaataactttgataccttaagtatttaatgttttaatattctcaaattaacccactctaattcattatatgattattatattaatt

SEQ ID NO: 104247 - DNA, 808 bp, Cannabis sativa
atgtatatttttttaaaaaaaattgtctgattttttatttatataagaagttgtatgataatttttttattattatttagagttttctatatatatttattattttttaatatgcatatatttttttttaaaaaaaaatacacaaaaataaatttaaaattatttgatactaattttattgttcaattaatatttatataattatttaaccgccgctcgcgaagcgcggcctgcttcctagttttaagaaaattctacatgcacccttatctatttcagtatctaaaaaataattataatttgtatcagtacacccattttaataacgtgtattgtagatacaccttaaccttaagattttaatgtcatgactcataataaaaaaaataaaatttatgtacttaattttactattatattaaaaaaaaaaatctcttttttcaaaaatatatttatatttatcattactttattctttaactaaaaatcaaatatcttttcgtaaataaataatgtttactcataatgtttatttttaatatagttatattttgaattgttttatttttcttataatattacttcttaacaattttattttattttattattttttttttcaaaactttatttttcaccatattttattttattttatttgtacataaagaaaagtgatattacatattctcatattttttcggtttgttagtgtatttttgttgtgttatgtgttttgttgtgttatttattttttaagtgtatagatttttgaagacattacagattattggaggatcaatgatta

SEQ ID NO: 104248 - DNA, 708 bp, Cannabis sativa
  modified_base (205)..(205): a, c, t, g, unknown or other
  modified_base (360)..(360): a, c, t, g, unknown or other
  modified_base (662)..(664): a, c, t, g, unknown or other
atttctaagtttgggttcgggatccagattggggtgcggttctatgtcccgaccctagttttgtgtccctagtctggttctgtgtccctagtctgtgttttggaccaggtcctagatttaggtcaaggtgcgggtctcagttccagtctgggtagacgaccgtgtccgggctcgagttccagtctcagtttgggtttgaggctangtctgtgttcggttctaggtctaggtcgtggtcctggttgcggtcctagtcttgttatagggtcctggttcggcgatacttgttcatgttctaattttgggtcctaggtctaggtctgggttctggtctgagtcttagtcccagatctagacacngactactagtctgttccaggccctgttacccgaatcccgagtcaagatctggatcactgtcacggctcttagtctggttctggttcaagtcccaggtcccatttctgagtttgggttcaggatcgagactgtggtgcggttctaggtcgggaccctggttctgtgtccctagtctggttccatgtttgggttgagttcaggttcggcttcgggtcccgagtccaggtttgggttgggatgcgggtgcggctccaaatttttttctaggtctgatttggagtccggttacggttctggatctnnntccaatttcagttatgattcaaagtccaagtcctagttccagtc

SEQ ID NO: 104249 - DNA, 526 bp, Cannabis sativa
ctttggatcagtgtaacttttctatatactttgcaaagcaaacatctgagccttgatcttatatattggatcattggtcctttgaactaactcaggacctaaatacttcctttctccagttttgtcccaatgaattggggatcgacacttcctaccatacagcatctcatagggagccatccttattgtactttgatagatgttgttgtaggaaaattttatcaaagacaaatatttgctccatgaacattcaaagtccatgacacatgctcacaataagtcttctagtacttgaattgttctccctcattgtccgtcagtctgagggtgaaaagttgtactgaacttcagctttgtacctatagctccctgaagacttacccaaaattttgatgtaaatctttatctgaaacaatggattttggagttccatggagacgaactatttcttttacatacagttatgcatactgatccactaaataggttatttttaccaatagaaaatgtgttgtcttcgtgaaac

SEQ ID NO: 104250 - DNA, 693 bp, Cannabis sativa
  modified_base (376)..(383): a, c, t, g, unknown or other
tggttcttcgtctgggttctggtcctagtctgaatcccagatcgagacaccgacaagtggtctgttccaggacgcgttacccgaatcccgagtccattttcgggtcccgagtgccggtccaagtttggttcttggtcaggatctcggtccagatctaggtccagtagttcgatcccagactgggtcttggtccgagtccaggttcgtatctggatccctatctaggtcgaagtctgtgtttgggattgggtccccgatttaggtccaggtttgggtctcaattccggtctgggtaaaccaccgtgtctgggcccgagttccagtgtcagtttgggtccaagtctaggtctattttcggttctaggtctgggtccgnnnnnnnntcacagtcctagtcttgttctagggtcctagttcagcgattcttgttcaagttataattttgggtcctaggtctaggtttgggttcgggtttggttcttcgtctgggttctggtcctagtctgaatcccagatcgagacactgacaagtggtctgttccaggacgcgttacccgaatcccgagtcaagatctggatcgctgtcattgttctcggtcttgttgtggttcaagtccccggtcccatttatgagtttgggttcgagatcgagacttgggtgcggttctatgtcttgaccctggttttgtgtcc

SEQ ID NO: 104251 - DNA, 525 bp, Cannabis sativa
ttcattctcttgatgagctccctcagcctggccagcactggatttcctctttttctccatcacaaggtgaggaatgaaatccttttggtagagcccgtactccgcaaagttgtcctctgaggtcaacaaagtgatattctgggcagcacccgacagctgagcaagtctttgagctctatccctgagagtaagtgtgaagggtggatggtgatatatagggatctgcttgaagcgagtgtaggtggtgcccatgccatccaccatgtaatactcgtcaacaaaattcccaattttgctaacagccttgtccctggtgcccgtcaaccactggaagtctggctgagaaaaatagaagtatcccgacctaccttacttgggagtagacttcaaatcaaaaaaccagctaacctcatgaggagagggtatatcccacttctgggtggcatagagaacgaacagggcagacagatacttgatgcccttgggagtgaattgggtcggacagaggcagaaaaagtctgccac

SEQ ID NO: 104252 - DNA, 619 bp, Cannabis sativa
tcgttgaactcagtgatgttccttactggactaccttgtaagtcgtcccacaactcgcccccagcagttgaggggttagtagagatttctgcctaaagggctataagttgtgtactatcatccaaatttctaaccctagcagcagccgtgctaaaacgaattaagtgtgccttaagtgcctcaccgatccgtagctttatattggttagcgaggccgctttaggtcgtctatcccttgcagcctggaactgtttcttgaaatccctagacagctgttcccaggatgttattgaatggtgagtaaacttgttaaatcagctgcttgctgctccaacaagcgaggtggggaacaagatacagcataaattgtttgtcacattacttgcttgcattattgtgttaaagttgttcaaatacaagatcggattcgtggttccgtcatacgatgagacatgcaagttttgaaatcccgaagggaaaggggtattcatgatatatgggtgatacggcttaagctccttgtctgagtcttatcaagattgtctccctaattcccccacttgatatctcctgaacgtgtgcaccaactcatctcttcgcaattggataggatcctctt

SEQ ID NO: 104253 - DNA, 771 bp, Cannabis sativa
  modified_base (676)..(677): a, c, t, g, unknown or other
aaatttataataatgttctacttgttcaacatcatttcctgaagtgaatgcaatattatttactactcatatatttcaagaagaaagtgaaaacaacaaaaagatgagataccacacacaatcaaagtgcatgaaatctatatatcatgtgtggaattgaataatagtagtcgcgtacatgtagtacggactaggggtgtacgtcggtcggtttagtcggttatagcatatttttatcaacccaatataaatatcgggttgcaaatatttaatcgtaacctgcccaataaaaaattatggaaagttcaacccgcccaataatttcatcggtttggtcgggttaacctgtccaaaccgttcttcactttttttttatagttattattgttagtttctactattcaaataattagatttttaaaaaaataaaaatatattatttatattttaagttaagaaatactatagtttaaattaattttaagaaccttaatataagataattataattgagtaaacataaaataattgaataaaataattaaaaaaaagtaataaaatatggtagagattttaaactttaacttcaatatccaaatacaataataattgttaactataaagtctaagtttaaagttaaacactaaaaggtctaaactttaaatacaaaatagnntaactaataaatgtaatttatgtgatataatatatcaacttctataaaaatatataaatcggtttaattcagtttattcaggttaattgggcgg

SEQ ID NO: 104254 - DNA, 540 bp, Cannabis sativa
acccgactcatgacctagagttggccgcggtagtgtttgcattgaagaactggcggcattacctttacggagaaaggtgtgaaatctataccgaccacaaaagtctcaaatatttctttactcagaaagatttgaatatgagacagaggtgttggttggagttagtgagagattacgattgtgagattctctatcaccttgagaaggccaatgtagtggccgatgccttgagcaggaaaggtcccggggctggtagctagcatgattcaggtctcacctcagttagcagaggacatggtcagatcaagcattgagtttgtggtaggccagcttcacaacttgacgctgcaatctgctcagttagaaagaattaaagtcgctcagatgactgatccagaggtaaaggttagagaagaggtttcagctggtcaagccagggatttttgtgtgtcagacaacgggatgctgttgtataaagctagggtttgtgttccaaatagtgtggagctcaggaatgaaatctttgaagaggctcattct

SEQ ID NO: 104255 - DNA, 717 bp, Cannabis sativa
aaactataaccccgctaaaactcgatcggtattatatttatctccaatattaatcccactaagaaaaacattctagacttacccatgtgactcaaatggccatccatcgcatttttcgtcgtcctcgagcgaaattcataaaaatagcataattcacatataacacaaataatacctctagagtttgataaaatctccataattgtgaaattgtaactcaaatggccatttctaataatggggcccataattaaataaatttattaaaaattatagaaatatcaataattaacactaattgcctttactaatccatattctaaaatgcggtcactacaattatgcctccattaaaaggatttcgtcgtcaaaatctaacctaaatagctcaggatattgagtcctcatgtcggactctaattctcaagtagcttcctccaccttactgtttctctagagcactttgactaaggctatgggcttgtttcgaagaaccttctcctttgtatcaaggatttgaactggctgttcctcgtaggaaaagtctgactgtagttcaagggcttcgtaactcaagacatgagtcgggtctaaaatatatttccttaacattgaaatatgaaatacattatggacaactgataatgctacctgcccgaccttctcgagtatttgaaatgccccaatgaacctagggcttaacttgcccctctttcc

SEQ ID NO: 104256 - DNA, 516 bp, Cannabis sativa
atatgtatatatcttaatcaattattggaatttaaccgtagtaaaaaaatataccagccacgaatacccaatatacagataccaaactgtaaaagtcctcaagccattatcaatatgacaaaaccgtattcaatcattcataaatcaaaattttttcacaccgaatatcaaccaaaaattcaatatatatatatatacattgaaactaaagcctaaaatattaaggcacaatattattcatagaaaaaaatcaaaaccctaattttcaaaatctcaaaatttcataaactaaatcatcatcaatcttcaattaattcaacaaatgcggctctgataccacttgttaggatttataaaacacttaagaaatatataaatcacagatctaaacatattccctagagtgcttcaatatagaaagccttaaatcataaataacatttgctaaattaaagaagaagaagatgataaaatatgagtggaagcactaacctgatgtaacaccctaactatctt

SEQ ID NO: 104257 - DNA, 598 bp, Cannabis sativa
ctttgataagctttgtccgacacagaatccgtcgtgaacttcagataggagttgtgcagcttcgtcttgtgtgaccatctgagtaatggcgtcgagaatcctcttctgtacatgaccccttctactatgatgtaccgtactaccttccttctcattttctgagcttcatttcggttatctgggagttcgccagagttgaggtaggctgctattggtgtcatccagtttggggatgtgtcgatcatttcgatttcttccgtgccagtgatgctaggctcttcaaggaactgaatagggaccaagtttgccttgtcacgtatattgctgcttgccaatcgagctaacgcgtctgcagttgtattttcttctcttagaatttttctgagaccgtagcttttgaattgtgcgagcaggtcgtgtattttgctcagatatgctatcatgttttctccccgagccttatatttgccggatacatgatttaccaccagctgtgaatcactgtagatctcaatgtgttcggccttcgtttcttaggctagcttaagtccagcgattagagccttgtattcggttcgttgttagatgccttgaatcc

SEQ ID NO: 104258 - DNA, 684 bp, Cannabis sativa
  modified_base (291)..(319): a, c, t, g, unknown or other
aaccaataataattaataacttttaaattttcaataatacatattcaagatcaataaccaataacaattattaactttcaaaccttttcaataacaagtattcaagatcaataaccgataacaattagtaacttttaaacctttcaataatatatattcaagatcaacaaccaataatgatcaataattttagactttcgcaatttttttatgattccacttcgatcaattgatacatatacagtaaatttagaactgcaaagaaggaagaataaagtaatttcgtctctnnnnnnnnnnnnnnnnnnnnnnnnnnnnntgaaatgaagtacagatgtgtcgagtgcggtaaaaaaaattatctttaattctataattgttattatattttaattttttattatttcttctcttttctttttttttttttttttttgtaaaaaaaaactaaatcacttgaaccaatcttgaactaacacactttagcacttaaagtaatagtattgataataagattgagtgtagaattatatttaattagaggtcattcttatactcctttttttattaattaaggttatgagtgtagcaatttcaaattataaggagtattattacaaatatttcaatgatttaagtgaaaaaaaaattaatttctaaaagattcttatttagtaataaatt

SEQ ID NO: 104259 - DNA, 1823 bp, Cannabis sativa
  modified_base (320)..(321): a, c, t, g, unknown or other
tgaatggtgaattgattgtacttcgaactcgtagttcgttttggatctacatacaactaaattctccattttttggccgataatttctccgtaattttttggacaaacaacctatgtttctgtaaaaataattagtaataagatttaatatacttctatttatgaaaatatataaattttatatatttattttttttatatttacctcgtccgaatatgattttgattgaactacaatacatgagaatatgttttctgcaacatctacgaacatcacagcatctagcaactcggcatcatcgtcgagttgtacataggtnnttgcactaataatttatacaaaatatataacgaaatatcaaataagttcaagtattaatttagttatagaaatataataggcaataattggcaattcaacagctagaaagaaaaaaaataataataaatagcttaagaagaaagtgcaccttcacttcatcgtagagttttttttccatgcgaatagtttatccaaaatagaagcatgtgtttcattctcttctgtatcaaacccatcatttccatcttaaacattaaattggcctctaaatgatctattccatgtaataacacgcatcactctagcagagtggtcaatatgtcctattaaatacaacaaaagaaatttattttagattccaaaatcactgtaaacaagttaaataatcaataaattactcaaacataaaaaccaatataaatagattccaaaaggaaatcacacatcccttcaactcagctcgaatcacacattttgattttcaacaaaagaacacaaaagtgcagctctttcaacaagaaaaattcaatcaatgaaatcacaaatacataatcagaccaaagaattgaaattagtgtttccataatcaataaacaaaaataaatcttacatctgtccaacaaaataacacatacaattaatccctaacaatgtatcaatatctcaaaaataaaagacgaatctttatcaagattgaactgaactctgtgatcaggcaccttaaagccatctatgttcagagacccaaataggccttagtgcgttatttcatccaacaactctcttctcccctctctctccagatatatatacatatattacagatagaacccatctcaatcagatccttcaaacgaccaagagttccaatgacaatatcctgaaagagaataatcttaataaattaagttccagatatatgttctttctcttgaaaatattacagatgaacagtcaaaagatgccatctctaatgcacaaagctggtgatggataaagaagttatctcttttcagacaataaagaaatttcaagaataaataaggatatccctgaaagttatttaaattttgaaaaataatataaattcaagctgaaaattacttaaataaattgttataaattctagcttccattatttgaatcaggaagaaaaataagataggtgtagccttcaatctacttttgtacacaaataccagattaaagctaaaactatataacaattgcggtcagcctaggtcaacatacaagtttataaggatacatcttaaatgatagtgtgataactcatctaaaacatgactattattttcttaagatgaaaagataaaagaacagcatatcttacaacaccagaattcagagcagttatttgacgttttttggatgtccctccatacaagacaactgaagtaacaccaaatcacaaagagaatatgtccacagagatattttttgaaatttgaatgaagccaagtcgtgtaaaaaaatttcaaaa

SEQ ID NO: 104260 - DNA, 2185 bp, Cannabis sativa
  modified_base (1184)..(1184): a, c, t, g, unknown or other
  modified_base (1734)..(1742): a, c, t, g, unknown or other
aattcttcaattggttttagtaggtttctttcatcttgaactcggggatcaagatcttcatctttcttctcattttcttctgccaagatcatcattaactaatgatcggcctttctatgctgcaaatctacgcaatagcaattgcgagccaacatttggtcaccacgcaccactcccacgccatcttgtgtttggaattttaaagataggtgcttgatcgaactgactgcccctagttcgatcagtgttggacgacccaataatatgttgtaagccgagggcaggtcgacaaccaagaagtcttgcataacagtagcaactaaaggtgcctcgcctaaagttagtgcgagctcgattatgccaaggctagcgatgctgtctccggtgaatccacaaagattcaccatacaaggtcttaatttggcctttttgagccccattttctttagagtctccatataaataatatttatcgagctcgcattgtctattaacactctcttgatcctcttattggcgagatgaatggttatgactagcggatccacttgaggatatctcacgttcttctcatcttcctctgtgaatgtaatggggggttcctcggttttaccttcttggaaggttctggggccaagaccgactgctcattctttatctccttcacatatcttttctgggcgttattgctttcccctgcgatatgcggccctgtcgaaataaccaggatgtcctctccttccataggaataggttgtaaccccttgttgtatccctggccctatatcttcacatactgtttaaaatggcctcgagcgatgagactctctatctcatctttcaattggtgacattcgtcggtcgtatgcccaatatctttatggaatttacaatatttgttaggatctcttttgctcctcgaattcctcatagactcaggtttgccgaaggctaccttctgctcatgtgtgaggaaaatattttctcgagtttcattaagcttggtgtaaatagtatacaatggaacgtctttgtcatgcctcttttgtttctttctatacttcaatggttccctaattctttcctttcttttcggaccaaaagcccccgagctatcaattctcgtggaagcagccccgttgaaacattactgggtttacttcccgagcttgttttcaacaagntcatttcctttcgggcttcttccttctggacaaacacctaagccctctcgttgaactcagtgatgcttctcaccagacgtccttgtaaatcatcccacaactcgcccacagcgattaatggatcggtggagatccccgcctgaagggcttttagttgcgtgttgtcatcaaaatttcgaaccctagcggcatcagtgctaaaacagcttaagtacgccttaagtgtttcgccagcccgttgctttatttaggttagcgaggtcgcttcgggtcgcctatccctagcggcctaaaattgcttcttaaaatccctagacaactgctcccaagaagttattgaatgatgagtagacttgttaaacaagatactcactgctccaacaagcgaggtggggaataaaatacagtgttagttgttcgtcacgttactcgttcgcattatcgtgttaaagttattcaaatgcgagactgaatctgtggttccgtcataagacgagacatgcgggtttttgaatcctaaaggaaaaggggtattcataatatctgggtnnnnnnnnncaagctcctcgtcagagtcgtatctagatgttttccctaatttccccacttgatatctcctaaacttgtccttaagctcgtttatccacaattggattggatcctcttgctttggaccaagctattggcgaaggttaggtttcttccaattcaagtgctctcacagatctggttgggagtaattgctggcagatctcgtcttactcatagaccgcgtcctactcatcatagactttgtctttgaatggctcacggatttactggttcccatactttctcgatcattagatcgttgagtactttcttcttttcaagttgatcggttatgggttctagaacgcctcaaagtcacccttgcttcttcacgctctgttctttcctcccgagagcggtttgtcgtatttcccccatcagggtacgtacgagtcctcgctctatgggtt

SEQ ID NO: 104261 - DNA, 541 bp, Cannabis sativa
  modified_base (295)..(295): a, c, t, g, unknown or other
ataataattaataacttttaaattttcaataatacatattcaagatcaataaccaatagcaattattaattttcaaaaaatttcaataacacgtattcaaatcaataacctgtttggaatattttaccaggatctagatttaagaacaagtatgttgaattaacatcccaaatatgaatatctctaaaacaatgaaattaaatacataagagtttagaaaaccttacattggttgcagcagaatataatgactcattccactcagatctcttacccttgttcctttctgtcgcanagtattatcaagatctgagcctagatctctttctctccttcgagttggttaccaccatcttccgcagattaagtacttgacttgatatgtgtgggcatggcactctatcactataggccgattatgaaaaacaaagaagtagggttcgaaaactgtatataaggtgtctctcatctactagttgtctgaaaataaaaactaggtttgattttgttgaagatcaaattggatgagatgagagcatca

SEQ ID NO: 104262 - DNA, 3343 bp, Cannabis sativa
  modified_base (2026)..(2039): a, c, t, g, unknown or other
aattaaaaaatagtatatgagatacttctccaaaaaaaatctttaaataattttacaaatttatacatttttaataatgaaaaatgaactaaatagaacatgagaaattgaaatctttttgtgtaggagggactaggttgtagtttgaatttggaactttctctctttgtgagaagagattacaaagaagacaatgaccacttctaaatatattttttgttacttttttttttgtacctataacccctattaccttaatattttacaaatggatattgttattaatgattttcatcaaatgttaaaaaaaatcatttagacaatgttcacatgtattataaattataatgcaattagtcaaatattgcccaaaagctaaataaaatattaattctattatttttttttaatcttactgcaaataatatgtatactaactaatacagctattatttatatattaaaaaaaagactaataaaggtattaatattttttttttcatttttcacttaatttaagaccaaaatttttattattgtttttttttctagaaatttttttattattgttattagagaagtgcatatgagtttttaagcatgcattttatcttctaaaaggggaagcgtgtatcattgcattttatcaccccaatttctcttccttacattaatgttatttaaattaaaatatggtcaattactctcaaaaaattaattttaatctttatcaattaagtattccagaatttttattacttttttattgaaaaaaaaaaataggtcttccagatttgatctggcaaaagaaaaataggatttgacagttttttttccctactttgtcgttttagtcagccaaatataaaatggttacctattacacatgaattaattatttagaaataatgaaataggggaagaactaataaggaatatttacatattcccaataataaaagcaaatataagaaagccgtattgggatttcactggctgtgtttggccatatcataatacagttaacattctcaatttgggttggacccacttaaatatatgtatatattatatgtaaaaatacatagagaatgatcagtatacaaagatcatacataccaacataatatgataaaatacatgaaaatactatatcacatgatttaacaaaattagaaaaaacagtatgtattttcctttatgggataatataaatactgtatctgattcactagatggtcttaagggatagtattgtattttcctatatgggataatagtgttagttgtagcaattgctaatcacttgggaattgtacatggaatttataggagcttattaattttgtggaattgtacatgcatggaatttatatagaaacctgactaggacaaattactcattttccatcttaagaggggtgttaatatcttctactattttgtagattaagagttgatgaacaaattgaaatcctttcttgagactcactatgttatctagggtttgttcaaccaaaaaaaaaatgttatctagagctatcagctcaagtcaacatgaccttttattattaatcatatgtatttgtagtataataatcttattattatcataaaagttaaattctgttttgattactcacggaacaagtgattcaaataaacattttagatttatgatatgagtttaaaaagttcgctaattgaaaaactatatgatgaaataggttaaggatagagtaataaaaagttaggtgattgaaaaaattaaaaggagtggtaaattttttttattgtactctcttatacactctcatttttatatgaatcagtcacatattcaatgtagacccgatcttagtctaagatagaccaatttataagtacgttaggctcaggctcactacaactactagggtgttcattagatcacattcaatgtttttaggtctattcagattcgatccaattatatattagatgttagattttactatctaatttgatctaattaatttcagtcatnnnnnnnnnnnnnnatccattggatgttggattggattagctctattcattgaatatgtatttcatagatatctattagtttaatttgggtttatctaatattttagacctaatatttttggatcagatcgagttcatccaacatttaggtccaatatgtacaaaaaaatttaatgttaattttcatacgtacatatatattttatttataacaatataaaatctaattactcatcaaaactaaaactaaatgcaaataataattaattcgattgaatgttggatgtattggatttttgaacgccccatccaacgcccagtccgatccaattggatatttaaaataatatctaatctgatccgatcacaattagatattcaatatttagcagtcaattataattggatcaatcgattgtcattggattgaatcaatttatgcacactacccaaaaaatattaaacatttaataaggcataagatttaaccccaaccataaaaacgcgttattaattgtaggatatgcatacatatggtcaattatgtttgaattttatatcatgtcacaggagatttaatctttatatataataacttattgattttaatttttctaaactctcccattaacgaatatctgtttttcttttcataaaacatactaaatttgtgttatttctaaagttttaacatttcaatagtaatatttttgtagggaaagtacctatttaacctacatcaatagctcaaaacattaaacacctcaaggtcaattttgacgtttatcttaaccttgttacatttgacttcaaaccaaaaatggcatgtgttttgtatcacacacatacacttaggaagaattgagaaaactcaaaaagcaaacacacaatagatctaagataaaaagcctaacagagcgagttccttacctcaaactcctctaatctaacctagatctggaaaactaaccaataccacactcaaatcacatattagatccaaaataagagttggggaaagagaaaccaaacagaaattgaagagcaacacattgaattaatcatggagttcacctttagaaattggggctacgtctctgtcaagaccgcctcaaagaaagcttgtgttttcactattaacaatgaaaaaaccaccagtgtaagtctcatatttctagtcacaggtacaatctggtaaatctctctttttttctcttaatttcttccaattataataatctatcttctaaattttttcgttttcgttcggttacatgtattataagtgcacgaatgtcattctctctctctctctctc

SEQ ID NO: 104263 - DNA, 639 bp, Cannabis sativa
aaggaggtagaggaagcaatggtggcgatccgaaatgcaatcaccagttagttctttcttaaactcttaatttctatgttaatttttgttttagttttgacaatggattttatgaactaaactcctatttagggagatgatgaatgttgattgaaattacttttggttaatgataattgttatttctcctttcttgattgtgaatttatccatgtttatgtttaattacatgtttaagattgatcaccttctacatattctgtgatcctaattcaaaatctgaaaagtgagaattgggaatgctaaaattagataaactaggatttgatgtgaaacgaaagtatttgcatagcctttgtgacatttagattattacttaatgctgattatatgttaatctatctcagagatgattagataacatgtgatttaggacctaaaagatctgaaaagagttaagttaatttttataatctgtcattcacattaagaaagagaatagtaattagcattaataattgggtaattacatcaatagaattcttttctctaatttctcatccttgattaaacacctttatttctttctttaattttcttgtttttctttatttcaaaatctatcaaaattatttatct

SEQ ID NO: 104264 - DNA, 871 bp, Cannabis sativa
tgtttataatcaagagaaacggtgttactgcgctattttaaaagggggtcatccctctggtcaaggtagggataggtgggtttggactctggaacggaatggcaagttctcctgcaagtccgcttacctaacccaggctttggagagagcgcctccgtgtgaggttgctccttctctctggaacaaactctggaatagtaaggttcttgagagacataagatgctttggtggtgtattttgtccaaagcccttcctattcgggctgagattaataaaagattctctattgaagattctagttgtcctctatgcgggaggggggaagaaacctttgaacacttattcctctcttgtgaggtggctttccacctttggcgatcttccccctggggtatttatccagtctgtaatactggtattcaaccttgggactgggtaaaattcatttgggaccttaagcacaagggggtaaatgcggatgatgtttttctctatgcttcgatcactgttgacaccatctggaggatacgtaatgataaggttcacaataatagtccagttgatgttagcagatgtattgattctatttgtcactcttttgaagatatgcatgctaccatttttcctcctcccagtccctccccgttgctggactggaggccccccccaccggagtggatcaagcttaattgtgatatcaaagtggggctggatagcatgtgttcggctgtggtggccagggatcatcttggcagggttcttcggattacaacggccaggctagacttcgttgatgtgttgtgtggcgaagcagcagcttgctgcttggcggttgaaacaactttggatcttaaggctaattttattatt

SEQ ID NO: 104265 - DNA, 739 bp, Cannabis sativa
tccatcaatcagtttcgaggaggacaaaacactttgttccttgctggaatattgtacttctgtacttggaaagttgtaggattagtaagtgatttaagttgatctttaagagctaccagcctcttccaataccaactggtgtggatagaagccgagtaactccactaatcatctctcttaatgtacacactatggacccatctcatccataaactttcttgtctatttgcagtggcctaaatgtacttaaacatggctaccttgttccactcttccagctttttaatgcctaatcccccagctatttttggttgacacacatcttcccaagcaactgctccagccccttgaaaaactgcttgtcctttccaaagaaatgctctacatattgactctatactttttagtcctttccttggcataatcatcatttggctccaacaagcttggatagaaataagcacataatttattagagtgattctccttgtaaaggacaaattccacgagctccaacttttaattctagcagtcatcttttctgccaagagttcacattccttccaagatattttctttgaacaaattgggatccccaggtaggtaaaaggaaggtcctgtcttgtaaaccagacagatgcaagatcaggtttatatcctcctactgcatattgctgcaataaattgtagttttatcagcattcgggtatagactagaagatagggaaaacaatctcaa

SEQ ID NO: 104266 - DNA, 818 bp, Cannabis sativa
  modified_base (463)..(467): a, c, t, g, unknown or other
  modified_base (747)..(783): a, c, t, g, unknown or other
cttccaatctatgattgaggtattgtttgttgtgtgtgggcactactctctcactagggaattcgaaattctctctctctcttgagtattgtgtttatcgtgtggtacaagaggaagagaagagggcaactatatatagaggaaaggaaagctcaactttccaaaataaacagtttccttaattactgagtaattgagtaactgccttatttggtgtgatccaccactttccatttatagatagctgctaggtttgggttagtaattatttggcaattaaaaaattgaaaataataattggaaaacacaaacaagtggccgaccataggtgtgatgggcctcacttggattttgcagttttcacaattttatttctattttcccaaaaatacaaattttccagttctaaccatttaaatgccaacactaattatttaattataactaaaatagattattaaannnnnttgtcatttaatataattattaaaaagacatatagaatctcttaattaataattaaacgtagaatctattttctttacaattttatccctgcttagtgaaaattcacaaattagacataatctaccttttagaattataattgattaagcatcaatcaattactgagtcttacaaacagtatggtctcaactagaatggggaccatggatctatattgctgagcttccaataagttgttaaatcccaaacttattaatttcttgttgaatccactcttannnnnnnnnnnnnnnnnnnnnnnnnnnnnnnnnnnnntctatatgttccacgatatatatgctatctcattt

SEQ ID NO: 104267 - DNA, 518 bp, Cannabis sativa
aaagtggaatcaattttttttatctgtgtggtaaacctattaacccttacagcttaggaaatcttttcatgcatgttgctaggagatatctattgtaatacaactgtaacttatctttgccttgcaatgtaaaaatatgttttataagttcttcatacagtttctttattttatttattagaatttaaataagagttcaagtatatatattaatgattattattattaacagttataataataaatgttctcttttcatattcttatttatttttccttaattgttggtaataattttttatatattggcaaaaattttcattaaactaaaaaataataaaattttcaattacatatataaatgttggacaataaatgtatatatgtacattttattagggatacttataccacatactgaaatgtttaactttttttacttatatactacggggcgaattttttttcaaaaatattgtgttttttttttcaaaaatactgtgtaagttttatattgt

SEQ ID NO: 104268 - DNA, 708 bp, Cannabis sativa
  modified_base (470)..(483): a, c, t, g, unknown or other
tgttcgaaaggttgggggcaacccatgacctaaggaatgatctaaatagaaggaggggagtagacaaacagaatgtcgtgacaatcatgtagcccggaacccgtactcaaattcccgctcagaaagatgctgacgtaattcaaattgaccagaataccgagcaggttagcccagccgtacaggcacagctagacgaattgaaaaatatgttcatggcatggatggacaaagaaacaatgatcttgagctggactgagcacgtggaactcctttctcaccagagatcaatctcctaccgttgccccacaagttcaaaatgccgacgtggaagatgtacactgggagagaagatcccctttcccatcttaagtacttcgaaatgcaaatggatttgcaaggggtacgaggagatgtatgctgcagaatcttccctgctactctatcaaaagccgctcagcaatggtatttcnnnnnnnnnnnnnnaaagtttagttcatggaaaaccttctcttcgaaattccgtgcacaattctcctcctcacgccaacatccattgcatttgggagatttggtcgaagttaagcaacaaccaggagaacctctccgggcatacatcagtagattcatgacggaggcgaccaaagtttcgcgggtgattgaggacggaaagttatctgcgatactggggggcattgaagtcctcgatga

SEQ ID NO: 104269 - DNA, 1487 bp, Cannabis sativa
ttcaaaaaattaaaagaagcatatggggtcagagaacatcagtgtataatttcagacagaaatgagagcatgatcaaagcagcaagagaaatatacgcagaaattacacacacatactatggataccacctgctgaacaaccttcaaaacacatgatgccaagtacaacctgccattctttggggcagtgaaagcatacacagaaaaacaatttgagtaccacatggcagaaatagacgggttggacaaacgcataagatcgtacttgaaaaaagtcagttacgaaaaatggtcaaggattcataacaaaaacaaaagatatagcaccatgacctctaacatagtggaatcactaaactcggcaaatttagcagcaagggaactttcaattacaacactgctggaatgcttgagagcattagtgcaacaatggacacatactaataggacaaaggcacaaaacacattcactacattggcaccacctgcagaacagatgttactggatagctacacatactcgttgaacctggaggtcaaatatgtaatatgcattttttattttaaaaaataaaatcattctagagaattcatattttttcctaaaattggtttaggattgttttactgttgttctgaatgtataatgaatgatgttttcaaacaagacaggtaaaatcaaccactgattacttgtttgagttaacaagaataaaagaatcatgaacagtagacctcaaggagagaacatgcacgtgcaacaagttttaaatagatgaaatgtcatgtggacatgttgtggccgtgctaaaggaggtgaacatggacccatacaactactgctcagaatactacacaaagaaaaaatggctagaaacttatgcaggaacaatgtacccaattgaacgccaaagcgagtgggaagtaccacaaaacatgaaagacataatagtcttgcctttggttgaaagactaaaatcaggaagacctaaaaagaggacatgggaagctggctgggagaagaagtaacatatcaagtgcagcaaatgtggagatctggggcacaccaagagaacatgcattagaaggcatcaacaataaaagagaagaagaacaaccgaagaacaatagaggaacaaccgcgaaaaaattgaaaatataagagatcatatgtttgctttgggcctagatgcatatagggagcccatttaatttttgataattataatggaccagcccaaacaaaactgaattggtgtaatgaggtatgggctcggttgaacacaccaaaacatagtgtgatattatggctagcaatgctcaataggctgaagaggtttggcatcctggtgcaaggtcattgcagcttttgtgattcaaacattgaaaatgaacaacatttgttttttgattggtgtgtatctgtttactgcttggatgaaatcaataaatggctcgattggaaggcaaaaaccaagtcacttccc

SEQ ID NO: 104270 - DNA, 552 bp, Cannabis sativa
aactccactatcgtggcattagctgtttcagatgcccgctcagcaatcacggtcatctaacacagtaagaaaaggaaaggaagtgttaggaaaaatgaggttatatggaaaagatatttatcaataatgcaaagaaaaccttactctgacagcctattgcttagcagcgtgcgccaaaatgatgagatcattgttggatgccatgacccacttctctagagtcagctttaaatattgttagcggccaggtcaatcttctttacaatgaagggtgcagtgtcacttctaaccctgtgtgtaaggtcgtacgatctacgaccagaccagagctctcactttatccttgtctacaattccagccttctacctagtagcaagatgggaagccttcttctaggaaacgaacttctcccagtctcaacattttataaatacacgcattggcttcttcaatatttttcccagcctcagctgaaaactactacgggacaaatgggtcaagcaaaatcaataggtgggatcctaaaatgtagttggaagctactatttttg

SEQ ID NO: 104271 - DNA, 1071 bp, Cannabis sativa
tatgtaaatatctgcttattttatttgataataagggtttaagctcttctatataaagggctttatttaaaccctaaaccctacgtcataactaagttcaaaaccttaagtcttaagctctaagtttgagaactcatctcatctttctctctctcccacgcccattgcttctctccacacttgagatttgccatctttgattcctacactgtaaccttaagagagctatctcagatcccacctatagggatctgaatagtattatctctcagtatttatacaactaaaaggggagtatgtcattacttgctaactaagggggccgaactctataaaaatcttgtgttcttttacttttaatttcttattgtgtaacacgtggcaagcatcggagttaatacgactctgctgtcggttggccaaacttgaggtcaacaattatcatagtgaaggaggttttcctcattccctcggcatagtcgaggagatcttctgggcggatgtcaacgatgtgttgtaacattcacattctactctttggttgccaaggagacggtcgataccagctgctgtcgagattttaatagacatgtgttagataattgagatggctcgaaggtcgctgggtgttgaccttcaaaggagacttggtgtcgatcactatgaaggtagtcctagacctagtagtgatgtttgccatggggctgtttcgactgtgagtggtaatctggtcttaccacaaggaacgatgttggctcacctgaaaccatacatgaattgtttgcatgacttcaaatcttttagggagtgactcactctttctagtgtctgttttgattagaacatttggtgatgcctgatcattaaacatcaccttagtcgccatgatgtttgaaatttcattgacactgtctgagcttgactgctcttgcccccccaatgttgatctcttagtgattggagtgaaaaacattgaagttttgtatgttgaagttacctgctgtgagtgagataaaccactgttgaggtgtagtgggttgttgcttgtgcgcttggtgctcaaacataaat

SEQ ID NO: 104272 - DNA, 535 bp, Cannabis sativa
cataggggctgggttggccaagcatttttggggagaagccctgaaaactgcttgctacttgataaatagatgtccatctacagctttaaacttcaaaactcctcaagaattttggactggtaaagcacccagctatgaacatctcaaggtttttggttgcactgcctatgctcacattaggcaagacaagttgcaaccaagagcacttaaatgcttatttcttggctaccctgatgaaatcaagggctacaaactctggtgcttggaggaagggtacaagaaatgtataattagcagagatgtcatctttagagaagatgaaatgccactaaaactcaccaaagaaatccccatgagctcaaatgttgttcccaggagtgttcaagtggaacttgaacaaagaactgagaatctgaatcaagcttctacagaccaggagatagaaacagagacaacaagtaacctagataactaccaacttgtcagggatagaacaaggagagaaatcagggcacctgagaagtttggctatgct

SEQ ID NO: 104273 - DNA, 1040 bp, Cannabis sativa
gtttattcgcttaagtacattgccacataaagtacattgttatatagtaaatataacttaatacatggaagataatactcgaatcataatgagaacatatcgttatgattcgtatgtttattatataatgaggaacattggggttgaatgttttagtctaaatactgaccaagtgggagaatattagaatatttctaattaaggtataaaattaagaattgattttgtgataaatgaatattttatatttattgaatctggacaaaattaattacgtaatattctatatatggtcagatttcaatatttattacctgatttaatttcctgaattaattgtcaaaatattttgacaattaatgtggcgcaaatgctggtagagtatctcacctataaatataggctctcgttctccgagctcctcactcagtttatttataacagtaaaattctatctaaagagagttgagagggcgaggaagccagcccgaccgaactccaacaccgaagaagttatcgtagggattgaagctcaaacatcaatggctgaaggtattttgatcctttcattgtatatacatttcgatatatttacagtttattccgtattacacatcgtttatatatgttgtatttcatattatatattatagtctaacaataatattaaattaaattaagttttatttataacataaaacccatatacctgatattttaaactgcaattttcaaaaaaagagaaacataataatttaatatgccgaaaataaaattcaaatagtttgttatgcctctattttatgcacatatgaaattagttattatttgaaccctactttttgcataataaattattctaaatttttgaaaagtttatatgaattattttaaatgactactatgtattctataaataaatatatataaattaaaattaaaattaaaattaaaattatatgaatattaaaaacacaaaaaggatgcatcgtacacttatttttaagaagtaaaaccacccaaaactatttagtccgtgt

SEQ ID NO: 104274 - DNA, 1486 bp, Cannabis sativa
acatgtatttttttcaaaagggattatgacaaaaataccctttgtaatcattttaaagcacttttcattaaaaagaactttttaagggcaattgttatatacaaaattcggctggtacttaagaggacacgtgtcaacctgggagaatacaaataaacgaatataatgacaattatattagaagatattaaaatagaataactcattaaatgcggagctgatagagtatatctataactcgttgactgtaaagtcttaagcgagacacagatgtacaaactaaattctcatattgatgagaaaccatttcctatatgaagatacaatcataaggatgacattagtaatacaaagcgaggcactaaccttgctacgtataaagagatgtagacgagacatgttagaacacttagcgtataatgtacattatacaaactaagcataacggttgaatgaatctgaacaacgaatagcgagacatcatcttgctataggaaggcatactcatggtaccttcactaatcagcttcagacatctttcaatgagacccactactccttcgagccagctctctcagatagaagctgacattcaaatgatgttgactgctaaagttcatcttgtcaccaagaacagcgattgtcagatggagcgttgtgtcttcaatatcataaacgacagtatttacattatcgaccttggaaagacatgggaaaagcttcagctccctgtcagggttattgttgctatcccagagaggtgacccagcgagatacactttgcagcgtatctaaacccacgtcagcattgacccggtaaaagcagataaattacagctgtgtgattttcaaataataaccgcatttattatacgtgaggcgtaatcaaatcccataattttaggagaatattattgtggggtattaatctgattgtaattaactgtctccttctataattataaataggggcaggatacattgaaaaagggatgaacaatcttttagagaaagaatcctagttttgtattagagaaatcgaataagataaactcgtggactatgcagaattttaactgcagaactacgtaaaaaagctttgtgttatttcttcttcttttactagtattatttctgtgcaaatctatcacgaaataagctttattatagttaacgaaaatttgcgttaacacatagcatattagtcatggtcaatttttaagtaagcatggtagattgacataaggctaattaaagagatttagaaaaaaagatatattaaatctatgatatattgatcgatagatataaatttttctaaatttcataacaaaataaacatttgaacggctaatgtactttttttttgaactcatatgaggaatcaatccatatttacttaggctaatgtaattttttccccgaactttgacatgcactaaatcgtgcctcctgaacattttggccgttaaaaattccccccaaa

SEQ ID NO: 104275 - DNA, 1054 bp, Cannabis sativa
agagagagagagagaaatggagaaaatggtagagaaaaagatgaacaaaaaacaaaggccaaatggggtttcaaagataaaaagggtggtttagttttgttgtgcatgtgtatatatgtatatatgttttggtgagtttattccttgttttttaagagagagagagagagtaaaatcaaggtggagcggttaagaaataaaagggcaaagattgcgggagagagatttgaaagtggatcagttggtgggaagaagaggttctcttaaatcatggcccttgatcatgccacgtgggagaatgtgagaacatctttgaaccatctcagcctttcattttatgcatgtgtgtacgtatgaatttggtaaatttacattatatggtatgtgtatgtatatgatcttaattagtgttaagaataccaaaaataatgtttgtgattgtgaatcatatattatatatatgtatatattcttgtttaatctcaatcacggtatttatgtatggtaataatagtgactgtggggtcactctctcccttattttcaaaaaaactaattatgctcttatggtttatgcttaattagccctccttctagttgttaccataaataatttttaaagataataaaaactaaaaataaaaacacccttttgtttggtgggtgaaatgaaaagttgataattgagttttttatcctttttttaaaaaaaaaaaaatgatttatgtattgaagggtgaaaataaataacagcaataaataaaggaatattgtataagatggaaaatctttaattatcttaataaaggttttgagataactgtaagcagctcattaccaaatttaatgtttgataagttactaatttcaatatttacagcttgtttagggattttatgttaacttaatatatgattttttttttttctttttcattctaagatactctcttttagaaaaagaatagaatcttatagatgttcagaaacaggactgtgctaaaatctactttcactagataaggtgttttacaaagttttgtcctatgcaacaa

SEQ ID NO: 104276 - DNA, 616 bp, Cannabis sativa
ggagcaagattggtggagctatgttgctccattagattgtagatgggcatggaaaaagatagtggctgtcaagagtaaatttcagcaaacaatttcactagcaggttttgttatgcagaaatacaacatacagtaggggtatcatctgctatttgttgaatatgaaaaactgtcatggagtaaccgagtttgggatagacttattgttccaaagcataggtttattctttggatagtcttttggggaaggttgaatacaaaagagagactaagcaagttcatgcacaccatggatacaaaatgcttactatgcaacagagaagaggaaactattgcacatttgttttttgagtgcgattatagccaaacctgcctacaagaaatgaaaatgttcctgcaatggaacacaccagcaagaaacatacagcagctactgcaagcttgtcataacacgaaaaaattctcagtagctaggaagagtatggtgaagtctgtacttgcaagtttggtgtattatgtgtggaaagcaagaaatgaggtgttatggaatcaccaacaatggctcatcaccaccacggtcaagaaagctcaacacatgagtaaatttcgaatcaaa

SEQ ID NO: 104277 - DNA, 535 bp, Cannabis sativa
gtatggaaatttattttgaattagttgatgtgattttgaagtgaagtgcccacctatttgtgaattaagtgatttatacaatgtattttttccgtgtcttcaagcctacaaatgtatattggtcttaactttgattatatgtcatttttcagggagctattgaaaagagtagtcaaaggaatagtgaggtctatttaattgtcttctaggctcaaatgagacttgttgatgttctataaagtaggccaacaatatatttctgtaactcttaaatatatgaattcaaaaaaaaaaaatatatttgaattctttttttctattttttggctcagattttgtgatgtcttcacaaattttggttgaatattattgattggtgttagatatattgtttatgatgtattgtaatttttttatgtatattcttacaataaatatataatgggagggaaaaataaaattaatgataatttgtattttttttttcttttattttaccctatctcggcgagctaagctgtcaagattggtagtt

SEQ ID NO: 104278 - DNA, 562 bp, Cannabis sativa
tttagcagtgaacacaatgaggtatttggttttctttctattgtttatagcttgatttattgacatgctttttagtattgcatattaaaggttctgtatttcttgatgttcttctgttctgtttgagtttccttacatgttggtagtgcagatcataacaagtagaataccaatcctgcaaaattattcttgagtcatttctatgtcgaaaggaaacattttttgttttaaggtgttaacatttttgtacattaaatattgttatgagttgagtctaacttagcaaatgggcaaagctgaatgagcttttttatgccttttatttaagatcatattcatgttgctgaaacaaagcttgttgtgtgctgaattcttatgagaccaatcacaaaaagattatgaaccatgtgaaccactcatctgtttcggtaatgtgctcgtgtgacagtaagatggttgtgttttttttttgtttttgaaatttgggttcctactgtttggagtgttcaattataatttggtttaaatctaattacacgttttgctgtttttattttggact

SEQ ID NO: 104279 - DNA, 651 bp, Cannabis sativa
gaatatgtgcccctatgaagctaacacagaaagacaagtgattcattcctagggatcaccccagaaaaatactataaataccccataaacagactgaaaaagtgtcgaacattctggagttaaaggaatcaaagagagaaaataggagagaagtccaccaagaacattctctgcaataaatactctcaataataaaaatgactcgtggactaagggtcattaatgccccaactacgtaaaaatcccaggcactaaacttcctacagctcttcttacatattatttaaatggttgccgaaaacctcagtcaacaactatcaatttggttttttattttcatttgtttagtttttagttttgttctattttacgctttgtttgtcttctctggtttctcttgcaaggagcttgagatgtctcatcggcatgttctcatgaattttgttcaacacgacttgacgcccttgtataaagcatggtggagatacaaggtatatctaacgaggtttccatatcatgggttgtccaaagagtgtcaattagagatcttcctcaatgggttgtgttgacctcgcttttagccaacgacagtgagtctaatttagtaagtgacaagtagtttataacgattgaaatataataaagcaatat

SEQ ID NO: 104280 - DNA, 4105 bp, Cannabis sativa
ttctgttgaaccaaataaaccaagcagtacaaacaaacaattctacttctttcttggttagagaggtgtatatcatgtcagctatatcatgaaacataatctcagaagagcaagaaaaaatgtaaggataaaattgcgtacctttccagactcttctaatgctctgacagaagaacaaagcatgtgacacagattcttcagggaacccacagcgatcacacctcggagagtggataattttcctataggctaagttttgggcagtagggagggttgagtttgtggctctaaaggcaaagtgtttaaccttggcagggagattaaggtgccaaaggtttttccaccaaggggaaggggaggaagaggaagggatatcagggggggaggtagaggatagactaaggtggtaacctgatttgacagagtacactcctgattttgaaaattcccaaatcaggtcatcaggagaaggggtaagagggaggggaatggccagaatttggtcaaccacatgagtcgggtaacatccctgtagagcaacggtatcccaagtcatagaactagtgatgaaagagtcaactctgtcaggaacggggaagatgggagagatatgacgaaaacccgggatccaatgatccctggtggtactagtgttctgcccattaccaatttttgaaataattcctttgtgcagcagctcttttccccagcaaatgctacgccaaacaaacgatggagagtgaccaggagagctatctaggaaagaggagtgcgggaaatatctggcagacagaatttttgacactgttgagtttggttgtttaaggatgcgccaagcttgttttgcaagcagggcttggttaaaatgaacaagggaacggaaccctagaccgccatcccgttttgacttgcaaagttttttccagctttgccaatgagtcttagggcggttgttttcgttgacaccccaccaaaagttagccataatggactcgagagaatggcaagtagcaacgggaagacgaaaacaagccatcgaataggttgggatggcctgaatgacagatttgagaagcgtttcttttcctcctttagagaaaactttattcttccagttgtgcaggtggccccagactttatcatggagatagtgaaacaattgctttttagttcggccgatgtgctgggggagtcctaggtatttctcgaaggaggagcggaccgggatgctcaaaaagtcagaaattagggtttgatctctgagcgcgacattgggagaaaaatagagagaagatttttgaaagttcactttctgaccggaagccctctcatacaggagcaggacttctttgatggagttgcacgagctgatggaagctttgcagaaaagaaaactatcatcagcgaaaagcagatgagaaatcgggggggctcgacgggctactttgaaacccacaatggcattatttctttcttgttggtgcaaaagggaggagaaaccttccgcacacaagaggaagagataaggggaaaggggatcgccctggcgaatacctctggtaggaattacattaccaactactttgccgttaagattaaattgaaacgaggccgtggaaatacaggcaaagattagatggatgaaacgggggggaaattggaatttccgaagaatggcgacaataaaaggccactcaactctgtcaaaagctttggccatatcgagtttaacagccatccaacccgttttcccttttgatttaagctttatggagtgcgcgacctcctgggctatgatgatgttgtccgaaataagtctgccagggaggaaagcgctctggttgggagagatcaagctgctgaggacaagtttaagcctattagctattgctttcgaaataatcttataagctatattgcaaaggctaataggacgatactcagagatggaagtgggttgcttgactttagggattaaagtaatgagagtggtgttcaggggagccacatcaccaattccattgagaaaacttgaggccgctttaaggacgtcaattttaactgttgaccagttagctttgtaaaaattagaattgaaaccatccgggccaggggctttgtccaggggaagttgcgaaaaagctttttcgatctcatccatggaaaattcttcattcaggagagatttttccgtatcagataaaaaacaagagatgccttccagggctttttgcatatcctcttcaacaggctgggaggaagagaagagttgggcaaaatgagattcgatctcccgagtaatatcctcctcattagaaagaacaccaccatttggtaagtggagcttgtggatagagttgatctttttcctatgggatgcaaatctgtgaaaaaattttgtgttcttatccccctgagccagccattgagtccttgctcgttgcttccagtaagtttcctccttgtacaggagggtttcgagattggcttgaagatctttgatttttgctatggtgctgtcatcccacacaggagaggagcgggccctttccaactctttctcaatcttagaaatgtgctttttgaaattgaaatctttcttatggttccagttgctaaggctcgtagcacatctgtcgagagaagtaaccagattggggatcgcgtcattatgggccgagcagccagtccaggatttatcgaaagccaggctccagttcgggtcctttaaccaagcattttcgaagaaaaagcgttttcttgtatccttttgctgggagcccggggcgggagcggtatctaactccaaagctcgatgatcagagccaaagaaacccaaatgagagagagcggcctcagggaagatattggtccaagcactattgatgattccccaatctaatcgttcttggatgtttctaggggcagccacattgttattccaagtgagtaagggccctgttggctcgaggggggagagattaaaagagtccaaaaggtttctgaagtcagccgagggacccctatcgggattaccgccttgtttgtcatgcgagaaaaggaaagcgttaaaatcccctatgatgagccaagggatatttgggttatccctaccaattcttttcaaaagttgccaggtgtgaggtctttgagagaccgtaggagcaccatagaaacaagtgaggtgaaaagagacattagtaatagcacacgacacataacaatcaaaatgactaatagattgggaacgcaaagtaacagttacatcattagtccataacaaaagcaagcccccacttctacctaccctaggaatttctaaacccgaatcaaaatggagcttgatcttaacatgattgatagcatttttaacaagccgagattccattacaaataacaaactaggattacaagaggacactaaactaggattacaagaaaaaagttattcattatatataaatttgattcttttgcttttaatacttatcataatggttcaatgtcactccaaatattttatttaaaaagaaacgaaaatatatattgtttgtttccatataaaaaataatgtaactccaaattgtatttctgacaatagaaatggtttctctcatttattacattattttatttgaatccgctttcccatacattggatagactttgaattgatgagaactattaccgtctatcaaagtttattatattttttaaataaaaaaaaaaagtttattatattttaataatatacatacaaaaaattatgagtaaatactattttaaaatttgtatttttttaaaacagtataaattaacaagctgaacttaatttttattaattttttttaatatctatataggcaaattaaaatcagtttttaatataaataaatacaaaaatataactaattcataacacaacaaaattaattattattatgctttactttaacaaaaaattcatcacatgatattatttgtactatgttaaaaagataaaaagttaataggattatttcataaatacacaaaaataaaaaaaaatatatatataaatacagtttcacaaaattttaaacatttttacgatttttttaatttt

SEQ ID NO: 104281 - DNA, 680 bp, Cannabis sativa
tttataactgttgggaatacttaattttcccaacagttataaaatgttgggtatactatattcccaacaataattatggccgaatatattaaaaaaaaactgcccctatttccaacattatatattaatttaatttttttataatttttaatttcttttatttaatgggatatatttaagtccttttctattttgtaaccctagtagctttagaaaaccctagcagccacattatctctatcttcattatttctccttctcctcatccctctatctatctctgcgtgtacagccaacaaccatggcctctttggttgaagaaacccaaaaatccactcacctttctctttctcttcctagcagccactatttttttgtccctttttctccttctccctctgtctctctgcgtgtaccccgacggcaaccatggcctctcttgtcgtcggcagctaaaactcccccctctcgatccgtctttctcttcttcggtcttcaatctccacaagcggacaagcacccttcgtaagtccggtctccaccagcggtcttcagtacgtcggacgttcagaaagtcctcttctccttcggggttcctaactgacggcggcagtttgcagtggctgacggcgcggttccattataagctagatctgatttttttttttttgagaattaaa

SEQ ID NO: 104282 - DNA, 554 bp, Cannabis sativa
aaaataaaagaagattagaaaaacatcagagaaaaaaaataaaaatatctaaaaaaaatgatatttaaaatagagaaaattatgcaaaaaaaaaaaaaaaaagctaaaatttcaagcctgaatttgactatcttttgattagatttttaaaaaggtcaaaacataaaagttctaggtctctcttttatctttccggaacatcttgaatcatccgtttccgagtaacattgagagagttatggccaaaatactatcagtcgacgcaatagaaaaatcaccgtcgaaacgtgaaactccaacacgggtcgcggcatgataaagctgggccgcggcccgcccccctaaactgcgaaaaaatcgtctttctctcacgtgggtgttggtggtttcctaattcgaataggaatttaatatgtgcgtttttctatctttttagtccttgaaaacctgtataaagggtgaactggagttgatttcagttaagcaattcagaaggaaataaacagagaatacatatacgaatttcagatatcaactgcaatactggaggcatt

SEQ ID NO: 104283 - DNA, 538 bp, Cannabis sativa
aaaccagtagatacacctatggaaacgaatttgaagctgtcacaaatcgagaatgacaaacttgctgacaaattagccgactctacactatatagaaggataattggcaagctgcaatacttggtgatcactagaccagacctagcttattcagtcaataagctaagtcagtttcttgctttgcctaaagccaaacatttacaagctgctcaaaggattctgcaatatctgaaatccactcctggacaaggaattttcctctctgctgcatccgagatacaattgagagcatatactgatgcagattgggctgcttgtgttgatactaggagatctacaagtggtttttgtgttttccttggagattcaatcatatcttggaaaagtaaaaaacaacaaaccgtttcaagatcttctgcagaagctgaatatagggctatggctaatactacaagtgaattggtttggctgctttcattgcttaaagagttaaggattgaacacaaaggaccagccatcatgtactgtgacaacaagg

SEQ ID NO: 104284 - DNA, 581 bp, Cannabis sativa
atctggaaatataaaaacacaaaaaaaaacacaaaaaaatttaaaaaaaataaaaaaataaataaaacaaacaataaccaaaaaataaaatttgataaaaataaaaaattaccttcggattgttgaacacaccctgaatcaactcactaaactccgttgtagggctattctcccaattcagaacgcgaggaatcttgttgctgattctattgcaaaatcgaggagacaaagacgggataatctcgtacagccaaataagaaatgcaataggaaagcctttaagcttgtaacccttctcaatcatcttcttcttagcaagctgttcaagggtattgttaacatcttttaatgcaatcttcaagtgatgaaaagtcttttcccacaataattttccccatccaaaccgattaaaaacttcaatgtaatcatccccattaaccatagcaaatatgaagttgtcaatctttttcccttggggataaccatacaaataaccagcaaagaagtataaaagggctatcttcacataatcttcgtgatctttcaacgcaccactgaagaaaacactagcaacttccttc

SEQ ID NO: 104285 - DNA, 698 bp, Cannabis sativa
ggcgacagtaaaaatgtaaagtttcgtgtccctttttgaaaatatttggtaaaaaagcagtattttgtaagtttcccttgaaataatccctcatggccaaaatctctataaggcccatgagttagttttttatcattattttgcttgcttaatgaagcaaacttatctttattcagtaatgccatttttctgttctagttttctaaatactaattctatctattgaataattataattagttatcaaataaaattaccatttaaatatatttattaattagatcttccaagatctcttaattaataaataaatattgaattctcttttcttcttaattatgccattccttggtaaaattcacaaataaaacatagtcattatttagaatcctaattgattaaataaattaattaattgagactacaaacgaatagtatcccatttagtgcaggaactatgggcctatgtaaccaaactcccaataagtagttttagaatttaccaagtaaattctctatcttattaatccctcttgaatccaccatagattcagaattgcactcctaattacatagaacgctgtattcatcgagaatatatacgctataattatccattgtttcaatctaaataatcaatgatcctgtatagatgatttacatcgagtagaaacaaatttaccgttttactcttcaat

SEQ ID NO: 104286 - DNA, 681 bp, Cannabis sativa
  modified_base (349)..(351): a, c, t, g, unknown or other
  modified_base (618)..(618): a, c, t, g, unknown or other
cttcactaatggagcttaaattactatagaagggtttttacatccttctaaaataattcttccacccccagagtaaccaccatctcgaataggttacgagttggtgtagatatgaggatgctaatatacacccctatcatctaacatataggtcactttcagagatatttcttgactatctcctaatgttccttgtttgattacatcttagatagctcccactcaacagtaggagtctggttaagttcgaacgtagaagtacatttaacctcttactattgtttctcagggacatcttgttgtgacatattatcttagtctaaaactgtaagttccttctagactaagnnntcaacatagcaatctagtattaatattaatgtaaaatacttgcttaagattaagcaatcattagagataccataaaacatttcatgaggattaggaattttgcctaagtcattcgaatagactatgcaaaattctactatcttattctcaaaattctgataagtcatttctatccatatgaatggttagatttactttctcagttgaatctaatgttcctatcactagtgtcatccaaatgaagatgggcttagaattttaaaattntcccactcaaataaggtactgtgatactatgtccaagaactttattggtatctattttattac

SEQ ID NO: 104287 - DNA, 686 bp, Cannabis sativa
aatagaagattgaatagagttgagagcaggtttttacagattattcaatgtaattagctggttgtttgtttcggctgagggttgtttgacccttgcttcattggttgtatttgtttgttcttgattaatgaagtattttccttcttgatcaaaaaaaaaaaaaaataagtccacacaccacctatgtctaaaggtgagcatgttatcatcattaactacctctaacgatcggtccagcatgtagtgctcaatgtactccatggcaaacactccacaattgccactacaaattaaaaaattagtaaatattagcaacaattaagttaagtaattcataatggagtgcaaaattaaataaattacttaaatttaaaaaaaaaaagagagatttacctgttctccgtttgtggtgcaacctcagaggtagctcgtctataatgtaggggtaggagctgactgagatcaccacaatcaacccgatgtacataattgttatattaaaaataaccgctagctcgaattagatttgcaaatagctcgctgtaaggcttcaaatatgaatccatggcatcctcaggggtagcaccgatatcacaatcatatacaatgatctcctagttgtcgatatccacctcaactgccacctagtggtgctctttggaaaggttcaacacgaagtagatgta

SEQ ID NO: 104288 - DNA, 822 bp, Cannabis sativa
taattacactgtaactgtgtaattagaagtaattgagggattatattttaaaatatagtgtaattaccaccctaataattaccctatctagtaattacacagttgacaattgtccttagttttattgtccttcctagcttattaatttttacagccttcggatgttatcaatgaacagtaaccttggacaaatttcaactgtagagtagatcctacagttgacaattacaaactagttaactaaactagttaatctgcttagcaaactggcttaggttggttcacaaacaaagtggcccaatacaacttgggctaccttaatctgacccattttgtttagagcagatcaaaaccttgcttcaaaaatcaaaaccactagaggtacccaaagtaacattcactaaggcccactgattggcataaattagcaacatatacagttaaatttcatgagtgatgagttgtaaatacgtgtgtattatgtcgttccaccccataccttgaaatgcttacaaaaatatgagcaacaatagaatgtgcataaatcgattaaatccaataacaactgatcgccaaacattagatatttaattatgatcggatcggattagatgttatttttgaatatccaattggatcggatcagatgttggatgaagtgtctaaaaatccattacatccaacatccaattaaactaattagtattttataatgtaatatgtaaaatatatatatacataaaaattaacattaaaattttacttttttttcttagattggatggatccagtctaattcaatacatattggacttaaaatat

SEQ ID NO: 104289 - DNA, 542 bp, Cannabis sativa
agggcataaaacccaacacaacatcccactatctgacactgtaaaatctctgacttgactagttgaaaccccttctctaattttcactaactctggatcagttaactaagcagctttcattcgttctaacagatcagattgcaacgtcaggttgtgaagtttgcccacaacaaactcgatgctagatctgaccatgtcttctactaactgaggtgaaggatgtcacaatcataatccttaaccaactctaaccaacacctctgtctcatattcaagtctttctgagtaaagaaatatttaagacttttatggtcagtataaattttacacctctctccgcagaggtaatgccgccaaatcttcaaagcaaatactgctgcagcaagttcaaggtcatgagtcaggtattattgctcataatctttcaactgatggaaggcataggaaataacaagatcggcccgcatcagtacacaccccagaccctatctggatgcatcacaatacaccacaaagttctctttatcagaaggtagggctaa

SEQ ID NO: 104290 - DNA, 664 bp, Cannabis sativa
  modified_base (378)..(385): a, c, t, g, unknown or other
atcaagtgggtctggctccaagcgccgaagcccccataattgtgattgggcgtctcctcgtctcgaggcagccggtggaaggtcccggaggttgatggttttatgtctgccatcaccacaatcttttcaagctggtgagcacaagtcaatgtggagtggagctcatccgcctcccatctgttagcacgggacttaaagttctcctaggccatgggaccctgcatgacctcctccagggtggccagttgaacctatcccttcttggaagacttagaactagacgtggaagcagacattttggttctgaaaaaatcgagaaaatctagcagttaggccccaaaccaaaccctaatgttcaaaaaagggaatgggggtccnnnnnnnnctggaaagaggccccctctggacgcttgccaaataagaaaaccccaagagattttccttggcaagaatcgggtgcaaaaatcccaaaggcagtgacattgcaaaagaaaaaaagagagagagaaaagagggcaaagccgagaaagcaagatctactctaagccctaaaggcattactaggaaagataaggatgattcctcaacagaaacgtagtaaaaaggagcaatcaagacgcaaaaaaggggaatttaacgcatcatacagtaaactcaggcaaac

SEQ ID NO: 104291 - DNA, 568 bp, Cannabis sativa
tcggttattttgtatccgtaggtggtaatttttttaattttaataaaaaaaaccctacggagtcggttattttgtaataataaccgactctgtagatattttttttgaatttgaatgaaaaatacatatggcgtcggttatttcgtaataactgatgccatatgtctttatataaccctctccagctattgtcttcctcgtaccctaaaataaccagcagcccttcttcctctcaaacccacgaaaccctcgcccaaccacccctcttcccttcatttcttcattttcattcgcttttgcctattttttttaatcttgcatttttcataccaaaaaatatatccccaaaatttgatcgtcttttatttggttttttagggtaaaccgagcttagaggtgggggttgtagcccccggccgccacttttggtggagaaatcgttgaatctcaacgtccattaaagtataaatctactctataataattttcttaatgtatattgctttattttttattttgtaaattttttagggtgtttctatactgttaagattgtgttcttatggtt

SEQ ID NO: 104292 - DNA, 669 bp, Cannabis sativa
aatattgtgttattttacaatatttattttttcttttaattcactgtttgatttttatttatttatttatcaaaaatcataaacaaaatattattttcataaaattattatttattctgattttcttttgagtttttaacattgctatctaatatctcataatacatattgttgcaacaaatgacaattgagatttttgtatttcattcatgatttcttagacttttgaatttagaaaaatttaaccaaatatagttttaatacctccatctattctcttcttaattatatcattttttttacttttttattacttttaaaagaaaaaatctctaattaaactaataataatattagtaataatctctaagaagaacaaaaacaaaaatatttatctaaaagaaactataccaacaaacaacacaatatttttttatacgtatatatcttctaagtattactttttttttaaaaaaaaataaaatatatatctatatatatataacaccttagtaataaatagttttttttttttttttaaaataaactatcaatttataattaataattaaaaaatatctaatcatacataataactaaatttttaaatacatattctctctttaattctctcattttttttttatttttttcctactttaaattttc

SEQ ID NO: 104293 - DNA, 528 bp, Cannabis sativa
  modified_base (268)..(268): a, c, t, g, unknown or other
ttggggcagacctctacagttcgcgaactgaagtccctgctcagatcgcgctctcctgactttgtttttttgactgagctcaaggtggatgctaatccgctggtacgtattctaaaagcatctcatttttattttaatgtttttgtaccgcctgttggtattgcgggaggtattattttagcttggaagtctggattttgttttgagtgtatttcttgctctcgtaaccatatttcggggcttgtctattcggaccccccttcccacncgtggctcctctcgtgtgtgtatggtccgccgtataatcatgctaaaaaacacttctggtcagagattatggccctaggggatagatttggtggtccttggttgatttttggggatactaattttgttctcagtcccttggagcgggaaggatctttgggacgtgaccctttcatccctttcatctctcaactagtggagtctcgtggcctaataaatatgcatattcaaggagatatgatgacctgggataatcatcgg

SEQ ID NO: 104294 - DNA, 511 bp, Cannabis sativa
  modified_base (39)..(41): a, c, t, g, unknown or other
  modified_base (67)..(67): a, c, t, g, unknown or other
agatcaaaattcgatggtttgatatttttaaaattaatnnntatagttaaatttgtttagtaaccantcatgggtaatacccattaagaagtgaaatgaaaccacaaattgaatttctatgcttattaatgtaactacttaattaaaaaaaatatcaaaaaatatcactttttacactatatcaaaaatatcaaaaatatgttcatacaaaaatatttaactcaactttttcttttcttattttgtttgctaaatttttttttttaattttttttaccgatagaacaatctcaacccatatgatacaaaaatgagagatttttttttttaattagatagaaaaattaagcataaaagctcataattttctaattttacccattcatgggtaatacccattaagagtgtacccatatgtatatattaagtataataacataaaatttagggaaatttacatctagagccttaaaatacatctcaattacataaataacgtgacttttaaaat

SEQ ID NO: 104295 - DNA, 760 bp, Cannabis sativa
ccgttggcgcgagaagtatagttctcctgggcaacagggcccttcataacttcctctagagtggccaaagtgggcgcctccttcttagaagatttcgtctcgaaggtaggagcagacattttttctgaaaaaataagaaatccagcagttaggccgcgaaccaaactctaatgttaaaaaaggaaattgggatcccctacctaacaaccgctggaaggagggaggccccctccatacgcttgccaaaaaaaaaaggaaaccccaaggactttccttaacaagcatcgggtgcaaaaatcccaaaggcagcgacagcagaggaaaggaaaataaaaaaaaaaagagaagaaaagaaaaagaagggacaaaatgccgaggatagaaacaagaatcgccctttgccctaaaagcgttatctcaaaaaaagagataactctaaaagaaaaaaccaataaaggataacagaaaggacacaaataagagagattctacgcattacacagcaaattcagtcaaagttatttcctaaaaatttagcactaaacccagacattctaatcatgctatacaaacaaacagtagacaagtataaagtatcctgaaaacttacatgaagtttgagagctgggggttggtgttgatcgtcgatacaatgaggactggcaacggcggaggaagagcagcaaataatctatggtgtctggaattttttctctctgtaaaggctctgagaaaatttggcaaactagcgaaagtaacc

SEQ ID NO: 104296 - DNA, 506 bp, Cannabis sativa
aagttatcaagagaaataccagagggcctttttcttttatctggaagaacaggatttgaagagacaatggacctttttcctttatccttctttggaactgcagcaggaataggaacaggttctgtagtgacaggatcagcttcaggttcttcactctgggatgcagaatcatcaacagcaggttgatctttgagcacaaattcttcacttgaatcggacaagccctctgattaatgatcctcctcagtttcttcttcaggtttggaatccgaggatgagacggaagggggattctccttgagatttttggcctttgaagatgaagacaccacctttttcgatttggatacaattttagattaaaccacttcagtcttttgaggagtggaaaccttggtccttgttcgagaactcaccgtgggcaaagtcaccatagctttgtcgacattaggagcaccattcgaagaagaggacttcgatatgtgtgataggatgaatgagattca

SEQ ID NO: 104297 - DNA, 653 bp, Cannabis sativa
caaataataacacactaaactaagagtaagagaattatgaccaaaccaattaatcaagaggagaaaactactaacttgccaaacaattgatcgatgatgatgtccagcagccatgacatactctgcatagatgaagtcccaactgtaacagtgcaaattaagcaattagacaaatgaaaacagagtgaattccattaccccatgaacaaagaaggaagaaaatcaatgatgatatatatatacctaaagttggtgacgcaaacagagcgaattccggcatcggctgctgcacgacatgcaactggaacaacatctgagacctatatatatacatatgtatataatagtatgagtattttgtaatgtgtgagaatttgagaaaagaaaagtgtttatagcataccactaaatcagctttaatggagttaagccagtccacttctgttgccaaaatggaatcacgaggtgccacagctgtttgtgaatactgaattaaccaattaccaaacaatgagaaacatacaaaacaatcacaatcctaattcattcaattttagaattaccttttccaaagaggcaagacgatccacagtcaatgcatcagcctgaaccgctccacaatctaacagcacctattattattattattatta

SEQ ID NO: 104298 - DNA, 738 bp, Cannabis sativa
aaaatgtaaccatatagttacaataaaaatgtaaccattaaatagtcacccatcttatgtattacaagtaaaaatatagacaagatagagatggtggtggcagtgaaggaagtaaacattaatattacttttattatttttagacacatagggagagcatgactaaatatatatatatatatatcatttaacaaaaaataaataaacataaacataaaagatagaaatgagcaatattaatattattataatcactaaataaaaatatataggtagagcatggctaaatctatatatattttgtatataataacatatatagtagtacagatggatgaataacataaagataaaagtggaaaaaaaaattggattactcaaataaatattacaacaagtgaatcaaacatacaaaatactctttctttacatatggaatcatctctgactttctaaggctgattagtaaaccattatgctcattattctcataaaaaatctagaaacaaatatgagaaaaaaaagttaagggagattttgctgtagtatctttattatcaaaattacacaatttactattaaaatgagcttatatttatagagatataaaatgactaaaaataaataaatgaaagtttagaattattaaaataaatattaatattaaatttgacatttgaaatcaaaaattaaattaatattatttttgttattattgttattttgtcttctaatatt

SEQ ID NO: 104299 - DNA, 604 bp, Cannabis sativa
acttggatcaggatcaaggacccgacccaggcccaaatcatgacctaggatccacctcgggacttgggatccgggactcgatgcttggacttgacccatagtaagtgtttggatctgggaattagaatagaacccgaacccaaactcgaactcaaaccaagacccgcacacatacccagacccagacccacactcgggaaccaaaactgaaacttgaactggaaccggactgggatctttcaaagggatcggggcttcgacccagatcagaaccgaataccgtacccaaccttagaccctaaccgagaccaaaatacggacctgaacctccccccgaacccaaatcaagactcgaacccagactcagacccaaactcgacccgaactcgtaccctgtgacttgaaactggaactgagctagaagcaggacccaaagccagaccctgaccaaaattcgggacccgaaactagaaactgaaaaagaactgcaagaccaggacctggacccaaacctagaaaaaaactcaaacctagccccagacccaaaccgagacaaaaactcgggcccaaacacattcgtgtacccagaacgggaccgagacct

SEQ ID NO: 104300 - DNA, 1825 bp, Cannabis sativa
ttcatgctttaggatactccctgatgcacaccacggtgcatgctacaccacattattatgaacgtcaacaacaagttcaagactggcgtcttcacaaatcatattaatacatgtgcctacatgtattcaaaaatagagtttcaaagagaatttgagaacattcggacaatgaatgttgcgtatgcacaatatttaaggaaattggatttgagaaatgggttcggtcgtactttctaggggtacgttacaatgcaatgaagagtaactgggctgagagctttaacagcacaactaacgacggaagaggcttttcgatcactgctgttgtagcattcctaagatccaaaatccaagattagtttactacgcgaaaagaaaaagttgacaagtggacgaagaccttagcaccataaatggaggaggacttggcattgcattttgagaaatctcggtatttgaacgttgacacatgtggaccttacatgttgcaggttcaccgtggaggatcagttgagactggtgccgtagtggacttgcaggaacaaacttgcacatgcggcttgttccaaatcatgaagtttccttgtcctcatgcatgtgctgcagctcagtaacgaagtattagcatgtacacactatgctcaccatattatgcaatagaatattagaggagcacatatgaaggtacaattatgtcagtttgtgacgaggatgattgggaattgcctgatgaaaagaacatgacagttggagtgcctgttgagaagcaactagtagggcgacccaagaagcaaaaggttggaagaattaagtcaagctaaactgcttgtaatggtgaaaggattgtgataaaatgaaattatggcaagtgtggtaccaaggggcacaatagaagcacttgcacctaccgaggttaaaatgaatgttgaatttaatattattatgtgttgtactattatgtattcttgttgaattattgttggactttgttaaacatttgtggcataaacaggtttacatatagttcgtacaaacttttgtatgtaatatttaaagacaatcaggtctatatcagacctatcgcgttatatagaaaccaccattaaaaatgaaatgattttagtgataagtagattgttcaaataaaaaagcctaaaagtaaagattgttcaacaaatataataaaaaaatccaaagttcatgacaagttttggtagaataaatctacaccccatctctgacaaaagaggggcatatggtcatcatctactccaatgaatgctagatccaataacttatgctcgatatgctctacgatgtacattccacaatcaccattgtgttagtagctatacgcaaaatttagtaaaccatagagaatactaataaattttttaatttaattagtaaaagtatttctaaaaaatgcacttaaactacctcgattatgtctgaggtataactttattatccatgagatcccagtcgaatgttttgacctgacttttggaggctatcatttgagggaccatcaccatggtaatgggtgtcaaaaataccacactggtccaccaatttggataatatcttgcaccaagtgtcttcaattcatcagtagttagagttccaatactcgaattgaagatgaacaccttccacaacttaagattcgccttgttaacgcagattttcgttaaccaaagttgagcctgaatagtgataaacttgcacagaaaaataaaaacagtagagacataaaaagaaaagaatgaacacaaagattttttacgtgattttgcagttaaaattctgcatagtccatgag

SEQ ID NO: 104301 - DNA, 510 bp, Cannabis sativa
attccctgagttgttctcatctttggggatcatacattatcattcatatgttcaaagaccacaacagaattttgttgtggaaagaaaacatcaacatctgttgaatgttgctaaagcactattatttcaatcccatatacctttgatttattggggggagtgtgtgactactgccacttacttgattaacagaacacctaccccaatttaaaacataagtcaccctttgaaattctaaactccaaagttcccaactatagccatcttaaaacttttgggtgtcttgcctatgtgtctactctaggaactgctagatttatattctatcttagagttgttgcttgtgtttttctagggtatcatgtaggcatgaaagcttacaagcttcttgatctcaatacaaattgcatattttgttctagagatgttgtgttccatgaacacattttcccatttgtgtctactgaatatttgccacctcacatctcagattttttccccactaccatt

SEQ ID NO: 104302 - DNA, 647 bp, Cannabis sativa
cagtttaaactgtccaaatctcaggctccagcaactgatgaagatcacacacttatggagagtataccatactctagtgtagtagggagcatcatgtacctaatggtctgtacaagacctgatctctgctactctgtgagtatggtaagcagatttatgggacagccagggaaggatcactggacagtagtcaagtggattatgagatatcttaaagggacacaaactactgggctcacatatggtgcaaattgtaatggagaagaagtaagaggctttgtagattcagattatgcaggagatattgacactaggagatctcagtcaggctatgtttttcaactaaatgggtgtacaatcagttggaaatccaatcttcaatccatagtggcactatctacaactgaggcagaatatatagcttgcactgaagctattaaagaagctctttggctcaaaggaattactgcagaactgggaatcaatcaaagagagataccagttatgtgtgatagtcaaagtgctctccatcttagtagaaaccaagtgttccatgagagaacaaagcatattgatgtaaggatgcactttattcgagatgtaatctcaggaggaaaaatcaaactactcaaggtttcaactgatga

SEQ ID NO: 104303 - DNA, 803 bp, Cannabis sativa
catagatatggaatctatagctccatccccaccacgtaattaagaactgcctaatcccatttgaacgtgctcctatcacaatcatgacaattccaatagaatatctatggagcagatgttcccagaaccacttatttttgagtgtacacttcagcaaagagcttccatcttcctctcaataagtgtaccatggcatcaacttgctgtattccaaataaaaaagtcaaaaacaagtcgcacatagatcgcacaaaaatcgcacaaaattaattaccatagtgtgagatcgcatgaaaatcgcacaaatatcaaaaaagtaaaattttatagtaagccaacataaattgcacagaagtcgcacaaagatcgcattaattttagagttttaaatcacacataaattgcatagacatcgcacaaaaatcgcatacatatcaaataaattaaatgtggagtaaaattgtatagtaatcgtacacaaatcgcataaaggtcgcataaatataaatatatgtcgcacaaaagtttaaaacaccaaatttgaacagttaagaaacaacttacagcatcatcgagccattctccttgcaccatcactttttgtaatatcccgaaaaatataatgataattaattgggcatattttattaaatatatgattatattaatgttggggtaagattatgatcttacttaagctaaatgtgtcataattagcaaaaatttaataagtgattaataaagcgtaatttattaattacggagattttattggactacgggggtatcgtggaaaccatttt

SEQ ID NO: 104304 - DNA, 980 bp, Cannabis sativa
atattttataataatatctttacacagtacatcttttttcgactgattaaatactaaaagttagatttttattagttctgttagtaccaatctgttaactgatgattgcacttagtaatactaacaaatatcaacatattattagtccacctcaatttaaatgcgatcatatcatatcgattcttttttttaaaaaaaaaaaacaatcagatggatcttggttcccccactctctctcccttccatgtttcctctgacaagctcttcttcggcgttaatggcagatcgtcgtttgcccagaaccaccgcgacattctcgctccctttctctttcgtcttccctccaacaagtttgatgtgtgttgtatgccgtatcaaatttactattatttttattctaatatttttaattattttagtataaaagtaaggaaggatcgatcccaggagggctatgtttattaaattattcaataattaatgatagaaattaaaaaaaaaaaagaggagtttgagttgcaaatagcataaaaagaaaataaataatgaatgacaactaagattttaaaaatagttaagaattactctctaccaccaacaatcaatcaagtacaataatgataaacattatattttattttaaaattaaactattaactccgcagataattacttatctcagtttccctattacaattaattacggcgaagcgctcaataattaaatttttttactaagcagtagacccacaaagcatccaatctatttaacttagaaaaaacattaaattctatgaagacaagttaatctaagcaacaaatcaatttagcatataaattcatttaacttaggttatattcttcatcacaagtaatgatacctatcacaatacaattaaatacaaattatcactcaaacctagaatcttagactattaggtgaataaatttttttgaaaggatagtagaataatataaaa

SEQ ID NO: 104305 - DNA, 3022 bp, Cannabis sativa
  modified_base (2942)..(2953): a, c, t, g, unknown or other
  modified_base (2994)..(2996): a, c, t, g, unknown or other
aaatagcatgatgagcatattattcttgttatgatttatactgtcttgttgggcttggctgacgggtgctctactgtgcaaaaaagggtaaggctttagctgattaaccatgaattcaggagctggccaaagaatttacatgttcgagccacatcaaacgaagcaggttaagggtctaccagtgatgtattttgaaattccattttgccgcttaggccggctgaaagaaaaagacttgtaataaagtttgtaaatatttttgggatcccaactgtagtaaagtttaaattattacaagttttattttcattctatttattataaaagtttaaattctgcgctattttgtttagtagtcccatttaggggattagggtttcataagtattttgggtagtgtgcctaattatttagggcgttacagtaagactttgaagaatccaacactcaaaggagaattgggctcagatcttgataatactctgcgtcagaaaggaaaaagggttagagatctgagcggaaggagacatataattttgttgccaccaatgtaaggtttcttaactttatatgtatttagttctattattttagagaattcatatttagggtgttaaacaacatatatgttagtaaatctagatattggtaaaataattctcaacaggtcgaacctctataaattactgtcgactttattattagcttttacaatttacacgtggtgattattagtcataaataaggctccgctgttagttgaccgaatctgaggtcaaatacacctataaaaggagagatcccttagctcatttttcacattcagaatactacccacaaggttagaacttctctctctagaatttggagcttttgacacttggtctattactgtaattaccatctcgtgagaaataaaaactcaaagtagacatagcctcattactatcgcgatatagtgggtaaagtactataaatttactgtgtctctcttataaatacttagctactttttcattcttgccaatctagcgagcgggtgtggcttaaaagtttagtctagatttatgagtcaacaagaactatgattaatatggatgaaaggttaaatattaatatacaaatgccaacaaattttttgcaataaaatagatagagtaacctcagtcaaactagtctgaaacagtaaaagatctattgatactctatttataagcaaacacagtagttatatgaattagttcgactacaacgcactatgatactttaagaataagtcaaagataggaattatattttattttaaatgaaagtgaatatgtttatttcctgcttattaattaaatatttgaaaggtggggagtatatatgtttcaaaatatttacattgattagatcaaaggtaactactattctactcctataaacagcattaaaaactttgtaaaaacggacgaccaaatttctaacagagagaattttgccaaattgtaatctcaacaaaggaacttagaagtaataatgactcgtggagtacgtagattttaactaaaaaactacgtaaaaatttctatcttcttattatagttcatagtgagataaatatatatatgtatattatatatttaatattaagtattaattatcaaacctcatttatgttagcaataagagcattactattagatactttatggtacccaataccatactcatatggcgtgtgttaagaaactaataacagagtaatggttctattagctgatctaatcaggtgctaatgaccaaatggttccaggaggttcttattttcattttactattttgtcctaatctattttgttagtgtaacggatatatttcttgtaattggctgacacctgttgtggtcccaagagtatttccctctgctttaatatttctctgtactaacctctgttataaataaagcaatagaacagtaggcctatttgagctgtctgcctgcaatatacggtagcacacacctttccctttgtttctttacttggtatcagagtcgactaggcctgccccatgtctactggcaaagagcagactccagtcagagggaatcacggaaattttggtacaaaaggcctatatcagggtactcaaacacacggtcaaaccagctccccacaaatcaaaaatgggtccaatcaaggtggtgcttcgaatgctttttgaggattcagctgtgcaccttttggtaatactttatctcagccttttgctttaaaacttgatagacataactactctctttagagaactatggtgtcgactattatcaggggacacaggttggatggcttcatcaatgggattagaccttgtccaccagagttttgttgcagcaggcatcccttctacagacgacacacccggttttggagtgcaactcaatcccgagtacgagcaatggatcatatgtgaccaacttttgatgggttggttatatggttccatgactgaaaacatcgccactgagatcatgggatgtaactctgctagggccctgtggattgccttagaaacctctatgaagctcattctaagtcaaagatggatgataccagaactaagctgcagacagtacgcaaaggaagcacaacaatgactgactacttgagacagaaaagaccatgggctgacatgcttgctttactggagacccatatcgtgaggcacacttagtgtcaaatgttttgagtgggttagatgttgaatatctaaccattgtttgtccacttgaagccaaaactaatgttacatggcaggaactccaagaaactctattgagctttgatagcaagctagaaagactcaccatagggtcatcaagtgggaagaacaacaacccaattggttcaaatccgtcagcacatctggggaacaaactgttagaaatattttaccannnnnnnnnnnnactaccaagtatgtttcattaactgttgggttttatgcccnnnataaaactctttacaatctgattagt

SEQ ID NO: 104306 - DNA, 715 bp, Cannabis sativa
caaacaaacagagcaaaaaaggatttttactccaagtctgttgtgagatttccaccaaaggcattcgagcagctttgtctggactacagttaggcgtcaaacagtgagtaagttttcaatctcctcctcttttaactttgcatgtttaacttctgagtttccattgtagaatatacatgcgttcttgacttgttgtagaagatagatagaaaatctaggttcaaaactttgtgattttctctataatagtcagtacggcttcatagtctatgacgtttgcctttaaccacacattgtttgtctttcaccttgctcattcgaagcttcgtgaaatttaaccctaaacccaaaaatttcaaacttttaggttttgacttgatttttgtacatttttttttatccttttaatctattgagtactcctatttggcatatttgtctgtttactgttcgatatcccggccaaacacacatctcgtgtgttgtcttttgtagaggaaccctggtgagttttagggaagcgaataccgaatcgaccaggacttgcttaaacttctgtacgaggatcatcctcatcttcgcgccagtcagtcctcttcgagtgacgtactttctagctcaagctttaaagattgagaggtgagtagtgatcgttctcctactccagaacccgtagttgttgtcgagtgaatttcgcaacaccaaattatatgat

SEQ ID NO: 104307 - DNA, 1069 bp, Cannabis sativa
tggaggatctcatactactgacacttgccctatagatatagacaattttccaatggagcaagcccaagccattggaaactatcaaaataattatggtttcaaccaagggagtcgtcaacagaacttctaaaaacagtttcctaatcagcaacaacaaggattttatccaaagaaaaatcaatctcagtaaagacaacagtatcaacaacatcaagagtctagtggagggtctaatcctcaattagacacgttactgcaatttatcacggagattaagtcttccattaaggtcttggaaactcaggtggggcagttggcttctcaaaacactaatagggctcaaggtaacttgcctagcactactaaagtcaatccaaaagaaaactataaggcaattaccttgagaagtggtaagaactatgcaaggccaaaccaagacaagctagaggatgaagatgatgaagaaccagtaccaacacaaaaggagaagaagactactgacggtcttcaacaaaaagaaactccatctcctatcagcattgatcatcatatcaaaattccctatcctcaaagacttcacaagaataagctggataagcagttttcaaaattccttgaaatattcaagaaatcgcacatcaacatttcattcatagaggctttggaacaaatgccaacttacctgaagttcatgaaagacattctatccaagaaaaggaagttggaagaatttgagatggtggcacttactgaggagtgtagtgcattcttgcaaaagaaactaccacccaagcttaaagatctgggtagtttcaatattccatgctcaataggggtgcaatggaaataaaagctctatgtgatctaggagtgagtattaacttaatgcctctatctgtgtttaaatgactaaaattaggagaagtcgaacccacaacagtgactttacaaatgatagaccgttctttggctcatccttggggtataatttaagatattttggtaaaagttggtaagtttatcttccctgttgatttcttaatacttgacatggaggaagatgagaata

SEQ ID NO: 104308 - DNA, 1097 bp, Cannabis sativa
gtgcactaaaaaggagaccgcagctgttggggactcgaacatgcgaaatctgaagaggggagatgtattgcagctggaaaggaaaggatatttcagatgtgatgctccctacgttaggccctcaaaacctgtagtcctactttcgattccagatggcagacaacaaaccggtttcaagtaaagagcggtggtaagcacgacggtcagtggctcttttcatttcccagtataagttatcattgaggattgttttatctattgtatcaaacaaggttgtgttagccagaatttgagtcatcagacaaagaggtccattgatatgcataaaatacaatttgcacagctgccacttttgatgtcaaacatcatttgaaaagttttgttagtttatttatttattttttttctgaatctgcaagcatgaaacagtacctattgcattacctttgcttaatttaaaattcatcattacatgttctcaagactaaagccaataatgttcttaattaaattcctcaacttaatatcaatacgcatttgagctgtcattctcagcttatcattttttttactcaatatttttttattattaaggaatattagtttaaattatttatgagtcattttttattaaagtttctcatttatttgcaaatacccttctaaattataaaattaattaattagttaatattggcttaaaagattaggttgtgggatgggtggggaagtaagaatattttaagagctaacaacatgattgtttgcatctgaaattcaactcttaaattttagattgtaattgaaatgcaaatatatattattaggatagcaataaataaaaaaaaacaccagtaaataatgtatgtatgtagtcatccaaatctgttaattgttgaaatattttcaataaatgaggcaaagacgccttatatatagctaatgcttcccctaaaatcaatcccaggtactatttgatgagacacattgatgattttatgagggtaaatactattttggaccctctgttttacaaaaattatcaattggaccctgtgttttgttaaatgataaaatggactctgtattttctaaaa

SEQ ID NO: 104309 - DNA, 7400 bp, Cannabis sativa
  modified_base (295)..(297): a, c, t, g, unknown or other
aagcgacaagtagtttataacgattgaaatataataaagcaaatatgaagacacaagaattttatagaggttcagcctcgagcagttcggtaatagcctaatcctcgttatatttattaactgaagagcaaggagaaaggttccttttcttatagctcttataacaatatctctgaatatgaattcttagacaatatctctcaagtaaaatctttcgaccctttgcccattgaatatgcatcactatttatagggctatgagcttggaggggaagtatttcccttctcgttacannngatataagcagaaagattgcatagtaaatacagaatacactgatcgtgggatttggacaacttgccatatctctggaatttgatccccaagttatagggatttctttgatgactcacgatgcgaaagcagaattcgctaagtgttggtccccctgtgcagattgacgattgttttgcttcgagcatgcatatgaggtatcctgttcggactatatcctgcgagcagatactcggagtcgattacccgtgttaccatcatgtgatgccacgtcggagtgcaaaaattgggataacagatccaaacttgagttcgaagcatcattctcagtctcattcgaagaaaaatcaatgagaaatccctcattagccccaatagctttggacttctccttgcaaggctcttaggtaggaggagcagcttcaataggtttgtttacctcagatttggtcaattgatagcggagccttatttatgattgaaatcaccaagtgtaaaaaattaaagtaagtaaagaaaataacattttaattttatagaggtttcaccccttgattagtgggtaattacatactctccttttacttatatttattcgagagataataccactcaaattacaggcttttagcttgtaatttttagtgtggcttctatgaatattatagtaatgggaacaatattaggcagatctcaaatgagtgagatgagaaatagacttagtctcttatatgctacaggtggcatgttagagatagagagaactagggtttcgagagttagaactcaaaactgaggataagaacttaggtttttagtctggcatattgctctttatataggtgagagcttacaaaaggtctatttcaaaacatattaatatcccttaaaataaggagatattacctctttttcttatatttaatataaaaaataaccacttaattgctcctaaagaataggtagatatttggagttgaacccctatttttgtgggttttcggagtggtttcacaatagagagtgagtcatggtccatccaaggcacagtctacaaaaacactaattatataagcttctctctggctatcattatagaagctggctaacctaccctttatctagggatggtcgacacatgattttccttgcccgaccagaccctcctagttggtcagtttattatatcttcattctactcgagcattcgaaccattcgtcaattggtaagtagttcatgatgacttggctcaccaatacaataggctgtactccacgtgacatcaatcttgcctatgtggacatgccacgtcatgtagggaaaaaattaggataacattttccccctaagtccctgtgcagacgtttgtacagatagggactttccaattttagttttgactgttaaagtcttaacaaggcatcttatggctagttagatacttgggctctcatctgactcacatcatcacaaagaatgactttttttttttcaaatcattatgaattttttttgttgctcatgttcccactagggaactattggtcttctacatggccattttgtagcgatgtaactgcccactacatttttggagggaagagcatgagagaacctatataaggttcatttggccatccttcatccccacacttactattccctcttagtctctctctcttcaaattctttttgagaaaaaacaaaaaggaactcttcatttcccttagccacttgatgcgcacaaggtctccaatccctgggatttttgcttcatctcgatgatccaagctctccacaagcatcctcagtggacttcattagtgtgtaagctttcaaatcccattttctacttatttcttaaattttccattgttgtgttgaagccttttcaagctttttacattcttgattctcacattagattgtaatcttttttccattatgatccgcataatagctttagaatgcataatacatgatttcttcatgaaaaagattcaattttgagctttattttgattcttgagtctttgagccatgaagaacacaaagaacacatttgagtccttcaaaaatatatcttttcaatccataggacaccttggtcaacctttggggtctgtttgtgatcctggccggcacatggtaccatctagggaagctggtcgattctaggcttaagcctagaacccttggcggttgtagcataggtcaggtgccctggctggcacgtgctaattccttaggaccctggccgacacatgacttcagtcccaaggtaatggccaccttttggctcttttttgaccctagcaagcactttattatggccttataagcctgttcaacccttgcccattgcttaattcccttaggaactctgtatggcccttctagggcgagtctattttaatgaagtaatcaacttaggaatcagtgttcatccaagttcttgaacttggaacccgtactttgttgattccccgctttgtacaatagaagtgtctggctagtacccttaggtttagttgactagtatttcctctaagtcttgtcacttggtctagtttctcacctccccttgtctttcgtatgcaaatgaactagcgtgacttttagggaggttacaatcgaatagacaaagatttgctcagtcttctctttgaagaccaccatctagttggttttttgagtagtttctccagtgatcttgaggctagcagtagtggttccccaaagcttgaactctagcctcatttctatttgaagcaaacgggttgtgaatttcacgattgattcatctgggacttgaaccagggctggaggcagttcctccctagtttgtggagttatattgtttaggatggtatgccaaacacattgcccacttgttggacaactccatcagtgagagatcgtcgcaaagtctacgattactattgctagaaacaacgagtctatcatgtggagggattgaggtaatcacatcttatcccttcctgtggagaggaggcacatactcagactgtcttgtgaggtaaactttcaaaggtatgttttgtatcctcctattcgtagcactgagggagtagacggtccttctggaggcccagatgacaccccgatgacaaatgagctttggccgaggggaaggcctacagttgagtcagatgatgacgttcccattgctatacttgccaataccatgtccaggagggatcatgagctctgattgtgtttggtacatggagctactactggtgatgcctccttgttgataagacccagaggcgaaggctccaccaggcctgctcgtccatcgcctgtcactagaaacaaaggcaaggcagccctcagtgaaaatagctcagatgactcctcctcctaggattattgtcccttagatggtagttgataatacaaactttttactttttcatgcatttaataatgatgacttgtattctgactttgttactttctttttgcagacatggcttctaggataagggatttagcaagagagccttctagtggcgcttcctcaggtcgtcctcacaccaaggtggcctggaccaccaaatcttccaatgctacatagtttacattgcctcctcctcctccagggcctgttctggccaactagccagtgattatgaatcttccgcaaaggagaactccatccccttgtagacctttaggaaagggggcccaaaggcctatttggagagttttctcatccatgggtgagaggaggacagaagaggttgctcaaaattacattggcagaatcttgccaagcattgactgggagctctaggagctagaggcctagcagttggagtgcttgacatccaacgcccttagggatttctcatttgtatgttttatatataattttacttgaaagactaaatcgctagcggctggttagcctatcgaatcttttggccagccaaggcaacaccttttatgaagttggtcgaccagtagactcccttggtcggcctggttggctccacttctaacttgatttttcttttgttttcatgccatgctgaaacttagcctcacccatgcaagggcctagggctctgttggtgttcaccagaagaagttggaggccaaggaggtcgagcttaaggtaaagaaggatgtgcgcgctcagatacaggctgagctgtctacttgcctgagagactcctaggacctaaatgatggcccaaactaactgcttggtcttcaaaaccaagaggtgataaggcttgctgccgagacctccaggttggagaaagagcttgagaaggagcgtcaggagaagtaattggcccttgatgggtagtaagccatcaaggacaaatatctgggtttatcctctgaggtcctatatgaggtttatctgcacaaccccaatgtcgatctagggtacataaggtctcccttccgcgagagatcacttgtcaggggatggaattctatcagagtaggttgttggaaaatcagacctgctaagggacagaccaagttactaggtaggctaagggagcactgtctggccagcctaaagaggttgtggctagcaagcatatggagttagtggtaggctaggttgttgaggccatggccagccaatctgctgaggatatggttggccagcctttaggagaccacgtcgatgctgtagtccaaggtccagacaattaaagcccacctacacttgcacatgattagacactttttgttagttgttcatgcttttattttgcattactatcatgttcttgtatgtcctgtgggccttttacttttaaacaatacttgtatatgtacttagggtcttttttattttggacacatgatcggccatgttgtttttaatcatggcttttatcttctttttgttagatatgcaagtatccagatttcttttatctctactctgaagtatgcctttcagaacttattagctttcaatttttttcttatacaaagctttaaattttacttaagttcagttgtgcttgatcaatgccccccatgtaatcaagcagacatgtggtctcttagtcacttgcaattcaccaagtattatagaccttttcctgtgtattatctttgggggacctattgtacacatgtggaactaaaaataaagaataactttaagaagttatcttgttagcatgttgtttgacaaaactaaaacaccatttttattaatcaattggtcttaaatatgtgtttttgctgtgcaatgtacatttattgatactaaaagctttcaaaaataaaagtatatttctagagctcatatggctacccctacccgacatgctaggtaggggccatcattgaagagtgatcttagctctttctagattaactcttataaatgagttgacaaagctactgctgaagagtagcactcttacaagttggtcattgatagcactttttgagatgtgccccactccaataccttggtaggggacctaactccaagttctcattgtatctaccaggcttgtaggcacccttacttgttatttttgtaacttgataagggccttcctagtttggtccaaacacttctactgcaggatctttggtgttcaagaacactctttggagcactaagtctcctatgaagaattttctctccctcacttgtttgttgaagtacctggcaaccttctactagtagacctagagcttatggttggcttggtctcttctttcctctattttgtcaagggattatgccaacaaggggttgtttatttcttggtcaggttatcctcctatatgacggtggctccagttctactggaaacattgctttatagccataggataatgcaaatattgtttgcctaatggctatcttctcggtggtcttgtgtgaccagagtacctctaggagtaatttaggtcgattgccttttggctcttctaaacactttttcaaagtttttttaagggtcttatttatagcttcccctgcccattcgtttgagggtgagcaacaatggagaagttttgtctgatgttgtgtttgttgtagatgtcaatgaacatgtcacggtcaaactatttcccattattaaacataatcttttgtggcaatccaaacatacataagatgttgtttacaaaaaatttgaggactttcttagaagttattatcgctaggggtccagactctgtccacttagtgaagtagtcgactgcgaccacgtcatatcgtacacctccttttccgtttaaaagttgattgatgaggtctattccccacacaacaaagggccaaggagactgcatatgtgtgagctcatttggtggagctctcgggatcttttagaatctttggcacttgtcacatttttttgacatagtccattgaatcctcgatcattgtaggccaaaaatacccctattggagtatctttccagataggctttacccctagcataattgccgcaaaagccttcatcgacttctatcaataattacttggcttttgtcttaaagacgcaccttaggagcagcattgagaagcctagtttgtacattactccatctaggattaggtacctagcagcttttctcctcatttttcttactttatttttgtttttaggcaaggctctagttcagagatatgctgctatgtgtgtcatccaagttggattgtcatccaacatatcaacctctttaaggaatggtcaacaaattttccttatcggttatggtgctacttgctagacacgaaagtgcatcaactattgcattctgttctctgcggacttgccttattgtatagcctttgggtcaacttaatcagcattggattttgcttaaataggctatcattctttcaccttgggctgtatactcacccaagatttgatttacgactagttgagagtcactgtatatgttaggtggtcgcccattcttcacgcgctagcttgaggctactgatcagagcttcatactcagtcttaattttggaggccttaaaaccaaacttgatttccctatgcagtcactgcccttaggtgtaatgagggcaatgcctgttaggctaaaattagtct

SEQ ID NO: 104310 - DNA, 534 bp, Cannabis sativa
tttactcattttaacaacaagatgacatcataccactgtcagactaccatcgggcctgacaaaaaaatcagttttttgcccaaaactcaaatctagcaattttcaatcctaaatctaacatctactcatagattacaaacattaatcatacactttattcttttgacaacattgccgatggtgaagctgtagttgatggagaagtcgttgggtccgcggtcatggtggtcgtggagagaagggtccaaggtggtgggttgtgggtcgattatgtactcctccgtgtgcgtgtttacagagagcgagagagagaagggggaaagagagagggagagggctcttcaaatgagagaggcagaatgaagttttagaaaaaaaaaatgacatattctactaatattgaatagtttagatttagaaaaagaaaattggtccaataaatacataattagtcaatttttcctatatatatgactctttggattatcatctttcaactaatgtttactgaattttactctcttaaccatcata

SEQ ID NO: 104311 - DNA, 830 bp, Cannabis sativa
gtgttagtatagtgtaggatatcatggtagttacaatgttaccaacacgagtacagggggttacgtcgtgcatgtggtacaacacttagtaactcccaagattaaaataatggctctaccaatacaagtacaattttggaactttggtgcatatggtatagtggtcgtacttcccttaagaacgttcttaaccattttgtgagctcggttttggggctcaggacggcttaggcataaagcgcttatataagtattgtttatatatgttatgcatatcttactgagtttgttgactcatcagtttgctacctcgggtaggtaaaggaaaagctaagctggaggaacagtgagatggagcttggcgaggattgtacttatcgcggcagtgcaacctggagggttttggttttataacattttgagctgctctatgttttctaaaagaaaaatatgttacttaactttatatatgtaaatgtaatttgcaactgtgttcaaatctcgggatcccagcctataagcttatataattataatataataaagttagtttttaggtttagtaaattttcaaatacgggcgttacaggttgtattagagccaccaggttgttcactcaagatatgtacaatcaaggccaatgtcgagctcaactcacagttccgtaagctttacattttgcaaactgtttaagatatataccatatatgagtaaattgttgttttaaaaccctaagtgcggtcttgaaaatattttgaccactgtctaacctacatgccttgtgggtttgcaggctaagtcctaagtaatggacgcccaacgaaacgt

SEQ ID NO: 104312 - DNA, 1063 bp, Cannabis sativa
gatgctctcatctcatccaacaacctaattcaaccaaaccaaacctagtttcattctctgataactagtagatgatgagacaccttctatagtgatttcaaccctcattcatagttcttcatcaatcgagccatagtgatagagtaccatgctcacacatagcaagtcaagtacccaatcatagtgtggaagacggtggtaaccaaacccgaaggagtgaaggagatctaggctcagatcttagtactactctgcaacagaaaggaacaaggtttagagttctgagcggaaggagtcatattattccgctgccatcactgtaaaattttctaaactcttatgtgtttaatttcaacgtattagagaattcatatttatgatgttaattcaacatacatgctagtttatctagatcttcgtaaaataaatttcaacaactagcctcaaaaccagggtaatgatttactttcatgaaatatggtttcaaaatgatgaatttgattatttggatgtgttcatattggtttatgtgtgattagatgattgtatttgaattacgacatttttccataaaaataattatattttcgttctgaaaataatttatttagattccttgtgaaaaattaagtaatttttgtttttacggaactcaatttcgataaaaaatgaaagagatatgaaggtttgaagttttgggtccaagtggtgtcgagcatcgtgctcgctcgcacttggaactcgaacaagctagagggtacgcgcgtgtggctttgacaaaatcttgtctaaagcctcgatcacacgcacattaggacacgaggatgcgcgcccagcaccctgctagcagggtcttccacgcgcggatctgcttatagtaattcttcaatacctcgtagtttcaaaacttattgaggatttggtcctgagaataattgtctatgacgacctccttgattatttgctccccacttggtatcatttcctgggttacgttctcgaatggctcatccatcagctccactacttcaagatcgaagacatctgacatgatggtatggct

SEQ ID NO: 104313 - DNA, 539 bp, Cannabis sativa
ttttcttagaaataaattataaaaattggtagtgttgttatttatttgaacatatattcatccactaaatggttgcatcttaattgtaaatgtattttttctatttaaaatatatgatataataatataaatattatatataagttttattatatatatttacataaaatattatattacattttaagttctatttctttaaataagatattttattatttttgtaaattgtggtatttttcaaatttatcacttttgttatgtgtccataaaaatgttattattaaaaacttacaaaattgcaatctttattccaggcccaataatacaagagtctaagagccaagtccaacaatagttacacaaaactcttctctcttcacccacagaatggttcggcccatgaagaagtgagacaaaaactcacacaatgaaccaacaatggttcggcccgaatagaagagatcaacccaataaagaaatgaaaccctaatttgaatccctaatataataagcaagtatatgcagggtaagaacta

SEQ ID NO: 104314 - DNA, 2334 bp, Cannabis sativa
acttaaagaacatatggccatgccacctatccaatcccaaccaatacacggggaagacatgtaattatattttgctatctttgagaacgcagttagtgctactttggtccgagagaaagaaattaaaaaatctaccaccatatattacgtcaacaaataaatgataaaggctgtagtccggtaccctttgatcgagaaattagccttcttcctcctgatagcatcgataaagttgtggctatacttttaggcacatccaatcaaagttttcaccaaccatccactccgataagtcctacaaaaatcagaagccctaaaagactgcttaaatgggcaatggaactgaatcagtttgacatccgatatgtccctcacatttcaattagaggacaagccttagtagatttcatgatagaatgcagtaaaatggaggcaaccaccaatttattagatctagttgttcctgcatagaaggtgtatgtggattgtgcgttaaacgagaatggattaggagcaaggataacaatgatatctcctaaagggttgaggcttcaagcttccttgagattcaaatttccagcttctaacaatgaagtcgagtatgaagccttgctggcaaggttgaaatttgataaagttatgggatcccgaaaaatagaagtcttcagtgactcccaattggttgtcaaccaaatgttgggagaatatcaaactcgcagagaaaatatggctacatatgtctctactacaagggaattgcttcaagaattcaagagttacaaaatcaaacaaattccctgagaaaagaatgctcatgtagactgcctagccaagctaacatcacattgggaaatagaaaaattgggggtagttcctatcgagtacctccttgagccaaatatcacactcaaggccgaagttgcgacaactgatcaagtaccaggctggatggatccaattatcaactatttaacaaagggagtgttaccccaaggctgggcggtctgtaagaggatctagtatcaatccccttttacctcatgatcgaaggcatcctacactggagaagtttaagcatgccctacttcagctatatctcaaactatgaagctaaacaaacatacaagaaaatccatgaaggattttgtagagaccacaatggtggtccaagcctctctaagaaagtcttaagacaaggctacttctagcccactatgaagaaagattcatagactatgtctaaaagtgtgacccatgttaaaggttcacaaacatcccaagggctcctccaaatgaaatcactttaatgatgagctcattaccctttgcagtatggggtattgatctcattagatctctcttgacgcgaaaatgcagagttaagtatgcaatagtggtagtagattacttcacaaaatgatcagaaaaggagccgatgaaatcgataacggccaagaaatccttggattttgtaataaaaaacattgtctattggcagggactatcccataagatagtctcaaacaatggcaagagatttgattctgatgcattcacaaagttatgcgagaaatatagagttactaaaagtttttccacaatgaaaagaccctaagaaaattttcaagcagaagttttgaacaaaatattaagtcaccctcaagaaaaaactcttggcctacaaaaacaattggccagaagatttgccacgagtactctaggcatacagaaccactgctctgaccaccactagacattctccattttcaatggtatattgatgtgaagccatggtccttgtggaaagtacaatccgctaccacaaaagaactacttacgatccacccatgaaccaagcactactacaagaatcactatatctcatagaagaactccaggaggagtcccaaatacatatggcaacataccagaggaaggtggcaaaacaacttaacttaaaagtcaaagattagaagttttcaatattggataactagtcctaagcagggtattccctgcttcctaagatctgggagtgagagtaataggcccaaattgggaaggaccatacaaaattgaagacgaaataggctctgagacctacaagctaaaacgtatggatggatccctactcctaagagcatggaatgtcgatcacctcctcaagtactatcaacagttaggagcttagtatttaatttcatctttaaatttttaagttaagaataccttttgtgaactaacgacgtaatgtaatatccttttaaattcagactaagtgacccaaaattattttaagccacttaggatgtagtgaggcatatatgcataagc

SEQ ID NO: 104315 - DNA, 1973 bp, Cannabis sativa
  modified_base (604)..(610): a, c, t, g, unknown or other
tccggcgttttttagtccgaaaggcatgaccaggtagcagtatacccccttatcactcctaaagctagtgcattcttgatccgcaatgtgcatcttgacatggttgtagctggcataggcgtccatgaaggacaatagcttgaatccggaggtggcgtccaccatttggtcgattcgcggtagggggaagcagtcttttgggtaggccttgtttagatcggtaaaatctatacatacccgccgtgttccatttggtttaggcaccaacaccggattggccaaccattctggataatacacatctcggatcatgccactagttagtagcttgtccacctctgtctccagggcttccgccttcactgggtcgagaagacgtcgcttctgctgaactggtggcatatttgggttaacgttaaggacatgggttatgacatgggggcttatgccgatcatgtctccttggcaccacgcaaaaacatccgtggctgcccttagcattttaattattttttctttttcctccggctctagactctttcccagtcggaggatcttggtagggtcaaggtcgcatactggcacttcctcgacatcctccatnnnnnnnacaattttttcggatcccacacggggatccaactcatcttcttccgccattcccagctcgataacttcacggaccatcaagattggtaagtgggccgcaacattataacattgcctggcctctccttgattacccctcatggtccctactccagcttcctgagtagggaatttcaaacacaagtgccggattgatgtaactgcgccgaactccactagggccggtcggccgaggattgcattgtaagcagttgggcagtctaccaccacgaatgtgtaatatttaaaagtgctccggggtgtgttcggacacaaggtgtccggcaacctcacttttcccatcgagataagtgtagttccattaaatcccgtgagttgggaaccgcttggcaaaagatcccggtctgtgaggcatatccccgtgaagccttctttaaacaataaattcacaaaattcccattatcgataagtattctatccacaatcgtgttggcgatgggagtctctatgaccaaggggtcatggtgaggaaaacgcaccatctttgcgtcttcttccgtgaatgtaactggttgatccatgagttggggcctttgagctgggagctaagtaacttcccaaacctcgctgtgtttaacggccccggcgtagcgctttaattcctttcgagtggtccctccgatatggggccttccagagatcatagccactctttcattgggtcttagtggcaggtcgggagtctgctgaggttctcctgggggagcgactggcgctaacgctccgggcgcaccccctgacgtcccttggggcaaaggtccccctgccgaaaccgggttgagatggggcagccggttcttgatccactcatagagatgacccaatcgaatcaagttttcgatctcatctttaaggtttttgcattcattggtgctatgtccaatgtcgttgtggtgctcgcatcttttgttgggatccctttgaaagctatctctatacagaggaggtggtctccgatagtgcgtattttgccttgtggcaaaatacgcatgctcttgggagtccctcagcactgtgtactgagtgtattggggagtatacccccttttctgtcgcttgtcctctgtccgggtgctaccttcgaggacctcttgcgtcgagagccttgagaaggtccggctaggcttgcagcaagagcagagtgagacgggacttgtccgctcattcctgaaggattcccatagtgcgaagatgtgggagccaatgcctggctctgattatatcctggggtagcggagaattgtataccgctcatttgtggagtagccaaaggtagtgttcccaggagttggactccgggcac

SEQ ID NO: 104316 - DNA, 715 bp, Cannabis sativa
ttaggcttcggcaccaggaccagattggctagccattccaggtaataaacgtcgcggatcatgctgtttgttagaagcttatccacctctttctctaaggcctcgaccttcactgaatcgaggggtggtcgcttttgttggactgacggcatgttcgggttgacgttgaggacgtgggtgatgacgtggggacttatgccagtcatgtcctcttggcaccatgcaaaaatgtcaaaggcccccttcagtgtctttattattttttcctttttctccgggtctaggctctttcctagccggagtaccttggtggagtcgaggttacacactaatacctcctcgacgtcctccattggttccacaattttttcggaccccacgcggggatccaactcgtcttcctcagccatttctggcttgatggtttcccggaccatcagcacgggtaggtgtgtggcaactttgtagcattgcctcgcctccccctaatttcctctcaccatccctatcccagcttcctgggttgggaacttcaggcacaagtgccgtattgatgtgactgcgccaaggtctaccaaggtcggtcggccgagaattgtgttgtatgctgtcgggaaattcaccaccacaaaggtacagtacttgaacatgctctggggggtgtccaggcacaaggtgactggaagtctcaccttccccattgggataagtgttg

SEQ ID NO: 104317 - DNA, 682 bp, Cannabis sativa
tgattaagaacattcttaatggttggtgctattgaccatgatatcgcccactaccagcactatgatcgcactgagggaccagcactatgtttgtgctgctatgatagcataaatagcacccaagagtacaattggccatgatatcactcttaaccagtactgtgcccgtactgctgaaccaacacaattgttgtgtcgctatcataacgccaatcgatactctctggggtgaatatcactcttaaccagtacgatgcctgtactgtcgaaccgacacaattgttgtcccgctatgatatcacccaaaacatatacaatcatacatatatctcatataacccgctatatacagttcttaccttttttccgaattcaaatgtgctggccgacctgaacggaaattctcgtgctagatggatgccctaatcacattaattgtaatacagatgagttactcgctaaatcactactcggggacttaaattggaaactaaaagtttccctatcaataagccacatggcaataccctaaatctcttaaaattgggaaaaactagggttcggaaaattctcccaaccggcagactatcccaaccggaagtccaaaaactggacaccaaccggtcgaccggttggtacaggtcccccagaaccggtcgaccggttctgtgctgggaacaca

SEQ ID NO: 104318 - DNA, 509 bp, Cannabis sativa
atcaaactataaatatgtgtcagccaacatccaaaatataactcccactaaaccatcacaatcttaaataataccacatccatatatgagcaacaagctcctaaaaagccttaagtgatatatccttaatgatccaaatacgaaaatatggagtttgttcttaattgttctatagacactttatatcttcgaacatcattttaataacaattagctcaaagtcaatgtgcattttaccttatagagctcatgttgttactaaaatacaacctgattgatttattgtaacaccctactagattaggcacgttatcgtgactttaatttactatgcacttctttgcttaaaggtgtttattggatcacatccaatgaatttggatccaaccgatccaatctaattatttattagataatagattttctcatctgatctaatccaatcgaattgagtcatctgatctgatctgatctaatggatgtattagattggatcggttccaaccatt

SEQ ID NO: 104319 - DNA, 678 bp, Cannabis sativa
ctttagaagacgcatcttgcttcatcttcttaatgtcttcttgaagctgagcaatatgtttcttcgcgagttcaacctctttgggccctacagcaaaagccttcgcaaatgtggccatgaactgcaaaactaactcctcagcgcgaggaagcagttcctctgaagatgccttgtcaatcttcgacaagaactcatcgctgacaaacctctcctgaaggtacaacacatggcgagctcgagccgctgggtcgatcacaaccttcttccctttctctcgaatacctttagcaggcctcttggaggaatctgcgacaggagtaacaaccatatcgcttttccttttttgggaggtaacaggagaggtcgctgctgtcccgggtttcaatttgcagttgagcataggagcggactttaggaaagtcatttctgcgattgcaaaaggaaaaaataagggttaatattaataaagataaaattctaacaccctaagtttgcatatgcgataaaatacctgatgatggtctaggagtttgctgcttttttagaaggttccttgtacactgcctctctccaaagactcgcgttctcaggaatcagtttgtgttcgcgcagtttagcagttgtacataacaatcgccagtcgcgatcttgtatagggaggcttccaagaacttcagc

SEQ ID NO: 104320 - DNA, 654 bp, Cannabis sativa
ctctagtattgcagttgatctctcaaattcgtactccgtattctactatttatttccttccgaattgcttgacaaaatcaactgaagctcagttcttatatagccattgagggactaaaagatagaaaaatgcacatgctgaaaatcttattctgcttaggattagaaaacctattctgcttaggattagaaggggcggtgagttttctgctgcgtcaactgatagtattttagcaataaatctctcgatattactcggaattggacgattcaagatgttctcgaaagataaaagagagatctagaacttttatagggtttgacttttccaaaatctaatcagaacatagtcaaatttaggcttgaagtttcaactttattttcttgcacaatattctctattttatatatcatctttttgtgagattttttttatctttttttccatcttatttttttgatattttctaatcttcttctattttaaatctgtaaaaataaatgataaaaaacataaaattgctctaaacaaaagtagaactaaattaaaaacacactaaatattaacctaaaaataatactaaaaataacctaacaatcattatatatttttatcattttttatataactataccttttccatgtatatatgt

SEQ ID NO: 104321 - DNA, 580 bp, Cannabis sativa
cgtaacgagatttggggtgaagggtagctagccccaaggtatattggaccttttgaggttattgataggattggggaggtcgcttaccgattaaacttaacaagacagttggaatatgttcataatgcgttccatgtgtttatgttgagaaactatactccagatccatcacatgtcattaagtatgaggctatcactcttcaggatgatgtgacttattcagaacaacctgtcaaaatcttggcgagagagctaaaagttttaagaaacagagagattccagtggtcaaggtcttatggaaaaaccacagagaagacgaggctacttaggagttagtgtttgagatgcatatgaagtatcttcacttgtttaattttcaacttgaggttgtaatttgaaattttgggattaaatctctttaaggaggggagaatgtaaggacttagttgactgagtcaaaagtgaaatatatataatgataaatatataatataatatatatgtataaaaaaaatcaaagcagacccctcctttcatatcgcctctatatatatatgtgtatctctctctctctctctc

SEQ ID NO: 104322 - DNA, 654 bp, Cannabis sativa
ggatccatgatttgaccacaacccaaactcggacctgagacccataaagggactgaggacttgaactagaactagagtaggatcatgatctagactcgggactcgagacctggggcttagacacgactcattatcggtgttcaaatttgggaatcggacctggactcggaccccgacccaggatccagaccgaaccaggatccaaactcaaacttggacctagactcggaccaagatccatacctaaatccaaacccgaacctggacttaggacctaaacccaaacctggacttgaactcaaacttagacacagacccaggatgcagacctggattgaagaccctcacctggactatggacggacccggactcgggacccaaaattgggactagttcttacgatccgaacaggtctagctccaagttttgtctaggtcctagtctgagtcaggtacgcgtctagtttcgggttcaggtcctagatctagacacctactacaagttgggtccaagccccgagtcctaggtctcggctccagatccacattcagatcccaatctttggtcccggtttagtttaagtttaagtcccatgtttatgtccaagtcccaagtccaagtaagatgtcagatcttgattagtgggcctaagt

SEQ ID NO: 104323 - DNA, 996 bp, Cannabis sativa
  modified_base (506)..(508): a, c, t, g, unknown or other
  modified_base (924)..(937): a, c, t, g, unknown or other
gagccactccgggcatacattagcagattcatgacggaggcaaagaaagtttcacaggtaaccgaggatggaaagttatccgtgatactggggggcatcgaagtcctcgatgaactttggaaggatataaggaagaatgagccggtagactcaatgagtgatttccttgactgagccgaaggcttcatcaagctcgaagaagccattcaacgagcagaaggtgaacaaaagccgggcaagtcaaaggctccttccactggaacatcctcccaacttcccaattacccaaataattcaagctcaagtggcaagcgttccagcaacaaccacaagcaagggaacaggaagaaaggaaagttcactgataaatccggacagactccctgggagaatcatgccaaatacactacattcactattctaactgaagatatagaaagtgtatatatggaaacccagtcgttgatcccatacaagaagatcggacccatgaagaaagataccannnaaagggacatgacaaagttttgtcggctccatggagactacgaccacgacactaacgaatgctataacttgaagcgagaaattgaattcctaataaggaaaaacaatccacacctccagaagtatgtcaggaccgatcaaggtcagaacaaccatgatttgctaccgccaccggtagatggaaacttgcaagtcattattggagcccctcacattgcttgagattcgggcaaagcttgggagaggtatgcccgaacaacgcaacacgagcaaaaagaagtcatcctggccgtggaagaaaggcagctcaaagttccacgagcaggagagctaaccataactttcaacgaagaagacgctgtcaagattagatttccgtaaaacaacccactgttcgtggaagtccagatagccaannnnnnnnnnnnnngaaccatgatcgacaatggagcttcttcaaacatctttttcaagactgcttacgaaaag

SEQ ID NO: 104324 - DNA, 877 bp, Cannabis sativa
aatttctttgattagcaaagattgcacaataattgaaaaagcattgtagcgtgccttagcattagggcgttacaataaaagtgcataaaaataaacctaacactagccacttgcattaagcgactgtatttggacagatgggtcctagggtcggacttgccttaatacaattccatttgtggcatctttaagttttcaggtagtggagtttcaataatccgcctaacgcatggttttggatcttcatctttcgagttagaaatttctccactatgcgtctgcactaatcttttcaaagcggtcctagggtctgtcttgccttcatacaattccatttgtggcatctttaagttttcaggtagtggagcttcaattatccgcctgacgcatggtttcggatcttcatcttccgagttagaaatttctccattatgcttctgcactaatcttttcaaagcggctatctcttcttccaaatgttttctgtcgttgttcggaagctcacgtccatggatcttatcattgatttggttccgtaggttatttccacgaggcctcaccttttctcccttgcctttttcacgtttggcatccaggcgtctacagagtttgtttcatttctctaaggaaatccttaggggtttgtactatttaaattttctgcactccatggttcttgatttctttttcgctttgacttaatgttcatagtgtattgtctttgtttttgttctaaaagaaagtttcaaactcaagagaattgtagttaattatttttattgataataattttagtgtgatgttttcataaaggtttatttcaagaaaaaaatttcacttctcctaaaaatatttgagttcttccaacagtattatg

SEQ ID NO: 104325 - DNA, 872 bp, Cannabis sativa
cgctcttccgatctagagagagagagagagagagagagtcgtgcgtgagtgaggagagagagtgaaaaacaaagtcgtatttttcaacctaattcttctgtgaaaagtcacgcttaattcacttgttttcactttttaattccttagttgttattctaatatatatcatatatatatatatatatatatatatgtaaggttagacaaaccttttatttaatcctttaaaataaaagataatatttaatttaattcaaattcaaatataaatatcatataactaattaacaaagattagttatatccttttattttaatattatcttttaattaaatagattatccaacaatatatttaatacaataattaaactataattaattaatttaatttattttattttaataataaaataatcaaataaaattaccatgggcctttatatgtaaccctacacatgtaagataggcccaacacatgtgggtcatattttaaggtccaaatttgatttctcaaatattttaccacaaataatatttattatttattttgccaacatataataattgtttaattctcattaatctcttatttcactatggacatgaggaacgtctaaggaacgtaagaacagacataataattaggcctttgtcgttgattcctacggataggtaccttcagctaattggcttgatggtcctgtggcacttgctggttattggcatcagtatctattccttgagtattttgtaggacatggctgcatagtaggtaactgagtttaatgatttataaaatgatgattttccattcaaaaaaaataatgatagtattttgttaaagatacagaataaaaattgttaaataa

SEQ ID NO: 104326 - DNA, 1287 bp, Cannabis sativa
cattaggatgcattctacagcctcggataatcacatataattttaaaagatcacaaagctaataaaagagttggcatagtaatgttacattacagtctcccaatgatttctctaattgactccaacatgagcaccaaaaaacagaagcttttaacaacataagcaccaacaaggcataagagaaaggcttacttattataaaacaatagaccgtccttgacataaggtacttctccagtataagctgcgtggaaaccactgtgatcacagctgtaaacgggtaccaaactaaacctgtacttgtggaaatgcgagggaggttcacaagctccagtttcagctagcttagagttcatccaaaaaaacctgaactccgaactacaatcatataaagagtaaccccgccagcacaacatgtcgataacgtagtaagtttgatctaactgcgtacagtaacccagctagactaattaacaaacagttgaagtgcaatacagaaacagagcaatcaactgtgagaatcatttacctcgtgaaatatgcagtcaagtatggaataagactgagctggcccagaaacgtccctggaacgagacccattgggaagtttagatggaaaatggtgaagcacagacccatttcgttgtctactgattgtggttccgttagaggatacgacgaagcatctcttcccagaaggcctcgcaaatacatacctactcaaattcaacacgagcttcatacatacatacataaatataatccacacatatgacattacatattatagaaggagcgaaccagtcatgaggcaatcgatcagggacatcgatcatccactcagggagcataagttgtcttgcgaaccactttcgagcctctgagcctttcagcttggaagcttggtgaacatcgaggtcattcgaagatgtcccgggttcgtgttcggtttgggaatcgggttcaggttcaggttccggtacgagttcgatatcttcggagccagaggcatgttcgagggagagtaaagtagaggccaagcggcgagcttgaagctgagcatcgcgacgattctgctcctgccgccgaagcgagagctccctccgcctctgttgatcggagatcgccggtctcttgtactgacgacgcaaatcgtgaggcgccatttgagtttctaacattaagcgtaggactcttcccccaattttgaaactcactcgtaggattgcagtagattaatgtcgtttaggatcaattttgtctacacacaatgtcgttttttttttt

SEQ ID NO: 104327 - DNA, 1075 bp, Cannabis sativa
agccagatcttcgtgaacgtttaagtatgatcaaaatataattgtttaagttgtgaataaaaatgcaaataagcaaacatattaagttcaaatataaaggtgcgaggcaataaatgaaaatataaataaataaaaagaaaagttggccatccaacaatgcaaatttgtctttacaaaaattgccacaaggggcaaaccattgtctcggccaaaaggccattttcttaaataaaaaaaaggaggaaaagttaaaaaccaagcctacattgtaggatacttggaaaaatattcttgctccacctcaacctcatcttccttgccaagctcttctttcatggtcttctcgcagaaggcaagcatggcttcaaccccttcacctaaaaagttgaattccatatcagggttagccaaccaggtctagtaaatggttctcctggcaatgctattgacccagtttttggtgtcagccttcgcctcttcgagcatcttgtcaaggttggcctggagggacttgatagaatcctgaagctctttgatcttcttttggtcagccagacattgcttttcagcctcctccattatgcgagaaagctcagatttagagtcattccattttttggccatggtgtccctttgctctctagtctaacgaagctcagtttcaagcatttcagcccgctaagacgctttgtgctgagtatcaaaatagagaagcaatccctgagagaaagaagcaaattaagaggagtaaaaaatgagaaaaaattagaacaataaggagaaaaagagactaacctaatgcatgagttcataactccttttagcaagaccctcaaagctgccttgcgtgagaagctcccagtcgctagacccaagagtttggaagtgaccccaactattggtaacatgcaacgagcagagttgcgaaccttcagtcccagccttgagaggcaaggggaaatgaaggctcgagaagaaccatctctggatgagaaccagagaacttcacctggtgcactgacccaaaaggctgctcattggcactcgtcatagctgaaactgtcttctctggaga

SEQ ID NO: 104328 - DNA, 1096 bp, Cannabis sativa
atttctgcaggacttgtcggagcgggcggttggttaatactttgattgggtgagcttagaaataaggtctcagctttctcgaggccattaggaggcaaaaaactagttgctcgataaccgggtatcgtgtctccacccctatcatgcgtttactaacatagtacacgggatgctgagttttttcttcttcccgtactaaggccgcgcaaaccgcgttctcggagacagccaagtataggaacaagtcttctctaacaacaggttttgataggatcagtggtttagccatgtgctcctttacttctttgaatgcctcctcgcacttgtcggaccattcaaatttttggcatttcttcaggatgttgaagaagggaatgcacttgtttgtgaattgggagataaatcggctcagggcaacaacctttccagttaagctatgtacatctttatgctttttgggggaaggcatgctcaggagagcttgaattttctctgggtttgcctgtatccctcgttggctaacaatgaagcccagaaactttcctgatttgaccccaaaggtgcatttcttcgggttaagtttcattctggatctccgaaccacttcaaagcattcttcgaggtcatccgcatggcttgcatatgccttcgacttcaccaacatgtcatccacgtatacttccatattccgtcccagaaggcctttaaacatctggttcaccattcgctgataggttgcacgagcattctttaacccgaaaggcatgaccaggtaacagtatacccccttatcggtcctgaagctagtgcactcttgatctgcaacgtgcatcttgatttggttgcgtatgcgtccatgaaggacaacaacttgaatccagaggtggcgtccaccatttgatctattcaaggtagagggaaacagtcctttgggcagactttgtttagatcggtaacatctatacatactcgccatgtccggtttggtttcgacaccaataccggattggccaggcattctgggtaatacacatctcggatcatgccactggtcaacaatttgtccacctccttctccagggcttctgcctttacg

SEQ ID NO: 104329 - DNA, 521 bp, Cannabis sativa
  modified_base (47)..(69): a, c, t, g, unknown or other
tttatttctaaatattgggatctagaattaaataaattcacaaatannnnnnnnnnnnnnnnnnnnnnngctaattgcctttactaatccacattactagggtggtcattacatatacttagttatattattagttttatttttgttacatgtgtttttaaaattttagaaattcaaagaaatcacttactaatttttttaaaaaataatatttaaagttttaaaaatttgaagaaaattaatataaagtttaaaatattaaaattgaacatactcccaatattaaaaataacaataaaaataataatgttacaaataatattaatatttttttaataatgttaaataatatgaaaatttatgtatatttcaattaatttaaaattaataatattaatacttatatatttttataaaactaaatctactaatacttttaaatttaacataatattatattttgttaaatcaacaaaaactattaaatacccacattttatatataaagatatacaaggtat

SEQ ID NO: 104330 - DNA, 998 bp, Cannabis sativa
tctgattatattgaaatgagatttatttagggcataaaacccaacaagctactgctgtggaattatcacaatacaatttcaacagcctcgagatggagtccattacacctaatgctgaaatgaagttccgcattcatattacttgacatgtagcctcataacacaccatatactttgcctccattgttgaggatgttgtgagtgtctgtttgacacttttccacgaaacagctcctccagccatcatgaaaatgtagcctgatgtggatttattagcatccatgcatcttgcataatcagcatcactaaacccaactatatcaagagtgtcagctcgccgataagtcaacatatgatccttggtaccctgaagataccgcatgacctttttagccgctttccaatggctaagtccaggatcactcaagtacctacccaacatgccaacaacaaaagcaatatcagggcgtgtgcatacttgagcgtacattaggctacccacaagtgacgcataaggaaccactttcatttcatctttctctttatcattttgtggacattgaccctttgagaatttatcaacttttactattggtgcctttccatgtgaacaagcatgcatattgaatcttttcaagatctaatcaatgtaagtaatctgagacaatcgtagaatacctttagttttatcccgaaggatctgtatcccaagtacatatgaagcctcactaaggtctttcatatcaaaatggtcagatagcaactgatttgtctcagataacagatttttatcattagaagcaagcaaaatatcatcaacatatagtaccaggaaaatgaagctactcccactgaccttcatatatatacattgatcaactttattctccacaaaaccatttgcagtgacaactgcatcaaacttgagataccactgtcttgatgcttgtttaagtccataaatagacttattgagcttgcaaaccatatgctccttg

SEQ ID NO: 104331 - DNA, 1207 bp, Cannabis sativa
ataggttaattgtttaaaaaatttatatttttataattatatattgttgaaatgtaactaatgagtatataattaatatggtaaataactaaatagttactttgatttaaaaaagatgaaaaaacataagcttctcatatcttgaaatgatcacattgaaaagtaaatcacaataatattattttttaaggccaaacaactaccaatgtggttgaaattttattttaaagttgaaaataagagaaaatatatatatatttttattattttaactttttctatacaattataaaatttacgttcaaatttcaaataaaaaaaaaaaaaaagacaaaaaaaaagtaattgtctgtttatcaattaaaaacggcacaataacattaataacggtacaaagaatattgaatgagattgctacgttattattaataataaaatacaatttacgtttgtaaatgtaaatttcacttaattttattattattttattatgtaaaacaaaaagataagaaaattgtacaatgcaccctttaaaaggaggcaccacttttatttgtttcgatatcaaaaaatacttttaagtcaaattttttgtcatggtcatgtacgttatagttatttaagacatcatgcaaaattgtaaaaaatcaaaaaatttaacctattgaaaacaaggttcaaataatgtattgcactcgtatctattttattttatacacgtgtgaaatagactctttaaatactattttttatattgtaaattatttcaaaattttttaaaattttgtaagatatcttaaataactataatatacacaaatatgatatgaaattagactaaaaaattcttcttactgccaaaacaagtagatggtgcatcgatcccttttaaggggtacattgtagaagcaacctcaaaaatatatataatagtctatcatttaatgttatggctaaatataaaataataaaaataacataaaagtaaataaagaaagtagtacatttatggtgattcaaattttgcatcatggcatatgttgtgccaaattcaacacagcatttgttatgtacgaaatttgtatcactttttggcacacaattgaaacatattttttcctaagagtgctaatatatcacttatttgatatttacatcatttatgggatttagttgatatttgtttttgtcttttttccagttttat

SEQ ID NO: 104332 - DNA, 606 bp, Cannabis sativa
  modified_base (371)..(381): a, c, t, g, unknown or other
gtacacatcaaatttttggcgccattgtcggggactattattttattttattattcatatatagtttttagtatttttattattatttaaaaaaaatagaaaaaaaaaaaaaaaaaagattgttttattattcatatttaatttttgttgctaacttgttttactttgataatctcaggtgtacatgtctagtgatgacgatacagagagactttcaagggttaaacaatatcttgagtcatcgtctgcttcttgatcttgaaagactataactgacaacccactctttcaacctcttggtcctgccaaacagccattatcaactaatctcgagtgagattctgatgactcggttacttctcacaagaccnnnnnnnnnnncaggacattgaaggagttggtcgcaccaaatctggaccagcagccattgtgcatccattatgcacctttggatgtcaattttgaacgaaatccggcctcatccatttactgccaaattttcatggataattacctggagaagaccccaacaagcacctaaaggagtttcatattgtctgctctagtatgaaacctacatcagttactgaagaacaaatcaagctg

SEQ ID NO: 104333 - DNA, 541 bp, Cannabis sativa
gttcatctacaaaagacaatacacgatatgagtgtttggtcgggatatcaaacaataaataggcaaatatgttgactaggactactcaactgattaaaaagacgaaaaacgcataaagattaagtcataacccaagagtttgaaatttttgggttaaaggctaaattttacgaagctttgaatgagcaagatgagaatcgaacattgcgagattaaagtcaagatgtcataaatcacgaagccgtacgaagtattgtagagaaaactacaaagtttcaagcctagattttctacgcatcttctacaacaagtcaagaacaactatattttgtataatggaagcccagaagattgaagatacaaagttaaagaaggaaaagatcgaaaaattactcactgtttgaagcctaggcgttgtccagatgaagctgctcggatacttctgatagaaatcccacgatagacttgaaaaaaaagtcctttcttgctctgagattgtttcgtggaaaaaatggtgaaagtgatttctgaaagaagtgca

SEQ ID NO: 104334 - DNA, 1767 bp, Cannabis sativa
  modified_base (241)..(242): a, c, t, g, unknown or other
  modified_base (1368)..(1368): a, c, t, g, unknown or other
atactagcatactttgccaataccctggaaagaacgtaacacttatccaaggtgtaagtaaattttatcgctgattattatatcagggtagatccagtgtactgacaaatcatgggacataaactttgaaacatataatcatgattatatttcactgtgttgacaacactataatcatgaataactatatgttttggatttaataaaatttatacattaaacatataatcatgaaataaannatgtgaaccatacaacataaaataatttatggtcttttactaattagtaaatctaattatatttaaatgagttttatttagggcataaaatctcaacaaactcccacttgcaataatataaaactaaaagtgcatttcaattaatctcaacaccttgatgtctagatcaagtgtagtacgtaatattatctctgtaataggatctgacatgatgtattcaatacaacctttctccaccattacatctctttagtcacaacatccttgatattgtgtaagtcctttctatatgtttactcctcttgggatactgaattctttactatttggcaattatatctgtgttagttaggaaataacactagtagttaatctattactagaataacgccaaaaactgtatagaactttccataggctgaataattatctaatagccttcttggccactttaacattcagtctcactggtagagttagagattccaaattggtctttaaacttctccaaaaaaaatcactgttccacccccagagtaatcaccatctcataattagattttctagcattaacgcaagtctagaaatttgatttggtgtagtctaagagcattaaaataccaccattaccatttaacatatagtttcttttttaatcttaagatttacttcattatcttacaatgttcctttcctggattaaactgatacctactcataactctcactcaacagcaggtatctggtctaatgcataccagagcatacatgagacctctcactattgattcttaaggaattcctttcatgacttttatcttttctagaatagttgaaattgttccttagataaataaaatctatatgtaggagccaaaaagtttcctttagaattagccattagaaaaatgctccagcatctcactaaagtaagttgcttgcactagagtaagtaaattactaggtataccacaagatacaggtttagataatctcaaacctactacactaggatcgagaagttttgttaagtccattaaatagcttattataaaaaaaaaattcttcttatccttgtgatagaaaacttttggttattccatacgaatggttttaaccatagttntcttggctttgcttcttagttctttattctgactatcgactacttgtttaaactaacaatatatttttatcacatgtatctcccaagtcataacagggtgagttccttgaaaccctcccactacgataaggtatcgtgactttctatttaggaacattgatagtattgtcctcatcggttgtgttaagacaacaaaggcagtggaatcatcttatgtagaataagatgatagaacactttaaaataaaaaatatctcatctactttgctactttgttctcgtatttagtcatattcttagaaaagtagtatttgttgaaacaaatactttcttatcttgatggtctacccctaatcactttagaatagctatcaaacttgcaaaccttagttaacagtt

SEQ ID NO: 104335 - DNA, 649 bp, Cannabis sativa
ttgaattctttgatatactttgctcaaacaaactcgagaacatacattctgtgtaattcctgaggcaattgcaaggacaagcttactgaataagattgactcatgaactaaggctagttaacgtcccaactccattaataattgtttgtctcattttatactttctctattgattatgtattcttcagttcatattatttttattctatttccaaaaatcttgataaatattttggtgctttcattaagagctaaagaaagcagtgagacaacttagaacccaatctggcctttgttacactaatcctaatactagagcttgaggttctagtgaccctcaagaggtaactagtcgctagcaaggccattgagacgaagatcaaaacctagacgctctcatcatagaggacgcaaaatctagagaaagtagttttgaagatgtcgagattgatatcaacgacacactagaggacatgaatgaagacgatcctcaggacaacgtcgctgaagactacgcatgggaggaaagccaacctaattagtcatacctcgtggtcatcaaggtgcgacaacttcaactggcagaaagcatgttgactcggtaggatcaattcaacgagttgttaattggaaagatgaccaagatggt

SEQ ID NO: 104336 - DNA, 647 bp, Cannabis sativa
  modified_base (388)..(388): a, c, t, g, unknown or other
tatgacttaaaggctgttacgttgatattccattcatgccttaagttcctgagaaagaatggggtagcgtgtctaagaggaaaccagcagtttgctctggaatgttataacgttgccataggaagtatcctctagccagagcttgaacaagggaaaaaacatttctaagtacggaacttcccaaggcagggataaagacgtggatcctcgacttggggactcaagcagcaatgttggacctgtggaagaactagaagagattgagatcaacctagatattctggccagaaagcttaaaatttgaaaaggtttgttggtcaaagtaaaatcagcactgataaaatttctgagaccaaacgtggacatttttgcctggtcacatgagganatggtcggaattgatccttctgtaattttgcacatcctaaatattgatcccaactatcgaccagttcaacaaaagcgaaggctgttggacaaggagcgagctctagccctgaaggaagagttagagaagctacgaaataaaaacttcataattgaatctttctacccgaattcggttgctaatcccgtactggcacccaagaggtttgtgtattgatttcacagacgtcaagaaggcgtgccccaaagactgttttcca

SEQ ID NO: 104337 - DNA, 545 bp, Cannabis sativa
aattacattacaaaaattttattttaagtaaaaatatgctatcttattgtttcttttacattatttttttagcaacattttcatcaccttcaaaacctatttaaaaatttaataaggtacaataaagaataagtattcaccatatatatgttatcagtaatttttataatataactaattctataatatttaaaatactatttggttactttataagtttttttaataaatatataagcagatttgttttaaatatattatttggtaacttttaaataaaataataaaaattatagagtaatttacaatgttggttattgtattaaattttaatatactatatgcttcccttatataaaaaataagattctagtaacttttattaaccaataaaatttgttgctatatattaaattttgtgttagtttgattgttagccaagtagaaaatatgttttagaaatttatcaatattgtctaagagcatacatttagtaacttttaaatatttaataacaaaataatttctcaataactaattaaatt

SEQ ID NO: 104338 - DNA, 2998 bp, Cannabis sativa
tttatatagaatagatatatgaatatcactgcttgctgctcgaacacaatacaatggaagtaataaattaatatatttttggattatttgttccgtttcaatctcttatttcgaagaaaggcgattcgaacttggaacattctctttgtgagaagtgtggaactattaagttatgcttttgaccatcattgtgaacaatcacacttgtgttaaagataatgaaaaagaattcaagaaaaaatcgaaaataaattcactgtcatcgaacacctatcgagaactatcaagcacggttaacaattcatcgagtaaatatcgagcgcatgtcatagaatgattgagcaccacttaagctcttatcgagctcattcctaagatacattgtgagccatcattgtgcaccgatcaatcgagcacttagctcctatcaagctcattcctatcctacttatcttgctgcaacttcttagctgagcaagcaaggtaattactatttgtactcctgcacttttttgagtggtcaatgggaaataaataggcattgtacactaaaattcatgaatatatcaagctcattaattattggcccttcatagattgtaaaagaaaagaaatcaactcagaaatggaagatacacattttcacttgtactaacaaaggaatgatttatacaaatcctagtcgaaagctaagcatttacttttcttgcctgaaacagcagcctccttcactagctcttctgtcaaagcagaaagccgaaaaacttcagttgtaaccttagcgaaacattcgttgttctcccccgtgctcttccaatgatcaaagctatcatcaacctcgatgcttggtgtagttttattcaaaagttctcgactcatttccacaagtttatgaagagcactggttgcagcttcaacttctagttgagacgcctcgagttgaagcttctcaattgccaagtccccgaaactttcctcgcctatatttctctcttgcgctaaagagtaaagctttcttagatcattagcatcttgtttcgtttcttctttaatggccttaagctcttcatctttcattgcaagagacttctgagcagctacaacatccatttcttttcttcgtaaggtctgtctcgttaactcaagctcattttctagttggttttcccatggttgctcgaaaatcccatggctgctttcatcctttatagaaataaccaatttgtttgtaagctcagcaatcctttctaccacattttcagcttcaaccgttttctgcatcgtctgattcagttcattttgaattatgccaacttgttcatctttctcttttaacaatgcagttgcttgaataagctggttctctctactgttcaaaagcatcttcaggtcagcaatttccttgctcacctcttcaagtttcttcttcgaaatcaggagttccgaatccttttcacccaatacaaccataagtgtagcctgctcagatttcaaatgttgaatttccagcttagcctccaccaattctgactccttaacccgaagaagactttgtgtttcctcgaattgagaactttttcggtctagcttctgttggagagaagacatttcctgcattgcctgctgcaatgaagatctctctttcttcaactcctcttgtaacccctttatcaattccctctctaatgacaaatcccgttcgagctccttatttcgagcctctgcaacccttagctttactctttcactttctatctctatttgggcatctttcaaactagtcatataagacataacacttctcttctgttcttcaagttcttccatctgctttcccaacacctggtcttgttcttccatcttttttcgggaagatgctagagctttctgagagaaaaccaactcagaccgaacatcaacaagaagtttcttcactctcctaaagtcatccaatgtctcattagtttcttcaacatgtttggaagctttctctgcaagtttctttagttctcccttggcttgtaaccactccatcgtcttcttctctaaattcgattctgcaactttcagcttctcctcttcaatctccctcagtgtcatagaagcccttagctcttcatctttcttttgtaaagcttttcgaagtccttggatttcaatttcttgctccttcactacttcattagcttgattaagaagctgagccttagattttagattagaatcaatcacagcaacttcttcaccctttgtcatcacttcatttctcattctaacaatttcaccttctttcaaagacaatgcagaacgcaaagtagtaatgcctgagtccctctcccaaagccgacgtttaagatcttcaatctccctagcttgagaagttaaactataattagcttgcttcaattcctcttcgattttttcatacttacaacgagcatcagcaatttctttctcctgcttctccaactcctcctttgctcggtctaattcactgtgttccaaaaaaaccgccttctctgcatcatgtaactcatcttccttttccttcaatgcaaccaatgcagccacaagatcagcctccaatgtttcaagattaagaccgagttgaacatcttgatccgggagttgagaatatctactcatttgtttctccagttttcgggtctgtgcaaacaatctctccagaagaatcctagcaggctcagtagctccattgtcactaatatttaaccttttgttatttaagactgacttaacaatcttcaaagaagtgtcctctctttcaagttttgacacaaaacttactttattttgctttgaattgagcctcaaagagaaaaactgcacaaaatagcatcacacacacaattattagtagtcaatcactcatttcttcaaaatcagtaatttgatttctgtattgatattagtacaaaaacacaatgtataacatatttataaacactaaagatttttggcttgacaaataaccaga

SEQ ID NO: 104339 - DNA, 629 bp, Cannabis sativa
aaaatataaaatgataacaaaattatattaatatctaaaaaatgatattctatcgaagatatctttaattaacatgtgttgacttgttattgtcatgaggaatacatgcatgttgatgaagagcacatgtcgagaccataatgttgagtagtcgtgaggagcatgtgctgaagtgaagagcatctcagctagattcgagatgatgattctgtgtaaggccgagatgatgtcttgaagtggtgatctcggctagggtcaagatgaggcactaatgtgtatctcggcttcggccaagatggtacaaggtgatgagctttgatatgggatggtaagctttggtacgaggtgatgagcttcgatctgagatgatgagctttggtctgaggtgatgagctttggtatgaggtgataaactctggtccaagtggtgaagtttaggtcgaggtggtgaagttagaaggttgtggtgatgcctttcagacaagacagaggtgctgatctcagccttgagccaaagtgatgttctcgaccttgtgccgaggtgaggttgttggagtgtgattctcggctttggtctgaggtgatgtcttgataatgagtatctcgaccttggtgaaggggagttgacg

SEQ ID NO: 104340 - DNA, 4844 bp, Cannabis sativa
gttgccataacagaattcagtgagaaccacaacaatcacaatgataatgacaactaatcattgccctctgccaacctttacaataccgttagagatttcctaaatgatagggatcctccgtacacaaaatattccccaaatattctattctagattattccttcatgtactataaatatgtgtattcattcctttgtacagcaatcaattaagcaagtaataatatcagtaaaagaggagagcaaatatttttcagtccatatttttctttcctttttaacttggtatcagagcaagtcgatccatggccgctccagtcgattccagcgccaccacagaaggctctgcttctccccctgctcctgttccatcagtacaacccactggcgtctctaacccagtttctatcttgcaaagtcttgctcctcttactctgaaacttgacataggaaattatactttctggaaatctcaagttttacctgccttgcgtgctcatgaccttgaaggttttgttctcggaacaaaagtgtgtccaccacaattcgttgacaacactatcggaggcactacaccaggagaaactcggcaactcaacgtcggctatgctctatggcgcaggacagatcaagccatcatgagttggcttctcaactctatttctgagaccatgtttggtcatgtggttagatgtaccacttcttttgaagtctggcactctttggagctgctatttaccactcagtctaaggctagaaccctacaaatacgttttcaacttcagtctttgaagaaaggaagtttatctatacatgactatatgatgaaaatgacaaatcttgctgaaaacctttctgctgcaggacaacttatatcggatgaagaactgattctctacatccttggaggtttagggcatgattatgaccctgttgttatcactctaacttctcgttctgaccctataacactgcaggaagtgcaatttcttttgcaaagtcaggaaatgcgcctggaacaactaaacgctctagctcctggtgacttaaacattcccagtgctaatcttgctgcacaatttcgaagatctgtcaacaccaacaatggccctcctggattcaacactcatggaagaggtttttctccacgaggtcgtggccgtggcagaggaggaggaagaggaaatcgtcccgtctgtcaactttgcaatagagttggtcatgttgtttccaaatgctttcatcgttttgacatcaactttcaggcacctgcttcgggatcaaaccagtccaactctaatccttcatgaggacagcaacctcctagtcaaggacagcaagcctactactctgcttcctccactgacactcaccaagataattcctggtacatagacaacaaaccacatcacctctgacagccacaacctgcagcacaaatccgaaaacaaaggtacaactcagttgttaattgccaatggccaatcccttcctgttaccaaaataggaaatagcatcttgaatataaatgaaatttgcttactgcttaataatgtgttttgtgtgcccaaaataaccaaaaatctcctttctatctctcaactaacaaaagataatagtgtttttgttgagttttattctgactgctgtgttattaaggatctggctacgaggaaggagctagctcggggaatgcttaacaatgggttgtatcaacttcaagaatcgaagtcatgttccagttcaaaatcgagtctgtgtcttgtttctgagtctttaaattccaagaagagtcttgacccaaagtctcattgtaagagtcaagcaagtgagaatgatcaccttgctcagtccatgtctgttcaatcggttaataccagtgatattaatctctggcatatgaggcttggtcatccaagcctaaatgtaatgaaacatatattaactaatgaaaaagtttcttttaaaaaccagccaaatttttgtgatgcttgtcatattggaaagtcaaaacacaaacactaccaatcatcactcaaaacagccaagcaacccctcgaaatcattcactccgatgtatggggtccctcacctatactgtcaaaagatggttataggtactatgtccactttcttgataaattcagcaatttcacttggatataccctctcaaactaaaggttgatgtcaaagatacctttattagtttccaaaaatttgagtcaaaaataaaaactctccactcggattggggtggagaatacagaagcctagtcccatttttgacttctttaggcaaccattttagacacccttgtccacacacacatcctcaaaatggaaaatctgaaagaaaacatcgacacatagtcgaaatgggtctaactttactcacacaagcctccattccacttaattactggtgggaatccttcaatacagcagcctttctgattaaccatttatccacacccaccttgaatcacaaatcaccaactgaagttctcttcaaagttcagcccaatcttcactttctcaaggtgtttgggtgtgcatgcttcccacatcttcgagcctacaatcaacacaaacttgcctttaggtccatcaaatgtgtatttttgggatatagtcccaatcataaaggatacaagtgtctgcacccatctggccgagtctatattgttcaaagtgtcacatttaacgaacatgattttccttttgcttcaggttttcgtgttgatcatttcaaaagttctgacataaatacctgtcctagtcaaattcaatacagtcaatggttaccctttgtttcacaggtacatgatgaaggctctcttgaagttgatacacctccttgttctccaatttcccagccatctccttcacagtcggctataaaatccacatctgccagcaatcaaaataattctcctcaatccacttcatcttactccattttgccactcgaagtcaacaattctcctcacaccagagtacacctaagtccccaaaaccagtccacaccagcaaccaaaaccaacacagcaaccacacaaatacaacaaccacatttttccccacccgtgccacccaagccaacacacaccatggtaacccgatccaaagcaggaattttcaaacctaaactttaccttgcctctgttcccacttcctctactgtcacctatctcaatcactccattcctgaaaccgtggaccaagccttagcctcacctcagtggcatgctgccatgaatgaagaaaaagttgctcttgttaaaaacaagacatgggttcttgtcaaaagagaaccatatatgcatgttgttgacaacaagtgggtataccgaataaaattcaattctgatggctctatcaatcggttcaaagctcgtctcgtcgcaaagggatttcaacaacaaccgggcattgatttcttcgagactttcagccctgttgtcaagcctattactatccgagtaatcctcactcttgctgtcactcatcattgggacattcaacaaattgacataaacaatgccttccttaatggcactttgcaagaggaggtgttcatggaacaaccggctggtttcattgatccccaacagcctcatgctgtctgtaaactctctaaagccttgtacggcttgaagcaagcacctcgcgcctggtttgataaattaaaaactacccttcttgctcttggttttctcaactgtgtggcagatacttcactgtttttctataacaaaggtaatgcattactctttgttttagtctatgttgacgatatccttcttacaggtaacaatgccactcaagtttcagaaataatcacttagcttcaggccaccattgctctcaaatccctcggtccagtcacttattttcttggttttgagataactagggggcaagacggtcttcatttatctcaaaccaagtatactcttgaccttcttcacaaaaccaatatgaccaatgccaaaccgtgtccaacaccaatgaaccaaagcaacaaactaagccttcaagacagtgcaccatttgaacatccaactctttatagaagcgtcataggttcccttcaataccttactctcagcagacccgatattgcttaccccgtaaataaactcatccaatttcttcaagccccaactcaaaatcattggagtgcctgcaagaaaattcttcgttactttattgggtctattggagatggtatatggttcactcactcacccaatttaaccattcaaggtttttgtgactcagattgggccagctctttagacgatagaaaatctacctcaggctactgcatttattttggcaacaatctagttagctggagctctcgaaagcaaaaagtcgtggcacgctcaagtacagaagccgaatatagagcacttgcccaagcctgcacagaggtagtttggctgcaatcgctttttgctgaagttggaattgactgtaaaggccctgctatactctggtgtgacaattctggtgcacgacagcttgcttccaatcctgtttttcactcaagaactaagcacatcgagattgatgtacatttcatcagagataaagttcagaacaaagaagtagaagtcagatacgttccaacacaagagcaagtagctgacattctcacaaagtcactcagcatctctcaattccactatctcaagaacaagctggctgttttgccctctccacagcacagcttgagggggcgtgttgaaaataataatgttgccataacagaattcagtgaggaccacaacaatcacaatgacaaatgacagctaatcattgccctctgccaacct

SEQ ID NO: 104341 - DNA, 631 bp, Cannabis sativa
ctcttttgttctggtttttctaaaaataattcatgcatttcaaaagtaactttttagttacttataattctgataagaaaccaattagttacttttgagtaaaaaaaattgttgttattattgtttcatcttttcatgatatcttttttaatatactataaataacatcaatcaactaacgtgcatctataatataatgaactttttcatcctgaattctattttttatttaatttttctgcatcttcaaaaagaatattttggttacttataatgtcgataaaaaactaattagttacttatacataaaaaaataattttatatcatatactttgagatgcaatttggttacctccaaaatttatttgtaaacatcttaataatcaaatagttattttgaagttatattatgatatatcatttaaaatatacttgggcaaccttatagtttatttttaaaactaatgaattgtcatataatataataagctaccatttttatataccaattattctatataaatttttcttactttgaacctacgtgtttatttttagattatattacattattttgttgctttaaatacttttacgttactttttttatttctcttttgtaacaatatt

SEQ ID NO: 104342 - DNA, 522 bp, Cannabis sativa
gagacatttctgcacaaacaaaaccacgcagttagaagcaaatatgaggtaaaagcatagtataaaaaaaagtaagtgcaagttaaaaataccctgcacgcggctaggggcattttcccgaacaagcactgacgggacatcatcgtctgaagagtccttctgctccaccaggatgactttccatttttcctccacaagggcagatggccgagcatgcatatcaagttccctaatcctgataatgtgttctgctggtgcttggtcggttgggagaacctttttcttcttcttgctcaacctctcctgctctgaatattattgagcatattgcttggctctattgtctcccttcaactttgccccacgcttgagttgaatgagctctctctcctgctcgatcccaccagctcggcttagttttgcctttttcttcttctctttcacgggcctcagtacaaagtcctttgggaagagtttgtacttgacatagtcggcctcagtggccaacaaagtgatgttccg

SEQ ID NO: 104343 - DNA, 856 bp, Cannabis sativa
  modified_base (417)..(426): a, c, t, g, unknown or other
  modified_base (521)..(525): a, c, t, g, unknown or other
  modified_base (607)..(612): a, c, t, g, unknown or other
  modified_base (802)..(827): a, c, t, g, unknown or other
taaaatagtcacgcgtgcaatacattgtttgaacgtagttttcggcgtgttaaacttttccaaatttcttaaaattttgtaggttgtcttaaataactgtaaagtacatgatcgtgagaaaaaatttgactaaaaaattatttcgggtgctaaaacaaataatagtacatcaatgtatctattttaaggggtgcattgtagaatttcccattaacatgttctcttcaagacaagataaatttcctagaatgaattaaaattttattttttcattttattttatagttacataattacatatttatctacaaataaattcatatagcttttttatacaaaataaacattgccacatataagatttctatttgcaccaataaaattattaatacaccccattattaaaaaaatataaannnnnnnnnnttttaaaaattactcttaatatttgtttaaaaataatttcctcacactattttatgttaatttcaatacttattttgatttcattttcataattnnnnntaactcatgtatatatattttttatttttttaaagaaaatttcatataatttttattttaatttttttatcataatatttannnnnnaatttaattttgtttgataggtatgttttttaagaatatcatgaattgaaagaaaaaagttaaaaaaaacttaatacaattaaagatataaattttatataaaataaaaattaataaaatagagtgtctttaaaaaaaatttgggtgtaaataaaattggagaattactccatatactattttttaactnnnnnnnnnnnnnnnnnnnnnnnnnngtttgggtttctaaagtggttgcatcgct

SEQ ID NO: 104344 - DNA, 625 bp, Cannabis sativa
aaggacaacaacttgaatcctgaggtggcgtccaccatttgatcaattcgaggcaaagggaagcaatctttcaggcagactttgttgagatcagttaagtgtatacaaacacgccacgtcccatttggtttgggtaccaacaccggattagccagccatttcgggtagtatagatcccagattaggccattggttaatagcttatccacctctttctctaaggcgtctacttttaccggatcaagaggacgttgcttttgctgtaccgcaggcatgtctgggttaacatttaagacatgggtgatcacatggggcttatgctggtcataatcccttggcaccacgcaaaaacatctatggcagcctttaatgtttcgataatcttgcttctttcctccagctctaggttttttcctagacggataaccttggtggagtcgaggtcacacacacttacttcctcagtgtcctccataggttctacagctgtttcggatcccacacggggatccaactcgtcatattccatcaatcttggtagctcacccctgtgcaccaccagcaccgaaaagtgcattgcgacgttgtagcattaccttgcttccccttggtttcccctcaccgt

SEQ ID NO: 104345 - DNA, 1099 bp, Cannabis sativa
  modified_base (287)..(288): a, c, t, g, unknown or other
tctcgcaatattaactaaaagagacctcgctatattaagaaaggcacacctcgcatatttgatgaagttgcagaatcaataggaaaaggcgcaaatacatacactaatcaacggaagtcaacagtcaaacattcaaggagcattcatgacaaacattacacatattttataatcgttgtaattaatttgattaataagcctattattattattattattaccattattttgtaacggtctcattatgaccattatttgtaatcgatgcctactacttataagtaganncttccccctccatttaaagggggctgatctgaataaagaaacagagctagagtactcttttcaacagtggattaggcaggccgagcccgaagctcatgctgaagtactatacttttctgtgtctattttatactatttacaatactcgcatatattatatactatattcttcaagtactcgttattttcatatcttatatattcagtgtaatttgaggcatctaaaattaaaagatgaagaagaaagtagtacaactagatatataagatatgatattaattgataatttaataatctcacagtgatcatttttaatgaattgttttaattgatcagagggattccctaatttagctaacataataatgtaatgtaattaattagaagtgattttgtatggtagaagattggtgttggaattggggttggagttggagttggacttgtcaagaatagaccacatgacttggacatcttcataagcacatgccatgacttcaccctcaagctgatccatcaccaatattctattactctccctgctgttttcttcttcttcttctgcatatacaatccatacatacatcaatatcatcacactttcaataatatatatatatatatatatttatatgatagtcatatacaattatacatatataccttggagttggaggtcatgatgatgagatttgttattagtagtagtggattgttggtgattgaagaaagtgcgagctttcttgaagggagttgcaatggtcttcttccaagatgccatgtataaattcctatataggatatgatatg

SEQ ID NO: 104346 - DNA, 3052 bp, Cannabis sativa
  modified_base (283)..(287): a, c, t, g, unknown or other
  modified_base (2975)..(2979): a, c, t, g, unknown or other
ctggtaaaatattcccaacactatgggcctctgctcagtcgggagggtttttttcttcttgagcggcctctcctgctcagaatattctttagcctccttctactgctcagaatattcttgagcatactgcttggctctagcatcacccttcaacttagcctcacgcttaagttgaatgagctccttctcctactcagctcccttagcctggccagccctggacttcttcttccccttcacaggctggggtataaagtctgccggataaagcttgtacttcacnnnnntgtcctccgaggtcaacaaagtgatattccgagcagcatctagcagttggactatcttttgagccatatccctaagtaccaatgtaaggggtggacggcagtatattgggatctgttgaaaccgagtttaggtggtatccataccttccacgaagtagtactcgtcaacaaaaccccccatcttgctaacatccttgtccattgtgcccgtcagccttttgaagtctggctgagagaagtagaagtaccccaacctgctctgcttaggggtagacttcaagtcaaaaaaccaattgacctcatgtggggacggcacaccccatccttgaatggcgtagaggacgaacaggtagacaagtacttaatgcccttgggagtgaattgggtcggacaaaggcgaaaataatccgcaaccctcttgaagtacgagtgcaaaggcaacatcgctcattgcttagtctgagcacctgagcaagcacaaaaccctttctttgggttggttgcccagtgattcaaagagggaacgtaacactcaagtccgcccaagtacccagccatatccaaggccctcatatgtgcctcgcttatcttggattgagggcacacccatctggcccctagagcactttgtctcctgtggggaactgcctcggtaagctcctcggtgacatagtcttcccccttgaccaagacatcaccctccacggaaatcggctccccgacctcattataccctccaaaattttgaggttcggccactccttcctcctcagctttggaagggcaatcaggacggacatcatcctgttcctctatctcttggacctcaatgtccccctcgtgatcctcctcttccacggcgggtagatcctgctcgacacttggcaatgtggcaagctgggccacgtgagggtcagacatattgactttctgcatcgtctgctttgtgcgggccatcatccttctcctagacagatgctgatgtgtgtgccgtgcaacagtaatgggagggatagctattgggatgccaaagttaccagaacttggacggccaacaggaaaggtattagcaacacctggccggacaatatacgtccggttggatgaaagataacgcctccaacccttcttcaattcgcaaatgaagcaaccgtacccttctcctacgatttgcttggagtaaaagtggtgttgcacttcgggttctggagttggagaatgatcactactcacttctgaatcttcaaagctcgagttagaaagtccatcactcgaagaggacagactggcacgaagatgaggttgatcctcgtacaaaagttgaagcaaatctaggtcaattcggtgtttgcctccccaaaactcaccagaattcatctacaaaagacaacacacgagatgagtgtttggttgggatatcgaataataaacaggcaaatacattgaccaggaccacccaacagattaaaaagatggaaaatgcacaaaatattaagctagaacccaagagtttgaaattttttgggttaaaggctaaaattcacgaagcttggaataagcaaggtgagaatcgagcattgcgagattaaaggcaaaatgttgtaaaccacgaagttgtatgaactattgtggagacaactacaaagttttgagtctagattttctatgtatcttctacaacaagtcaagaacaaaggtattttctacaatggaaacctagaaattaaaaatgcaaagttaaaagaggagaagattgaaaacttactgtttgaagcctaaattagtctagacgaagttgctcggatgcctctgatagaaatctcacgacaaacttgaagaaaattccttttcgggtttgctttgtggagaaaatggtgaaagtgatttctaaagaagtttcagccttatttataggcaatttggtgaaaagaggtaatcatttcaaaaatccctcagacgcttcgatttcccccaaaaaataaatattgggaaataaaaaagcaatcaagtgcctcaaataatcatcaaagcgtgcaaaggaaactgtgtttcgaggtaataattaagtcagagcattaattagccaaaaatcgaagagatgcctagtcagactcacatcgaatcacgaacagacacacacaacacgtgtaacccattcaagtataaaagcaggtcggatgaagtctacacgtaactctggaagtcctatacagacttgggggaaaattttatcctaatttttgcactctgatgtggcatcacacgctggtgacacgtggaattaactccacatatctgcctgaaagagatgttttgagaattcctcctagccgagcagtggacaatccaaatagcatgccaatacttagcaacttcagcatttacatcgtgaagcacaaaagtaatccctataaatctaggattgtatcacagagatatggcaagctgtccaaatccctcaatcagtgtattctatatatgtaatgtgtaatcttaccaattatagacattataaacaaaagggaaaccttccctcaagcacatagctctataaatagtgatcaattctcactgggcaaagggtcaacaaaaattatctaagagagcatactcagagatgtcgttgtaagagctttaagtgaagaatctctatattctttgttcttaagtcaatacaaatcaaggggnnnnngctattaccgaactgctcggggccgaacctctttaaaaactctgtgttctttatttatcttttcacattatat

SEQ ID NO: 104347 - DNA, 1066 bp, Cannabis sativa
  modified_base (53)..(61): a, c, t, g, unknown or other
ttggttgaatagtcaagtttgacattaattgacaaagtgtcaagtggatgagnnnnnnnnntcatgttccttttatagtgtttctgtaatgacaacattagtaatttagattagtaaaggcagttaacactaattattggtatttttataattatttatgaatttaaattatttgtgggccccattattagaaatgggcattagagttatagtttctcaattacgaagattttattaaactctaggtgtattattttaattatatgtgaaatatgttatttttacaatttttgcttgtcgacaacagaaaatgcgatggatggctagtttgatcacataggtaagtctagaaccttatttcttagtaggatatttattgaagaaaatagaataccgagtttgagcggggttatgatttttgaccattttacccctaggctttattttacttaagttgtaagtaagggagtattttggtaatttcaaatggtgacctaggtggctgcttggtgttgtggcagttgtccttttgggttaattccagtagcaataaggttcaattagttaaccttttagagaaaagcaaagaaaatcaagaaattaagaaaaaaaaaaatcaagagaacccttttctctctcttcttgttcgtacaccacaacccagggggaactcagcagctttttcatctgattttctaagaattcaaccattgaatcaagagtaattggagtaggtaagctctagaatttctaaccttgagtttttaaagctgtgtattggttttaacttgtgattttggaaattaggatttgttagggtttagcggttgtgtagtctgatttctaagttgattttaagctctggatactagttttggtgtatggagatagaattgagtaagcttgagctttggaactcaagtttaggtctttaatgacataatttgactaagtgactttttttgggaatttttggttggaatatgttgtgtatacattgtttaggtactctggaaagtttgaaggcaattggaaaagtttggagcaaattggtgaatttttggga

SEQ ID NO: 104348 - DNA, 630 bp, Cannabis sativa
tcttaaccatttggtgagcttaacaattgggctcaagacggcttaagcataaagccggtatatcatttcttatatatgtgtgttatgcatatcttattgagtttgtcgactcatcagtttactaccttatgtaggtaagggtaaagctaagctggaggagcagtgagttggaacttggcaatgattgtacatatcgcggtagtgcaacctggagagttttgatctttcaatactttgaagtatatttcatggctgctctgtgattttctagtgtgtataaaaaaaatattatgtaacttgatatacaatatatgtattttcaataagtgtttttttttaactggggatcccgatttacgaagttatataaattatttttgaattagtaagttttaaaagtcaggcgttacaataaggatggtatcgttgaggaagaaagttattattattttagtcctactctacttattaaactttcaatgaaactaattttgtatttaagttaaaatagatggtttggatgacttaaattagctatgtactagttagaaaagatgaatggtggatgctagacattattttggtatttcattgacctattaaatctatttattcggtgactacataact

SEQ ID NO: 104349 - DNA, 1323 bp, Cannabis sativa
  modified_base (1294)..(1297): a, c, t, g, unknown or other
tcacttgcgcctggtcaggtgtgtgtcttacacgcgatctggaccttccgataaggacgtggacgactgcgatgggaagctaactttgaccgcaagtgggccttgcataagggctgatgagatttcttttaaaaattgcacttttagctctatttctccaatatttcttcaatttaatcccaatctttttcttccaaacacacctaaaaatacataaaattaattagaaaactaaaataaaattaaaaataaataccacataacaacttataacaaaataattataaaaacacacaaaaacatataaaattacaataaagctaataacaaagaccaattaatgaataaaaaaaatgtttatgttaaatttattgtgtctaaaccacttgctaacaagattaacttcttaaatttattctttcaattccacctgcgtacaacggacaacaccccaagaaaagtcccatgcaaggtttgtgaaacttcgcgaatagcaagtgaccaagagacctaagtctgcatggtcacttggggggcacccacaccgtacaatgcatcaaactagcacaaagaacttttgttgagaaattttaacgcttagaataagctactaaacctacctttaagttgtgcaagcatacttcggcttgacaagtatatccagacacttacatgtcaaggccataagaatatagctaggattaaagaccgcctagtcgatcgcacaatacatgataaaaagtaacagggtcaaacaatagtagtgttcaaaaacagagggcctatagggcaaatatacaaacatgaaggccctagggctgaaaataagtaatgttgtaaatgtaaaaagccacaggccatacagaacatgaaaatattgtctatattatagaactataatgttgagtactaataattgaaaaatactatacatgtgtgtaggggcaggtggagccgatctgaagctgcaagatcaagattgtcggagtccaggttttccacagcatcaacaagctggtcagcctggtggtcaatatcttggccaactacctcctcagtaagtgggccagacagcctctcatcatggtttcctgaggatgacccctctcaataaatgatagtctggtctgctcccaaccggctctcgcagagcagctttcctcaagccaactagctctctaagaaagcctcactgcccatgtatgacaagtcagctctggggttatgcaacttgaactcatagatgagttttgaggacaagatgattgtaatacccggaattaagaaatggatnnnnaaaaccctaactagataattatgtat

SEQ ID NO: 104350 - DNA, 595 bp, Cannabis sativa
aggagcgggctgcggcatgctccagagcatgctacgacatctgggtgcagaacccagaaaaccagcagctctacacgattttcaacaacaaaattcaatcttttccatctcaaaactcaatcaaacactcaaattaccaaatattgatgctaacaatcaacaacgaaataaaattcaagtttcaaattaccaaatattgatgctaacaatcaacaacgaaataaaattcaagatttcagattgcatgacacacaaactcatgcttcaaacttgctacactcaagctcaagaactttgagctaaaacccaatactcacacatattttccagtggctaccaaccacaaacagcaaataaataatcaaattcaatcttgacaagcatccaagaattattctctaagctcaatccacacaagtcaagagattaacatacaaactaacaagattaagcatccttttcaccacacatgcaaaacccaaaatcaaataacctaagcatgtttctaccacaatatttcagcaagggaaaaaaaatttaaaaccataaaaactacctcaatcacttgcataattaagcctcaagcctccaacac

SEQ ID NO: 104351 - DNA, 976 bp, Cannabis sativa
tataaataattttcataattaatcgtaattaactgctaatttccaaattaaactaagcggtctttacatgttggtaatgaacagcactcaattgtggcaaaagggcttgattatctataggggacttgttggtgtcattgctggtttgaaactggttgacagcagattccttgttattttttccatacccaggagggtatccatgaatcttgtagcacttctcaatggtatgtccaaggatgttgcaatgagtgcaaaaatgtctattctttctaggaggtttgtttccttgggtatctttcttgttgatactggttttatcaccttggaaagcaaaagctagttgctgattttgttcagtattgctgttggtatggcccttctggttttcttcctgagtaactaagtggaagaccctgttaattttgggtaaaggttacattaagagaatgctacttctgatttgagaaaaggagtcagataaacccataagaaaggacatgatgtattccatatggtggtgttcttgaaatttcttaacaccaccacaagtacatccattacaaaacaagttggtctgtaattagacagttgctcccatatagtttttaattttgtgaaatacatgctaacagattgattttcttgtttcagattcatcaagccttttagcaaattgtatatatggggtccatttctttgttgaaatctgatcttaagatcaatccaaatagctgcagcagactcatcatacaatatgctagaagagatttctttggacacagaatttaatatccaagaaataacaatattgttgtttctaagccaagcattatacatgatagaatcagaaggcatgggtgtagagatggtaccatagaatccgagtttgtttttaacagagattgctaattgcatagctctactccaagacatgtagttatcttgtcccgtgagaagctgagatacaagaaca

SEQ ID NO: 104352 - DNA, 1705 bp, Cannabis sativa
  modified_base (767)..(769): a, c, t, g, unknown or other
  modified_base (1032)..(1032): a, c, t, g, unknown or other
  modified_base (1568)..(1570): a, c, t, g, unknown or other
aaatgtaaacagttttgtcatagcacttttagatcgaattataattaaattttattttgaaaaaaaaataatttaggttactatttgtactattttaaaaaatacaaggtccattttgtcatttaacaaaataaagggtccaatttgtaacttttgcaaaacacagggtccaaaatggtatatacccttgaaaatatttatttggttatttttaaattatttatcgtattagatatttaatttaatttgattaaataattcaaaataaacctatatattttgaaattactttaaattttaaattctgaaaagatatttaaggttgtttcgacaatcctaaattttcaaaatttagttagttattcaaatgaaaatttaattatataataataaatatcttacttcatatttgtgacatggatattgtttgtttatttaaattttttattcaaatttttttccaaacctattatttatttgatctaaattgctatgattaacttattaagagatccaatgatataattttaatcatagtccaattgtcaatagatcatataaattgctatatgtttgctttgagacttagatgcatataggaagcccatttaattctagatatttaaatggaaaaggttgctaaaataaaatatcacccatgattgttttatttagacccaatgagtattgagcttattcaattaataacaattatttaatgaaaggttcaattcctctcttctgtgccttgtgtgagagttaggggnnnattaatagtgggtacgacatactagacctagtcctccctcacatgaacaaccccaactgtgaagggccattttccttaatgaaataattatattaggctaattattctagtttaacctaattaaaatcgaattagcaacataattaattttaaaataaataaaaattaattatttattggattattttaaaattaatttagaaaaaaacactttgtttaaataaatgattctagatatcatttctagtaactaatttatattntctaatatttaattaagtaaaaaactataattaatttaaaaattaattttagactaacttaaattaggatatttttcttagaacgtaaaatagaattaataattaagttaattttattcaaaatacttaattatttattctatatcaagaaatttaattaaatagaaaacatatttaagttgaaaattaatctatttaattaattttagatgaacttaaattagaatgtttttttagatattaaatttgaattaataatttaggtcattttattcaagacactttattaattgtttctattttaataaatttaattaaatagaaaattatacttaagttagaaaattttcaatttcagaaaaatttaaagaataatttttaaaatatattttattttatttttaatcatttttgatgaaaatttagaattacatttattttaaatattaatatttcgaaaattttcaattttaaaaattagattaaagttattaattaattttagatcaacttatatcaagtaattttcattaatnnntgattaaaataaatagactaaaaatattatactttcattacaaaatcaataattagtttatgaaatatcttgatagttattttctaggtagagtttttggtgtatttctagatatatttaattaaattgaaaatt

SEQ ID NO: 104353 - DNA, 1016 bp, Cannabis sativa
acatgcaaagctcgagtttgaaccgtttatctaatatttaaatgaatatgtgttgtattgctggttgttgtttaacaggactatagcttgaatatttaacaaattgcatggatattttaaagtgtgtgcgacattatgcgacattgttgcgattcttgtgtgattttctctcatatttgtaattgctgtttgtgcgcaatttgtatgcgatgtgtgtgcgacattgtgcgattttattttaatttgttatttgagattcatatgcaatttctggccacatttaacgatgtctatgcgatgtgtgtgcgatatttttgttttagcgaactaagcaagttattatttcaactttgataatatttgcgatttctatgcgatatatgtgtgacagttgagcgatttcatatttcacagtataatataatacaattacaaaagtttatgtgtataagaataacattacaaaaacctacaaaaaactaccatgtcaagttctgataaaataagtccacacaccacctatgtctaaaggtgagcatgttatcatcattaactagctctaacgatcggtccagcatgcagtgctcaatgtactccatggcaaacactccacaatcgccactacaaattaaaaaattagtaaatattagcaacaattaagttaagtaattccattcataaactacaaaagagatttgcaaaaagagatttacctggtctctgtttttggtgcaacctcaggggtagctcttctataatgtaggggtaggagctgactgagatcaccgcaatcaaccggatgtacataattgttatattgaaaataaccgctagctcgaattagatttgtaaacaactcgttgtaaggcttcaaatatgactccatgttttcctccggggtggcaccgatatcacaatcgtatacaatgatctcccagttgtcaatatccacctcaactgccacccagtggtgctctttgggaaggttcaatacaaagtagatgtaatcctggttc

SEQ ID NO: 104354 - DNA, 622 bp, Cannabis sativa
ctatacttcgtacagaccaaattatttcaccttttttagctctccttaaatactgatatattattgtacatccattttcaatttaattggaaaatataaataaaaaagattttttttttccttttgtaagataaaatatataaatataaattaaaagtatttttttttctttagtaagataatatatataaatatagtattaataacatgtaatgtaaatgtaatgtataaaaaaacatataatgtatgtttacttaaagttgtatcagaatattatactataataaatgtatgcttacttagagttgtatcagaatattatattataataaatgtatgcttacttagagttgtatcagagttgtaatgtaatgcataaaaaaacatataatgtatgtttacttagaattgtatcagaatactatattatttaattattcaagctctttttacggattggactcgagctcaagatacaattattactccaactgctgcatttcttactggtgtagatggagttgaaacacggaccaaacttgctggtaacactttgaagattaatgtagatgctgccatttttccagggaatatgcaacttatagtttcgcaggggtggtta

SEQ ID NO: 104355 - DNA, 631 bp, Cannabis sativa
gcttgcaatttttgacacagtagaatttggtgtgactttaaaaccaggggctgtttgttgtgattatttgggtgaattggagtttgttgaggtgttggaagtgttgaaatcttggatatatgggaatgtgaataatatatacagggggattgtaccatggctaattgaggtgtgaactattgtgtgagtgagttgctgtgaaagtaagttgatgtggttggtcagattgggggattttgagcaagattagattaatgctagagtagtgtattgttggaattaggggtgtggtgctggacagtttttaaaaaagagaaaagaagaggggaatttctttgtggctatgtagtcttcaaccaaagaaaatgtctaacattcaagagggtgacgccccgttttgatcccaagttcccggacttccctcagcatgttctagacccgtggggtggaccatcagctttaaatacagaggagccccacgaggactccgagtagagggagttttctaatacctaagctattttgtatttttctgttttgtgttgttttttagtttgtattgtactagttgtgtgttgtcttttgtgtttggaacttttattttatgttgtttatgtgattgttagtttga

SEQ ID NO: 104356 - DNA, 793 bp, Cannabis sativa
tatgtgaggtcaatttgcaaggatctgacttatttggtgttgattggtttctagctagctctagggacacatttactaacttttattaaatgcttagtagagtttgaatatcttaaatatttaaccgtagtgaagtaggttctgcgatatattgtactacggtcagatgggtagaataatatgcatgttagatgagtttgaatatcttacatattcatattcatagtttaataggttctgcgaatacatgtactgcggtcggatggatggtaaatttttatattgctaaatatcattgtgattgttttagattgtgttttattgttattaatagctttaaatttttgagaatgttcaattatagtaatttagtatactataattagttactagttgttaacgaagatttttgttaaccaaatttgagcatcacgatgataattcaacacagaaaaaataaaagctatagaaaaataataatatgaacaccaattttttaagtgattttgcagttaaaattgtgcatagtccacaagtcaatcttattcaaatttctaagtatttttttaaggcctctttcataagagtttttttcgtccctttttgagtttgtttgccactatttatgcatagtggcagttaattacaaagctgaccaaaatatgattatagccactatccctaaaatcgtgggatctggttacataaaaatataaatgcggtgtatgattttgaaaatcatatagctatgattttgaaaatcatatatctatgattttcccgcttttactgg

SEQ ID NO: 104357 - DNA, 722 bp, Cannabis sativa
ttttagaagttcagatttaggatgttaaacaacatacttgttagtaaattctaagatcctggtaaaatatttccaacagttccttcaaactgagtttgaaggatttgtcaagcttccttagaagattcacacgataatataagcttaatataactttcacctacaccattaaatatagcatgcaaagctttgctattgtaggcagaaagtttatcatcttcactataccattccagttcagattttattttagaattaccttcgaaatctatctcagctggagaagaccaatctgatagaaccatcctccaagctctctcatcttgagatttgatgaaggccctcattctaactttccaataaggataattagaatcattgagcaaagttagtctagaaatcaaacttccttctataaaaaatgacattttacacaaaacacacgaaaccgttaaaaggaccacactaagagtttagtgtctcgctttgataccaaatgaaaaaacaaaattttgcaaatatcaataaatattacaaaaatatactaaacataaatctgtaaacgtctgcagtagcagaatgtaattctgttactacagaaacaaaccagaaatcgcaaaatataaaaataattgcagaaaattaaatcacttgacactagagatttgtacgtggtatcagtgttctttcaaacactactagtccacggggccacactcaga

SEQ ID NO: 104358 - DNA, 700 bp, Cannabis sativa
  modified_base (673)..(675): a, c, t, g, unknown or other
aaaaagatgttattttccctattttagaagagatatttatctatttgaattaggatcttttgtaagccctacactatataaagggcattagactacatgaaaagggacctcaatctcatgtctcacgcatctatagcctctcactctctaagtcctacacgtcacttatgcttcctaaacaagtcaattttcttcataaagttcttccttcacaagatctcacaagtaagttcttggtctgtaacactttattttcactactgtaatactaaagagagccatagctagaaattacaagctctaagcttgtaatctacatggtattatctttagagtaaatacaacaaaagggggaataggtcattacccgttcatcaagggggctaaacctttataaattcctatgtcatttttaatatttattgttattgtttatacgtagtgataattaacaatcaataaggctccactgtctattgactaaattttgagtcaacatttttgtaatatcttgataagcttaatggtaaataattaggatttatatttatattatgggttaattgttgggatcttgtccactaaataaaatacatcacaatacaatttgatttgttatcaatagaagattagaagtcatttatgttcacatgtagttttcatgtttatggtnnnatgtgtacaaaatctgttaagtcca

SEQ ID NO: 104359 - DNA, 758 bp, Cannabis sativa
aagtcgatacctactggcaattttttgtttggcttgggtactagtacggggttagctacctaggccggtaaaaagcttcaattctgaaattgttgttgcgaaacttttctacctcttctcttagtgctagggatcgttctttgtctattagtcttcttttttattaaacaagccgaatgtttggatcgatgttcaaggcatgtgaaattatagaaggatcgattctgaccatgtcctcatgcgaccaggaaaaaatgtataggtttgctcttagaaattttctcagtgctgattttacttcgaacaacaaaccttttcaaattttgagtttcctagttcgaacatttgggtcaatttcaatttcttctagttcttccaccggcccaacatttgtatttggttccccaagtcagggatccacatcttcatccctgccttgggcggttccctatttggcaatgttctttcccttgtccgaactctgactggaggattttttgtttttagccttggttagggcaaggttgtaatattccagtgcaacttgttgattccctctcagggaccctacgccattctttcttgcgaacttgatgcatgaatgaaatatcaatgtaacaacttttaagtcatataaagcttgtcggcccaacataacattgaaagctgatggaacatccaataccaaaaattgtgccatcacagttatgctctttggagctcgcccaacagtgagggtaggcaaatttgccctaaag

SEQ ID NO: 104360 - DNA, 1092 bp, Cannabis sativa
atcaaaaatatacaaagtgataaatcattaaaagtatattcttgcttaaaatagattataactttttatgcaaataaaaattgataactgcttgcacacatagtagatcactaaatacttaattaatatcaaaggaaaatatgagcaatggaaatgcctgaagtattttaaatttgatcaaaatataattgttcaagttgtgaatgaaaagtatgaagcattcaataaagataaggtaaaagcaaagttggccatccaaccttgtaaatttgtctttacaaaaagtgccacaaggggcaaatcattgtctcggccttaaggacatttacctaaataaaataaaaataaataaaagccaaggctacatagcaagagacttggacagtgctacttttttttctgcctcgacatcttattcttccttttaagtgttctcacaaaggggaaggatttcctcctcagaatctcccaagaaactcgtgtccatctttggattttccatccaagcttagtaaatggtacgaaggccagcaacgttgcatcggtcaatggttttcgcttcttttccatctagtgtgaccttggcagcatcaagttccccttggagtttctggcatgcattgaccttgtcctttgcctccttttgagtagcttcaagctcggcctcaaggttcctcttcaccttctcggcatctttggtgatgcgagtattctccggtatggcatcattccattggacgacaaaggaactgaaagatatttggaaaccaacaaacaaaaatacgtaagtatttcgaaggataaaaaagggagacgagtagataaggataaagaagattaccgagaggctgtgagatatactccttgtgagcatctcccccagatccccattattaattaaatcccattcatgggggaggaaagccttaaaatgacgccagcatgcggcactgaagtctctagtgtattctgggctagctttccctgcctcgacaggcaaggtttcaagggcttggctcgaagagggagaagcttgagtggctttggggataggtttgacggtacttgcggaggttggaggagggattggat

SEQ ID NO: 104361 - DNA, 611 bp, Cannabis sativa
ggattattgttgtaggatatcagtctgatttgtaattaactgccctcctatgtaactataaataggagcaggatacactaaaaagggagggaaattccttaagagaaaaagccttagtattgtataagaaatatctaataagatagactcgtagactatgcagaattttaactgccaaaaccacgtaaaaaagctttgtgttctttctatttcctatacttctattatttctgtgccaattgatcacgaaataggctttaatttagttaacaaaaatctgcgttcactgtttaactctaattcttgcatcatttacctctaatttggatttgggtcctagagttctgggtttatatgggacatcaagttcagtaggacactctatttctaattcttctcaataataaacttctgaaaaagattgggacattgctgtaaggaggaagcaatccccattcctggaaaaaattcatcaaactagaagttggtaaattggagaatttcaaaaaacctacattcgacctaaaccctaatatttacccagaataaattctaccctaaaggtgctaaaatcgaatgaggtaacaaaggtgctgactaagaaattagaa

SEQ ID NO: 104362 - DNA, 560 bp, Cannabis sativa
tcccaggtggcttcctccaccttgctgtttctccaaagtattttgaccaaagctatggtctttttccgaaggagcttatctttttcgtctaggatctgaactggctgttcttcgtatgataagtctgattgcagctcaagattttcataacctagaacatgggcagggtctaaaacgtactgccttagcatagagacatggaatacgttatggactgctgaaatagctggaggcaaatctaaacgatatgccacttgtcaaaccttctggagaatctcgaaaggtcctgtaattctagggcataacttgcctcttttcccgagatgcttgatccatttcattggagacactcgcaggaacacatgatcccctatttaaaactctacatttttgcgtttcagatttgcataactcttttgcctgctctgagaggcaagcatcctggctttaattttctcaattttttcattagtccgtggtactgatgtaatatccagtttatatacatatattggtatttggtaaattaagtgtgatacaattatattgttattattatt

SEQ ID NO: 104363 - DNA, 1338 bp, Cannabis sativa
  modified_base (828)..(832): a, c, t, g, unknown or other
tttaaatcatcaagcacacttagtgaaataagatttctagacaaatcaggtacatatcttacccctgttagtgatctagtgaccccatcatgcattctaaatgccactgttcctgctcttttaatttcacagctttggtcattccctagaatcacttttcctttagtagagtccctgaaatcagtcgcaatagatctattattagtcatgtgaaaagtacaactagagtcaagtatccaatcatcttaaaaggatgaccttgcaacataaacttccccatcttcataacagtcactcaaatttatattttggtgatctattttatttttagggtttctggaatctgaattgtagtcatttctttgcccattaaattttttctttctgtttttgttcaagaaatagcagtctttcttgaaatgtccaagttttccacagttatagcatccttcagtgtcttgtggccctttaaagttaggtcttcctttgttttgtcctttgattggacccctgctatgactttgactccttcctttcccatgccaaggctttctttaagtagatctgcctctactcagatttagttcaccattagagccaccattcctttctatcttcatctctaagtcctttgattttaaggcagagataacctcatcaagagtgatagaggttcttccatacttaattgttgtttttacttctctgtaagtttctggcagtgcattaagtatgatgatggcttggttctcatcaatgagtgcctcattctaccctgagtttgcaagttcaaatatgcattctcaagaattcatcaagattttgatnnnnngttttggattggttcattttgaaaccaaaaatcctttccttgagataaatcttgtttgtcaaagatttctgttgaaactgctcttctagatttttctaaatctttgatgaagtgtcttccttgtctaccaatctaattattacatctgatagattgaagattaggattccagtagcagtttctaagtattcttcctgctgaatctttgaggttccttctggcaattcaataggttcatctagcacccttagcagtttttgttgagctaggagagacctaattttccttctccagattctgtaatcacatgtaccatcaaatttatcaatatcaacttttatgttactcatattaataaaattgaaatcagataaatttttagaaatctcagtttgtgatgtttctgtttttggatctgaatttgttcagaaatttgatcttctttcaggtttcagtgcattcttaattgttaatctttctttcaagatttcttgccaatttccttc

SEQ ID NO: 104364 - DNA, 763 bp, Cannabis sativa
atacagaagtggaaaagatgtctgggaatcataattcatagaatggtggccaatggattactccccatataaaaggtctcaagaatttgccaattcaaaaaaataataaaagtaattctggagttagtttgaatgctttaataagtaatatttttgaggttttgcagagcctttggatgagattcataataaatctacttctctcccaaatggagtggtgtaatatcttgagttagaaagtgagatgcattaaaaaagttaataaacaaagatttattcaggatgtttgtcgtttgaataggataggctttgctgctttgttgaatcaaaggttcggggtgataaaataaagagtatgatgtgtagtaatttttctaaatgggagtttcatactagtatgtccattgaggggtgcattttgttattatggcaaaagaagtttgtccatgtagaggtgattttgaagatgatcaactgattcattgcaaggtcaaagtcattggccttaattctaagttttttattacaaaagtttatgggaaaaattccatagctgaaaggaaaattctttgggataatttgtctagttttagtttggtgcaacttcattggctcattttgggtgattttaacgtgatgttttgttgaaaaatctttaaccaggatcttataaactattcatgtatgtaaaattaattctaatctaacatcctaatatgaaaaatctaaaataataaataaaaacataaagggatgtggaaat

SEQ ID NO: 104365 - DNA, 996 bp, Cannabis sativa
ttgtaaaataatttccaacaggcgtttaggtcaggagagaaaagatagagagaatgagagagatactaaaagcagcaactgtatgtatatatatatctgagaggggatcatgatgtccctctttatttcatttatagttttcaatctgaaacaacatcattatatataaatcttgctgctcgcatcctcctctactccctcatcttctttcgttctcagatttactctttatctctttccctttgggacctcgtgatactctctcaatctttcttaaggttcttctataatttcttttgttttctcttctggctttcatatatatagaatttggtgtgaaaatgatgaaagagatttataaagagtgatgattgcttattgtttttgatgtcatgatgttgctgctcaaaaagaggaaatgataaattaggttatatgagaagatgaagattaaaaattagcttttttttttaaaaaaaaaaagtaaaattgattttgattggttgttaatttttttttaattaggtgtcagatttttttttttttccaaaaaagaaattttaataacctacaaacaaatacatcttacacaatcttgacttttaaagtcatataaatcaatggttaaaaaaaatgtgtgtatagtataggagcaaaaacatagtcactaccatagaattattctatatataatgtcccattaaaattagattgtttaagaaaaatcttttgaggttgaatttgtctttttcttcttggaattaaaatgaaatttttggaattatcaattgctctaaaatatactattctttcattttattttatttttttaaaaaataaatcatagatatataataataaaaaatgtgagtctaaaaaaatgaaaaatattttatataattatatcttggatttaaacatttaccaacttagaattatttttttagaaaatattatatatctttatatattaaaagtgtctatctaacggcattt

SEQ ID NO: 104366 - DNA, 617 bp, Cannabis sativa
taaacccaaacccgaacctgaacccaaatcaaaacccaaacagagacctaaacccaaacctataccgggaccaaaacccacacaataaccaggacctagagcagaatcatgacacggacctgggaaacagaactaggaccgggacctagtacccgaccctgtcccaaacttgaacctaggacccagctcgtgacccgccactaaaaatggaaccagacttggacccgagattgggatccggatcttgacacatggcttggaaaaaactcgtagtcgttgtctggatttgggacccagcattggacccgaaccatcacaaggacccggacctgaacccagtcccaaaccaaaaagttgacctgaacccgtaccctgtgacccgaaattggaaccaaaacaggaagttgaccgggactagaactaggatttggtcttggaatcataactgaaatttgacctagatccagaaccgtaatcggacaaggacccgcactccaaataagtcctagacccaaattgggagccttacccggatcccaacccaatcctgaacttaggaccagaacccgaacctaaactcagaccccaaacatggaaccagactagggacacagaac

SEQ ID NO: 104367 - DNA, 4087 bp, Cannabis sativa
taataagcactattggtgtgttttaattagcatttagcattagtaaatattaatgatcagtcctcacacacgtgtagcaacaactaataactattcacgataacacaaacgcgtaaaatataatcaaagcaagggaattaataaaaattaatgaccaccaccacacactcaactctcgagtaataagaatgggaacacgtcaatatgtttacagtactctctagtctctagtctctagttttgatatcaataatttaacgataggaacatgtcaagggtcactcttatgtatgtccacatattttttataattaaccacctatatcgcgtgaagagagatactctcagattttatctcaatattttatgaggttatgagttggtttctttggttggcaggaaacattgcatgaacatcggtcagatagtgtttgataattattagatccaaatctgaatccatgttgctattgcattgcatgcattaatacttggaccaattaagatgcttattaattaatgtctctctccttcatctcatcatactataaatatgttgtgcactaggccaaggtaataaaccaaaccaaaccaaaactaagatcaaagtatatttacattatattttttgatcatcaatattagtcataataacaaaatggctccctccaaatctcagtaccatattcgctctaacagctttcccacaagaccacaccctcttttccagcaatgcgacgagcatttgtgccggttaggagcttccgatgcaacctcttcctcttcagtaagcctgaaactaagtggtcttgaggacttgcatgattcagttgagaagctgttccaactacctctaactcaacaagcctttgtccaaggccgtcaagagaaatgggttgatgaattggtcgacggtactctgagggtcttggacatgtgcagcgcagccaaagatgctgtgctgcacaccaaagaatgcgcacgagaagttcaatctatcgtgcgcagaaggcgaggtgctgaagtacttggccttgttggcgaggtcaagaaatacatggcctcaaggaaagttgtgaaaaaggcaatccgtaaggcgttggacaacatgaaggctggtgctaattataaatcttcatcttccaacaaagaaagcagtgctgaaaccatggccttaattagtgttttgaaagaagttgaagcagtgactctttcaatttttgagtccttgttgtgctttgtttctggaccaaagtcacaaaccatgatgagtggttggtctttggtttccaagcttgtgtacaagaaaaaagtgagttgtgatcaggatgatgatcaagccgatgcgaacgaattcgcaaaggctgatgaagcgttgcagtgcctcatgtaccatgagactgccaagtttgacaacactactcacattgagaatgttcagaacgaactgcacagtctcgagtcatgtgttcaagattttgaagagagattagagaggttgtttaggcgtttaatcaaaactagagtttcccttctcaacatccttaactattagctagatatatcagaaaatcatgttatccactatgggacttcaaaattttagtgtcccggatatatttatctatttttatgctattatatatatttgtacatgattgcataatgcatatgtatatctacatcaaattaatgcagtaaatttatctaaagctcttttttttttatatactctatgttttcttaattttattaaatctttaacttttgtagactaaataagttattatatataattagcaaattacgtaccaagccttgaagacgtatgttaatgtaaaaatccattaaatattagtagttacatatagcgctatttcttatacataaatatatattgaaaattacatcagtaaaattttgtttggaatgatggagagaattataacttaattatcaagtaattgttcaaattttttaatcaaatattaaagctttatgtatattgcaattattagttgtctgaaacatgataatatgtaaaactaagattagaaataaattatagcattaaacacaaataacgacttgaatcacatgctatgcaatggactccacatgttagctgtctatcagttaggaggccagtggaatcagttagttgcttatttctgcttaacatatctcatgtgggtcgtttatatattcattctatgcaacttattagcaggagcgcattataatttatattaattagcttgattatttgatcaaagtatatatcatgtgggtatttcattaatcaataattctatatatctaaataacgcaccatataaagatcatgaaatatataattaaacgttctttattattattattattatttaaattaatctctggtggtgggtcgtttattttactctaaaccacgcaacttattaggagggaagaccatattaattaattcatcatttcgctttttgattagttattaaagatgatcatatgtgtggatatatatgaacgtgcattatttaggtatattctctcatatgggtattttttttttttatatatatatatatttcataaagcaaattgacatagaagattatggaaagtctaagtatcacgaataaattaattatgaccacaattattaggtaaataataatgcatagtctttactttttcgttggaagagaataagtcgtcttcctattataagccatgtgatcatgactaagtgttggttgaacactgatatataattctttggccccagttgcgcgcaagtgaataatgtgtggaaaactaatatagatatccagctctaaatttcgatagaataagatttatatataggaaacagagttaagaaaatcacagatatatacatattaacatatgtattgtagtttaacgaattgaaaattgagtttctaaaatatatagttcgttatcaaggaactacattgatctattggtatgaattttgtattgattaattgccaaactaattaaccactcggattccactattttaccgtttgcttattagattcctcagctgtcatttttattagatatatatatattaaaatgtaaatattaataaactctgtaatacaggtcaaaactaataagttgtgctaaattaaataacttaagcccttggtggtatgttggagctaccaattcattaattagtttaacatcataaaattatatagttatactttaagtggccgttggagtagtccggtagttatcgtgcaacacgtggattacatcgaaaactgtgaatatcaagtctgtcaagattccaagtgtctcaagcaaaaccatcaaataacgagacgcccacgtgtaattaattcaccggttgcatgcctcgctctagggtgcaactgcaaacgtagttattaggactcgttttttctttttcaaaagcagcctgcaaatttatatgtatatatatatttatattttatataattaatgtgcacgaatggtatattccatctcttgtctcatatatgctcatctcatctggatctaccggcttttgcctcgtcgttgtgactaaagggtgtcaacgcggcactcgtacgtgcatggcaacttttaaatattaaagcttaatatgcaaaatatatatatgtttaaccccaacaaatgcatgggagagatatatatgctacactgctactgcatgctgctgatatattttacttaaatataatatatataagatccggacttggtggtactgtgtggattaacaatattataccaaaatgtttggatcaaaatcaagtcatattatatactttttgagttctgataacgatgatgaaatcatatcatcatcctttcttatatatatgcagacctgcattcaatagctcgtatcaagtttgttggataagtctccacgtaaactatttatctgacttaactaatacatggtaaaagggctttgacccatttctagctcattcaacacaagtattacagacgactcaacgttcagttatggaataacaataacagcctcggctcttaactaccacaacaaaaa

SEQ ID NO: 104368 - DNA, 590 bp, Cannabis sativa
  modified_base (133)..(146): a, c, t, g, unknown or other
gggatatctagatcgatctcgatctcttctaactcttccacaggtccaacattgctgcttgggtccccaagtcaaggatccacatcttcataccgaccatgggaagttccctacttgggaatgttttttcccnnnnnnnnnnnnnngctggaggatacttccttcttaaccttggccactgcaaggttataacattcccaagcggactactggtttcctctcagacaccctaccccattctttgttggaaacttcaagcatgagtggaatattgatgtgacaacctttaagtcatacaatgtcagccggcctagcattacgttaaaagctgaaggaacatccaatatcaggaattttgccatgatagtcatgctcgtcgaagcttgtcccacagtgaggggtagacgaatttgtcctagaggtgtgactccttgaccggagaaaccatagacaggtaggagacatggggttagattcctgagctggagtcccatcatttcataagtagttttaaacaagatattggaagaggctccattatcaatcatggttctggccaccatttaattggctatctggacttccacgac

SEQ ID NO: 104369 - DNA, 1049 bp, Cannabis sativa
  modified_base (889)..(906): a, c, t, g, unknown or other
ctgaccggtcttaggattcaatcatgggagttgttagctttagggtttcaccgtaggaagcttagctgattcatgcctgggtttggtgaccttggccggttctgggctgagtcatggggccctagtcgaccctctaaaagcttgggaaccttggtcggcctaggccttggttacaagtgggtggccagctttctgtactcttttgactttgacaagaatcttgtcatggccttataggcatatgcaaccttagtcttatgcgcgatttccttagtaactctgtatgaaacttaatggtgagtctattatagttaaatggtcaacttaaaactcaacatgtgtccaagttgttacacttgaaacttgtactttgttgatactcggccttgtacaatgacattatcggggcaagtacccttgggtacggttgcctagagttttgtctatggcttgtgttatatcccaataagtcaaatagtaagtatttaaggtttatagttatattatgggttaattaggtaataagtacgattatgatcctactagtatatcttagcaaaaattttaaatttgttataagtgagtaaataagtgtaatttacaaattacgaagatttatatagtatgtgtgaatgtaatatgagttatatgtggaataaaaatattttcacatttggcaaccttggagactctattgggagccagaaatattataacaagtttaatcaatagcatgggtgggaatattgtgataagttgataatgtaggtattggggtaattaagagtatgtagaatttgatttagcgccctatgaatagaaatttcttagtggttaagatataataactatcaataataaagcttttattaatattattaatattatnnnnnnnnnnnnnnnnnntattattattattattaacatttatcagtttatctatactatatgctttaaaacataaacttatagtacgtgtaacgtccccgcttcaagccttcattgggctcttacacaagtacgtcactttggttgcttcatgggatgat

SEQ ID NO: 104370 - DNA, 563 bp, Cannabis sativa
caaatcctaatctctcttttttttttatgaaccctaatttcgaattttgaatttcgaatcactatggctctgataccatgtagcaaatggtgaatcgaattatgtgttgtatttcatagaatagtatacatttatatacaaagctaggagactaaatgggaaactatcaaatacaaataggaaactactaagtacaagttaccttaatttttacaactaatattctaacaaatggtcaagtcgaaacttataaagctagacttgtagcaataggttacacccagagaagtggactatgaggatacttttgatccaatcgccatgctcaaattcattaggatactttttttccatagccactgttctcaattatgagatttggcaaatggatggcaagacagcttcccttaacggaattcttgatggaaccatcatatggagcaaccagaaggctacaagattctaggacaagaagggaaagtctccaagctcttatggacttaagcaggcttctcgttcttagaacaaaagttttgactaaatcatagggacctacaactttc

SEQ ID NO: 104371 - DNA, 1262 bp, Cannabis sativa
  modified_base (1188)..(1191): a, c, t, g, unknown or other
acattcaacggccttaccccgtatcatacccaaccatggtccctcactttacctgacacgttagcatacaacacataatatacaacatatacaagtcataacaaccataatctatttatcaattcacaaactcatattgtgtccataccacacattctcagtaccatatacatatttcataaatcgtattctaatacataaaaattctaaatttatgcagataaacacatacaaaattatctaatttccttacctcaagtcccattgcttaagacttattatcttgtcactactacctataataaaacatgggtcaaggccctaatattaaaattagtactcttatagtacagttgaaagatcactatttttgactaacaactacactaattcaatgaaatttgtcttcataaaaaatataggtaattaaattatctttctaatgatataaagatcactaaaaatagactaaaaatgagggagttatcatagttttactgaaactatttctgagaaggaatatggagtaacgaattacatggctcagtgaaaatataaaattttgacattgaaaagttcagaacaagagaataacatcttcatgaaagttttaggaaatttaattctatttccaatgaaaccaaaatctttgaaattggaattatattcagagagatattgcaattttaccaaaacagtttttatagcacaatattcaagaaacgaatcacatgatacagaaggaaactaacttttcgatatagtatgattccaaattaacaaaaggttccttcatgaaacttatggaaaatcgaataagctttgaaaccatatatagatcattaaaaatggatgagaattgagagagttattgtattttaaatgaaaatacttttttctagaaatatgaagaataacaaattaaaataacagcataaagatgataattttcgacacacaagaacatcgaattggtgaattgtttctcataaaaattttagatcatcaaattatctttgtaacggtaccaagatcgttggaatcagatgagtattgaaagagatacgactattttactaagacaataacttttagaaaatgaaaacgagatttcatagtttaacctaaaaattgacaacaataagtgaaagaactctcttacctcttgatggctcttcttaatcagtnnnngatcttgaaatctcaaattattagaatggtgataatgatctcaatcttatgttgaaaatcatgagtgttgt

SEQ ID NO: 104372 - DNA, 581 bp, Cannabis sativa
  modified_base (442)..(450): a, c, t, g, unknown or other
  modified_base (532)..(532): a, c, t, g, unknown or other
aatacttctcagactataaatggtcagccgccaaatctccggtcacaggttccacctgtgggccaagtagtagatgggcaaaccttgtctagtaaatcatcaggagaagtcatacccaacaattccaaccaggttaatggtgtcggtcaacacattaaccaaaccaaccaatcattgagacaaccaggcattttcgtattcgatagggaacaactcatgatatcagaaacaatctgaataggaggagaggagtagacgatcagcttgatacgccgaatgtgcagctcggaactcgtgctcaaattcccgctaaaaaagatactaacgtgactcagatcggccgaaattccaaacaagttaatccagttgtgcaagcacagttggacgaactaaagagtatattccaaggcatggcttgtcagagaaacaatgatctcgagtnnnnnnnnncacgtggaacccctttctcccccaagatcaatgttttggcattgtcccacaagtttaaaatgccaacctggaagatgtacantggaaaagaagatcctctttcccacctcaagtatttcgagatgcagatg

SEQ ID NO: 104373 - DNA, 818 bp, Cannabis sativa
  modified_base (435)..(438): a, c, t, g, unknown or other
atagatctggaaacttgtaaaatgagttataattgaaatagcaattttagactcaaatcaaagtgaatcatggtgacttcaaaaattgtgaaaagataacaaagttggagaagcaattttgaatcttaaataatcaaagtagtgaataaaattgatgagaattttgtcaactttggtatatataattttgggctaataatctcaatgaggagataaccttaaaattatgggaacaagtaatcacattatttttaagtggtgatgtgagtttgatattttagtttattgagaaaactaaaaatatcaaatgatatttttcaaagtgaccttaaaggtcatttcaagagaaaaatacacaaaaaagtgatattttatatacactttatggtgaaaatgtgagggtgagtcacaaacttaatcaaaatgtgatgagannnngttgattagttatttgattttgaactcaaattctaaattaattttgctatgtgcatatgcgaaaattttgacatattttgatgtcaaattttagtgaaaataatttcaagaaggaaattaaaaagaaattataaagacaaagtggtcttctatattttaaaatcaagatattatcttgatagtgaaatgtgagaaagtgtgggggtgatatccaatatttaacaagcaatttagtaaaagaatggatgatatgtgaaatttaggcatatgcttggtgcttaagacttgagtataacttagacatgtttggtgtctaaagttagtgtttaaattttgatatgcttggtatcaaaatgtgtgagaaattgagaaagtgtgaa

SEQ ID NO: 104374 - DNA, 1834 bp, Cannabis sativa
  modified_base (341)..(343): a, c, t, g, unknown or other
ggttctgtagggattttatgagggcagtccttaatcccttttgactgatgtgattcctcacagagtagccgtcactagactttattgatcatagtatagtaggtacagattggaggttgtgccatcagactttactgcgtatggcagtttcaatacgcttcctcccatgcggcattaaatgcgagatgactcttcagatgaaacctgacacctcccggagatgctatattgccatctagctccccgggagcatacgagatttacatgccttctccgggaggcatgtctaaggtaatcctttgctttaagaagacttagctgttttatttaaatgctaaacnnnttccatccacgtgtcatcatccggttggtccacacatattgggcaagatcaggggcaacatttaccccccaagccttgtttaattatgaagtgaacaaggcttgctgagatgcctccggttgcctccttggtttcctggcacgtgctttgggcgcgtgatggtgtatttaatgaccatcattactgcagttattcactttttgcaggcgttgattcgtttcttgtccatttattgatacgacgcattaatgggtgtcagacaggtactcaagcgttttcaccgccttgatgacgattcaatccaaccgttggatccagggaattcgaatcgattgccttcccagccgttcgatggtggctgatcacagctgtctcatacatgatttggcctataaaagccaaccttctcatttcatttggttactttcagcattttaccaaattttctcaagttttccagagagaaaagaaacctttagacaccatagatttcttactcattttccttcgtcgttgcccatcaacatttttccagcgatcaacaccaacacccagttcccaagctttatgtaagtccttcgcatcttgtactttaattcattgtttgtttacatagtatgctttactgttcatctgcttttttttctgggtttgatgttgagtttctgggagtttctgtacaacgtgttagatccctcctttttgcgtttgaattacttcttttcatcgtgtttttgtcgaggacccatctttgtctcacgtaatgacactcaagggtttagagtagacttcgtcttctcgatttttacccttttttccttttctttttgcttattcgtaatgtcactatctgtgggattcttgcacccgactcttgtcaaggaaaaccttttgaggctttcttttttgacaagtgtccggcgggggcctctttctagcagttaggggacccccattcccttttttgaattagggtttggtttggggcctgactgctggattttttcaatcttttatagaaccaaaatgtccggttctaaatcctcaaagaagggagagaaacgcttggccacactggaggaagtcatgaagggtccggtggcccaagaagggcacaagtcccgtgccaatggttgggaagcagcagagcttcgctccactctgacctgccctcaccagctggaacagatcgtggtggtggcaggtatcaagcctacaacctccgggacctaccaccggccgccccgggatgaggagacgctcaaccataactacgggggcttcggagcctggagccagacacacctgatggtcggggccatgcttcctcttcaagattattttattaactttcttgtatttgtcggccttgcgccataccacttattcctcaagcttattgccaactttcagacttgtttattttttactctgcccggagctggggctcgcccagtccggcagagattttatatttttatgaactcgttt

SEQ ID NO: 104375 - DNA, 736 bp, Cannabis sativa
ctaataaagaactatactttccagaaacaattttagccaaatccacaagaagatcatgcatcacaaaacaagatctacctatccagtccttggattttacaaaaaatgacatagatactaaatcatcaaagtactcaccgacaacttcttccattcttctattccccttggagcacatgacaagattttcagccatccataataagaccaactcttctctttgaaattgatagccttttgggaatattgaacaaaaagcgaaacaccctttcaagtgtcgaggaagatagtagtagctcacttctaaagcagcaggaaggccctcactcctttcatgtgtcaactcccaaatattattccttgctatttgttcccatctccatacatccaatgttgatctcaagatgcctcctagaactttagcagctaaaggtaaaccattacatttcttggagatttctctgtcgatcctttctatgtttggattctcagtaaactttctagagttgccactggaagcatgcttcacaaatagtgcccaacactcatcttatgataattctctaagtcggtgtacatcaacagttcgaatgatatctgcaactttttcatttcttgttgttactattataggacatttactaatcttcaactcactcagcttgggagcaataagtccatcatttgggaaagatacaaaactaccacaattacgaatagataaagatgttagttc

SEQ ID NO: 104376 - DNA, 509 bp, Cannabis sativa
  modified_base (57)..(60): a, c, t, g, unknown or other
tttcattgttttagagatattcatatttaggatgttaatcaatatacttgttagtannnntagatcctggtaaaatattctcaactagtattgtggtaataaatcaactgtgtcaccaggctacacatgatggatggaatattaagaccacttgagttgtattgtggtaataaatcaactgtattatattccaacaacaagaggagctcgacgaagtcaacacatattgacaacaaactccatggttgcagacccccttactaagggtttgccacctaaggtcttttatgagcacactactcatatgtgtgttttagagtatgaggatacctagattcaatgggagtttgtctttctaatcctttgtaatttttatttgtatcatgaaacttgtgtatgtgaataattttctgataagaaattatgttatttagtttatttcactttgtacattaagctaaatttttgatctctataaagtaaaataggaccaattaaaaattgacatg

SEQ ID NO: 104377 - DNA, 600 bp, Cannabis sativa
atcggggccgtggttcaagtccgggactaggaccagggccagagtctggatcctaaggtctagattgggatcggagtccaaaatattgattaacaaaaaaattatttagaaaaattttgaaaataacttttttttttattttcaaaattttgattcttaattaaaaattgaaaagtgaaaacagttttatagaatatgtttttggaaaatatttcaattttctaattaaaaaaaatgattaaaaaaatattaccgacacactatattattttttttattggttacatgctactttgtgtaatataaatcttacaaattactaggagtgttcataaaaaatgaaaaactgaaactgactgtcaaatcgaccagaccgtaattgaattttcggttccacgtcatcaccaaatttggcattcggtttcgatttcgattttttgacatggcggtcagttttgatttttgaaataaaaaaatggttaaaccaaaaaaaactgtcaaaactgtcaaaaactacaataaaccgccaaaacctatccaaaactgccaaactaaaaaatcactaaaaaccgtacggtcggttttatacggttataattt

SEQ ID NO: 104378 - DNA, 1118 bp, Cannabis sativa
ttataacaattaaggcttgaaaaattatataaatttaccttaattatatatatttttgaaattctactttattgtaatatttatttatagttactataaatatataatatttttttacaataattaatctttacaaaataaaaatttaggtctgattatatatatatatttattgcatgtatataaattataattttttttattgcaaaaaaaataataggtcttagagcaatttttttagaaaataaattaaatggattgtacataataatacaattagtttttatactcaaatgataatatttagttttctattaatatagtagccatttatttaacttttagactatgaaatattttaaataaattttattaaaatttcattcgcatataccatagaaacttttttttatatgaatatatcataattttttcgatgaatatattaaatgtcatagaatatgtattttttttttttttttttttgactatactcattaattaattaagaaataattagttatgaggaaagagaagaagagatggaaactaacagagttaatcttgaaaattgaatcggttaagtagaaaaagagaaagacacatggcagctatttattgaagagacaggaatgtgacaggtaattggggacagaagatttttttccacaattttacaatacaccattcatcttcttatttgcattaccaaaaaatattttatttatttcaaaaaaattatattaatatatattattaaaatctaaaataattaataaaatatatttagacctataaataatattctataaatataatattaaattttagagtaatttgcggcataaatacataagtttaactcccagttgtaaataaatatttaagtttaatttttggcggtaataatatctaagagttaaaaaggaaggatcgactaaataatgcagagaaaagaaatagagtatagcagaggcaataaagcttttgttgtgtgttttctatattgatttctcaatgaatatacaacgaagagggtgtatatatagtacaaggaatggaatattttccctaacaataaaacattcccttgctcaatgattggctacaatagaaaa

SEQ ID NO: 104379 - DNA, 555 bp, Cannabis sativa
cagtaaggaagtccgaatgagggtaatatctagctttgtaaatttttcccgcgagagaatcgggtttgcacaaaagccgccaaccttgcttagcaagcatagcaggattaaagtcttgtaaactacgaaaacccaagccaccatcagactttgcagcacacatacgttcccaagacatccaagttatgcctcgtcctttacttgaggacgtcttccaccaaaaccgagccatctccttttcaatttcaagacatgtactttttgtaagaagaaagacactcattgtgtatgttggaagggattgaaccaccgttttgagaaggatctctttaccagcacgggaaagaatcttaccatcccaactattaactcttgcaattactttattcttcaagaatcccaatactgcatttttatttcgaccaacaatattcgggaggcccagatacaaactcccttctgatgcttcgggcatgacaagtctgttgcaaatttgagtccgattttcagcactagtattcggactaagaatgtgaacttgtggaagttaatttt

SEQ ID NO: 104380 - DNA, 1203 bp, Cannabis sativa
agtgaagaaatgaagtaattgcctcaaagacatcttgtttgactaactcccaattatcctggtagaatgaactattgtacccgtccggccccagggcctttactgctggtatgccaaaaactgcattttttaattcctcaattgtgtaagcagtagtaagaatctgactatgttgttcagttacacatgctccttttcttgactaaattggtattgacaggcagtctgttcaccatcttagatcccaacaactcttggtagaaatctaagaaaccttttgtgatgctctccagatcttcatgcctaataccagttgcatctgctgtagataggatattattgtgatgccttctctctctgatgctcgaatgaaataatgttgagttttcatcaccctctttgagccaatgtaatctagacttttgttgcaaaaaggaacaataatctttatgaattttaacaaactgttctcttacttcttgttcttgaacttacagctgcacattcaaaggctgctagtgtagtagactttgcacattctcgagatcgcgtcgtgcctttttctctgcagcttgaatgcccgaataatgttctttattcggttctttaaaaaatactttcagagctttaagttttgacacaacttgaaacatctttgttcctgccatcttttgctcccaaatcctcttaacttccatatgataacttggatgagaagtccacatacggaagtatttaagaggttttttgccacttgggaaatcagtataagtattgagtactaccaaagtatgatcaaatgctccctctgtaagaaacacagcttcagccctttcaaatagatccatccaagattgattagccataactctatcaatcttggaatagattcgatcttttgattgatgtttattattctaggtaaagaaacaaccactactctttacatctgataattgacagtcactctttacatctgataattgactgtcactcacacagtctaaaaaagtcgtggaagtgccaatcttagctctatccccaattctttcttctttgtagagaatatcattaaaatcaccaaatactatccatggttcctaaatagcaatactacgtaaatcattccatagaatcttcctcccattttcatcattgaaaccataaacaaaggtggtaaagaacttataccttttatttacc

SEQ ID NO: 104381 - DNA, 721 bp, Cannabis sativa
  modified_base (116)..(120): a, c, t, g, unknown or other
  modified_base (310)..(313): a, c, t, g, unknown or other
aattaaaattataagatttgataaatgttagttttaacattttatcttcttagatattttattaatgaacattaattttggcaaaaataatatgaaatttgaaaaattggttagtnnnnntttgaatagaaattttagggtttttaaccataaaatttttcaaacttattttaattttttcataaaattggtaatttcctaaccataaaatatatatatttttttttgaaattgtttattttgtaatatttaattcattaaattataggattaagaatataatattaggaatatctaaattttaaaattnnnnatattatattatattatcttattagaaatttaattaatttaaatttcgaataaacttgaaatttgaaaattggttagatatttgaatttaagttagaatttaggaccagtaaaaaaaacaaaagttagaatttaggatatttaggagatttgttaggtttttgatttttttcaaatattctctaacaacctaaattttaaattatagttaagatatattttaaattttaaattttaaaataggaatatcttaacctactttgcagttatctgttacttgtggtttgtaatgttttgattatatatttaattattcaaaaaagattttacgaacctattatttatttgatctaaattgctatgactaacttgttgacagatccagcgatctaattttaatcatagttca

SEQ ID NO: 104382 - DNA, 558 bp, Cannabis sativa
cggttgtagaggaaaaccattagcacgcgaacttaccaggtgaccagataacttgctcaattcctgcttaatttgtttcaactcagcaagtaagtctttcatcatctcacaatttatcaccatagattcttgtaactcaacaatagtctcatttagggaacgagtgtatggatgttgagagttatgagaattcgaaggatcttcatcttcataattccactcatataatggattatagtcatacttaagcttccaactacaatcatcaagactattataatagtaagagttgtaggattgttcttcctcttcatcatagggatgtgcaccagatgatgtatgttcacaaggacgtggttgatgcaactcgtaccaagccttccactttttagaactctcactcttgtaaaaagaatagtatcggaaagcttcctccccgtcactaaattctggttcgataaaattactagtaccttcagtagcactagaatttttatttaatgaagcaagatatattggatataaatatttaaatcggtgatgatcttcttcattcat

SEQ ID NO: 104383 - DNA, 1322 bp, Cannabis sativa
tatacataatagagattatatatgacaatgaccgatatgaatgcatctatctttatttaacatgtcatttactataaagacttaattcatatcacaatgatgatcaatattagtagatcggattaaatcttgagtaatcatgaactcctgttcatgttattagcttctttaattcactcgttaaagtttctcagagaagatgactcttacaacttctgttttgtgaagctaataatgtgaatggctgggaacatgactacaattatggaatcttgacttttctaacggatcaaatgttggttccctttaagtgttaattctagaactggaatgttgtgaacaaataaagatgagatctaaattatacttccactaatgaattaatgatactaaaggataaataagtaattagaaggataaaacggtaatttgacaaaaaaactaattacgaaccaacacatggagagataatcacgggaattgattatatcaatggacactacagtaaaactcagtaaatataattctataattactaagagtttaattctatatttttagtagaataatcatgtaattaataaacaaagattatttagttgatgagactcaataaataatctagtttattagaacttataattataggtccatagtccccaactcgctaccttgaaatactgtcaaggaaagggataaagagtagtataatgtcgtttgaaaaattatattttgaattagtaaaatagtatttatttatttttttaataaataaataattttttcaaattaattaaataggaaaagataaaaattgttaagaaataatttgtcaagacaagatttgttgagacaaaaattgttaggacaaaagacaccatcgttgtcctaaacagacaaggtaagcgcctaacatgtagtctgtccttatggagtttgtctttttggattaattaagtatttaattaattcaattagataaatatttgaatttaaaaagtggctaaagatatttcaaagttgttgtgatactctctcaattagttgagagattccctcataaatatcagtaactgaatttggttatagatatttatttatttaaataattaaatatgatttaattaaagagttttaactactataaatagaaacttgatttgagaaatcaaaacacgcttttacacattaatttttaaaattaagagaaaagaaaatagttttctctctcaatcgttcttgctcatgtgttgagaatttaacaagaacaataatatacactttatcctaatagctaaatttagaagacactagtatgagtc

SEQ ID NO: 104384 - DNA, 764 bp, Cannabis sativa
ttattgtatgagtttagggtttagaaattttgttgattgttgggcttatatgaatgggcctttaccaaccttgtttaatgaattaaaccatttcgtacgtcaaaaaaaaattaatagtacattttttttatttgtggaaaataaagattgaaaagtaaggatcattgttttggttaaagtaatgacattttttagtagaatgggtagttggtcccatttatatatgttgggctgatattaatgggcccttgacttacatcttcttatgaattaaaccatcatcgtacgttagaacagtaccgcagtacatttgtttttttgggaaaaacaggattgatgaataagattgatatttgacgatagtccgtacgtgtacacgtgtattaaattgtgtaattcagagatttaaccacccctcttttgacacatcagatgtgcccaatggagtacatcccaatggagtacagctaactaaaaaacgtaacataacttatccatcacactttatataacacacttgagaggtgttccaatccagcatcaattttatagagaaagtaacttgtaatttagttattcattgcattagaatatatcaagtatgagttcaggtccacactgggttattttcaatggaccaaatgaaggtatttatagtaggtaggaagatgttgtaagcaaaaactgtaacgtccagtccaacagggacgccacgtgtgtgcaatttaataaaatactgatatttatataatatgtaattatac

SEQ ID NO: 104385 - DNA, 559 bp, Cannabis sativa
gcaaaattcttttaagtttattttcttttgcaaatttaaggtttcagtaaaatatcaccgttaaataccaattgaattattactgtattgactttaaagttttactgttacatatgcacatgtatatatagtggtcatccaattgatatttaatttgcgtgtcaaattttcaaaagaaaataaacataaggaagttttgtcacaaaaaaataaaataaagaaggttaagtatataaaaattaaaacataaaaatatttcgccgcaaattgctctatattttttacttgtatcacattaatattgcttgctttcatgtagtgaaaatatgaaaaaaattaaaaaaaaaacaatttgttttattcttaaaaaatattaaaaaactaactataaatatgtatttttgaaacaaactttttatcatttttgagtattacgaaatattcatattttttaataggctaattagttatttttttcccaaaactttgacatgtactaaatcatgctctgaacttttttggccgttaaaaattcatcctgaactattaagattgttaa

SEQ ID NO: 104386 - DNA, 2191 bp, Cannabis sativa
gcttgggttgcaaatccccaaatcccatattgttgcccaatgcccaagccccaagccgaagccgaacaagaaatggtgagtctgtattgatttcacggagctcaaaagcatgccccgaagactgttttccacttccaaggatcgatcagctcgtagatgcaacaacagggcaggaaatattaagcttcatggatgcttactcaggctacaatcaaatcaaaatgcatccaccagaccaagaacatacaagtttccgaccagatatgggtctatattgctacaaagtaatgtcgtttggtctaaaaaacactggagcaacataccaaagaatggtaaacaaactgtttaaagaccagatcgggcaaaatatggaagtgtacatggatgatatgctcgtcaaatccagaaaggttgggaggcagatagacgacctggatgaatgcttcaaagtccttagaaagtacaatctgaaactaaatccctctaagtgttcctttggagtcagctcgagaaagtttctaggcttcatcgtcaatgcccgatgaatcgaagctaatccagagaagattcaagccctcttggatatggactcgccaactagaaccaaagaagtgcaaagtttgactggttggatcgtcgcgctcagcagatttttttcaaaatcaacagataagtctgttccattgttcaatatcgtgcgagaaaacaagcagtttgagtggacggaggaatgtaaaaaatctttccaagagctaaaagcacaacttgcaaaacctcccgtactctcacaacctctggacggagaagaacttggaatatacttagctgtcacagagcatgccatgagggctaggctaattagagaagagaacaacgtatagcacccagtctattacttcagtaaaagactcattgaggccgagggccgatacccgttgatagaaaaactcgctcactgccttattctagcaacaagaaagttaaggccttattttcaagctcattctgttgtagtatacactgaccagccactatgccaaatattgcaaaagccaaatgcttctggatggctactcaagtgggcggtataattaggccagtacgaaatcactttccaaccccgaacagcaataaaaggccaagccttagcagactttgtggtagaatgcacaaccaagaaagaaagcataccagaaagcaaccgcgagctggtacaaacatctcaaccaagtaacaatgaagataagccaacctggaaactatatgtagatgggtcagctacagatcaactatctggtgcaggaatttcccttgtcacgcctggggggcaacacctccactccacattcaagtattgattcaaagcatctaacaacgaagccgagtacgaagctctaattgctgggctaaggctagcccaggagatgaaggccaaacacattgaaatctgcagcgattcacagctagtggtgaaccatgtattcagagaatatgaagctcgatgagaaaagatgatagcatatctgagaaaagtacattatctactcgcacaattcaaaagctacggtctccgacaaattccaagggaataaaacacaactgcagacgcgttaactcgattggcaagcaacaatgtaagtgacaaggggaacttgattcctatcaagttcctcgaagagcatagcatcactagcacggaagaaatcgaaatgattcacacttccccaaactggatgacaccaatagcaggctaccttaactctaggaaactcctagatgatcggaatgaagctcaaaaaatgagaaggaaagctgcacggtatatcatagtagagggaattatgtacagaagagggttctctacgccattgctcatatgtgttactcaagaagaagcggcacaactcttatctgagatgcacgacggattctgtggaaatcatgccgccgggcaaagcttatctatgaaaattctaaggcaaggttacttctggccaatgatgattgaagattcaaaatcatatgttaagcagtgtgacaaatgccagagattttcaaagataccacgagatccacctaacgagttactgcagatgcagagtccgtggccctttgcaatttggggaattggcctgatcggacaattacccaaaggtaaaggaggagagcagtatgtagtggtagcggttga

SEQ ID NO: 104387 - DNA, 560 bp, Cannabis sativa
aattaacattttcattcttttttgtttacccaacaactctttatccaaaactcaaaaaaatacagaattcaagaaatccaagcatttaactttcttcccagatttcaactggctcatttctaatatacagttgtcaagaatgaacacagtggtgtttaataaataaacagcaaacaatgtcactttttatacaaatactaaattgtgccactaaatttacatttaaatgcctgaaatgaaacaaacccaaatacacttagaacgtagctttttcattatcaaaccgtctcagaaataataataataacaataataagcttcacaaattagtgaaaaataagaagaaaccctcaaaaccttgaacaatatatatacacatacatatttaaaacctgaaaaactcatttccctctcaaacataaaaagaggttttcccttctctttcaaaatataaaagtaagagtctttgatatataccacaaatttttatgggagcttcgagctcgagaagattaggctggctaagaaaaatctccttagacgtagaacaaagctgtcta

SEQ ID NO: 104388 - DNA, 607 bp, Cannabis sativa
agtaggacaaaatctgagctaaggaaaaaagagtgcaatatatatttcatattcataattatttacaagttgtctcgttaaaaaccttgccaggaaaatccagtcgggcaaaacctgagctagggaaaaaagagtgcaacatgaatatgtctcctctcatgctcatatgatccataattattttggtgataatatatctcataagattattgttatcacttttaaaatatcatcgtatatttgttagaaattattttgccaagatctagatttactaacatgtgtgttgattataattctataatcgaacattctaaatatgaattctctaaaacaataaaataaacacataaaagttgtagaaaactttacaatgatggcaacaaaataatatgactccttctattcagatctttaatccttgatcctttctgttgcagagtatgatcaagatttgaacctggattctccttcagttgacaaaaactacacaatcttccacactatcttaagtattaccttgaattatgtgggaaattactcattcacttagggtttcaaaatttcaagaagaggaagagaagaattcgaatatgatggtggctca

SEQ ID NO: 104389 - DNA, 693 bp, Cannabis sativa
tgaactgtattactttggtctcttattcagtccttattaatggtaaagtcagcggcaaaatttagcctaaatgtgggatttgtcaaggagaccctctcttgccttacatgtttcttctttgctcggaaggtctatcttgccttatccaagaagcggagagggctgataggattcacgggcttaagtttggaaaagagggtataaaattatcccatctcttcttcgcagatgatagtttcatcttcctagacgcatctccatcagagtgtagaaagttgaaaactatccttgataaatattccctgctctcgggttagaaaataaacttcacaaagtcagaattgtgtgtgggcagcaagattaaaaaagcagatggtgagtatcttgcggctgagcttggagtcaaattagtggaatgccacacaaagtacttggggatgccggcaacaattggaataaggaaaaaggaagtttttgaatccatacgtactaatattagagccaaactacaaggatagaaagctagtctattctctcaagcgggaagggaaatacttctcaaagcaataatccaagctatacctacttatattatgagttgtttgtcttcctaaggaattaataaaggatattcatgcaatgatggcaaggttttggtggggctcctcagactcaaaacataaaatccattgg

SEQ ID NO: 104390 - DNA, 560 bp, Cannabis sativa
ccttctttatttcttcattagtaataggagccgacagagttaccctttgttgcatcgttactgtgggtccattcttgatcacatggcctaatacttcccttctatttgccattctggtgcctaacagttgcttgtagtaagcaagaaaaacctcagtgatctttgttggctcatctactcggttcccttgtgcatccacaatggaaagaattctgttttggttgattatagctttgagacttgcatggaatatggccatattatcatccccatctctaacccaattagtctttgctttctgctgaaggaattgttgatagttcttgtgtgcctgagaaaaactgtttcgtgcttctaattccttttgttgaagttccttagagggtccaaagataactagttttgacaattatccaaaacagatactgctttgatgactgtcaattgcaaatcattatacccctcttgatttatcttcttaaagaccggcttcaatgctttaagcttagccaccacctagtacatttttgtacccaatacctgctgctgccaaatatgct

SEQ ID NO: 104391 - DNA, 668 bp, Cannabis sativa
tttttttagaaaaaattaaataattattaaattatgttatataaatttattagtatgcatattaatttattgtaattatataacgaataaatacactatattattattttaatagataaatatactatatcattaaatatgtataatgtataagttaattatgatttttgtcgttaaatttttttgtctgttaaattttcctctgaactattaagattgttaaatttaaggacttttgtccaattttattcaattttactaattcggtgattgtttatctataaaattatgttcctcatactttgatatctatcaaatcatgcccttcgaactttgagatgtaccaaatcacgccccttgaactttcatccatattagactttttttattaaaattagacaaaagtccttaaatctaaaaatctcaatagttcaggggtttttaatggcctcaaaagtaggactgaatattgggcgggtttaccgggattcaggtttgctggttttgagttcacgggtttcgggttcaaaaaattgaaaacgaacccggacccgaatagggtgcgggttgacgggtcacggattggcagggttctgttggccgagttgaccggattgaccgggttggcgggttgacccggtcaactctttaaaaaaattatttttttt

SEQ ID NO: 104392 - DNA, 4009 bp, Cannabis sativa
attcaatgtactagtaaatgagaccaaacgacaggaaaagcttcagattagaatacattttcagattatcaagcactgataaatgatttgttaaaaacaaaacgacaattaaaacaacgtcgttattttttaatgacttgttacagctttgactttgtaaaagaaatttttgagtaattaacaaggatagagaaagacgagggaaaaaaccaaacaaagcatctagtttcagagtcaacaaataacaaccaggaacaaaacaaacactttcctttgcaagtactaaattaccctctttatactcttttgtattcatctatttggttaattttgtattgttctggagttttgatgctataaattcttagattcggaagaaatcaacaattcattgatttttttctttttcttcttcttcttattattatatatattttcctagtggaagaaccaatggagaaaaggtctttctttctctgaaatctgccgatttctttggtaaagattagccctttgagttaaagtttttcaatttaactccagttttcaaaattttaatctgggtattgggtgaaacaagctgaggagtgttgagaagggcacatggataattaaagatgagaaagggtgtaaagcttgttctgattgttagcagtaaaaaagggttggcttgattcaagtttgtagatgagaaagggggttttttgagcggccccctctatttattcattcattcaaatattgggtttgaagcttttgagctttctggcttggatttggtcttgatgagttttagttgactttatatgtggttctcttggtgaaattttagagggtggtattgtgaatttgtttctttattagtatgtttaaacatattctcagtaagcttcccctaaagtcttctaaggctaagcacggtgagaaacgagaacatggtggaaccaataatactatttttgatattgtttcttctgctaccagttcaagcattgatttagacactaataagtctagaaccaatggagaaaatcatggtaacaaaaatagtaaagttgggaattcgaaggtgtcttcttcttcttcttgtggatcactaccttcattgagggatgttccaagttcagagaagcagatcttattgataaagaagttgaatttgtgttgtgttgtgtatgatttcactgacccaacaaagcatctcagagagaaagagatcaaacatcatacattgttggagctagtggattacttgacttgttcaaatcttgagttttgtgatgaaactgttatgaatgatagtattaaaatggtatccacaaatttatttagaacatttcctccacaacttcacgagaacagagttacagaaggctttgatttggaagaggaggagcttcccatggaaccagcatggtctcacttgcaaattgtgtatgagtttcttgtaaggtttattggatcatctgatattgatgcaaaacaagtcaagaaatatgttaatcaatcttttattctccatttgttggagcttttcgactctcaagattctagagaaagggagtatctgaagaccattcttcaccgaatttatggcaagtttatgttgcatcgtccattcatcagaaaatccatcaacaacattttttacaccttcatttttgagacagagaagcataatggtattactgaacttttagaagttttgggcagtattataaatggttttgccttaccattaaaaaaggaacacaagttgtttcttgttcatgcccttattcctttgcacaagccaaaatgtatgatattttacaaccaacaattatcttactgcatcacacaatttgtggaaaaggattacaagcttgctgatacagtcataatgggcttattgaagtattggccaatcaccaatagctccaaggaagtgatgttcttatgtggtgtggaggaagttttagagctaactcggttgcccgaattccagcgttgtatgatcccgttgtttcgccagattgctcgttgcttaaagagttctcacattcaggtagatggctattttgatgtttgaatcttattttcttttcaactgataatgattaagatgcaatttcattgttacatgattcttttgttgtgaatctttattgattgagacagatttggttaagatatttttctcagattgctatctttgatctatgatttttctcacattgtactcattgttattgtttttcaggttgctgagaaagcattgtcattgtgcaatagtaatcacattgagagcttgatcaaacaaaaccacaaagtcattctaccaataatcatcccggccttggaaaataatgctaaaaaacattggaaccatggtattcacaactcaaccttaaatgcgcgaaagactttccaagatcttgatcccaagttgttcaaagagtgcttgcacaagtttcaggaagacaagtcaaaggaggatgagattaaagcaaggcgcgaagccacttggaaacgtttagaagagctcgccgtgaagaacttgtcaagcaatgaagtaggtgaagctcctcatgctgcagccttagtttagctgtagcaagtggacagtttaaatgaactgcaatgtatatttcagctgagataagattggtaaaagaaaaactggtgagtggttgaatgttttattcatttatctatatattctcatctacttgaaaagattaaacaaatcatatatattttactgggaagagtttagtcaactatacctgctcataatatgcaaggaagcacattgttttgtttatccttgttttgttcagacttaaaataaagcacatcttttttgactaaaaaatggtactaagattgcattattaagcacaaagactttttaatataaattcttttgcagtttctctgtaagaggaatactttgaagagatattttgggcatccttaaagaaaaactcaatgcatttttataagaatatgctagggtcacattatatctatctatctatatatattttggtgaggtaaaattcatatggagctttttatcttttatgcaacaaataggatcattaaaaaaataatgagtttttttcatttttacactttaaaatagtttgtttgtttgtttgtttttttgttttttttttttttttgtatttttacggaattatacactgaaatccctattgtaattagcgctgcaataactttagaaatccaaaccgtaaatttttttttaaaaaaaaacagcatatatggtaattccctaaaaataattatatgctctaatttttccaaaactcatgacttctggaaatttcaagaaaaagagggcaatctcattgctgcatgtcccaaatattaccttttcgagtttttcttcctaaccctttataaagataaacaaagttaaagaaagtcccaattatgcactttttattcttcatttattattattctatatatctacttttcttagacaaattgtgaataaatagataaataaataagtagaagaagataagaggggtaggggaaaaaacagagagtctctgtactctgtaattccattctcatgatgacatacactatttgttcattggtttgaactgggtttgttgcctctgtaaatttatactgcccaccatcttaattcctggcctttgaaaacggttacttaaacttcaaaatttgattcagactctggaatttgtgcagctatcttttggtctggggtgtttttcaaataaaattcagaatgtcaacaatggacttttaactctagctaatgcataattatagtacatggtgttggacaccacaacacgtgaaaaacgtaattactttattattgtaaaagtaattacaccaagacttgaatactttttaaaagaccacaatacaccaaacactcacactcttttattttatcactagacacctttactacacacttgtgtataactcacacttttgggacactttgtcttta

SEQ ID NO: 104393 - DNA, 581 bp, Cannabis sativa
ataaaattaataatataataatagtattaatgagataataataatattaataaaaactttattattcataactatcctatcatttctaatttatacttctaaagcgctaagtcaaactcacttactcctaattacctcaatacatatattaattattaacttatcacaatattctaatcaattatatcaattaaacccgtgatgacatttctggcctccgatcgagtccccaaggttgtcaaacctcaaaataattttatttaacatatatggctcatattacattcacacattctatataaatctccataatttataaattacgtttatttactcacttatagcaaatttaaaatttatgttgaattagattagtaggatcatagttctacttgttaccttattaatccataatataattataaatcgtaattacttaccactggacttattagaatagtacaataaacatagttagtagatctagaattaataacccaataggataataattctctaaaacacatgaattcacaaaaaacttagaaatactttatttaattctttgccaaaaacttagg

SEQ ID NO: 104394 - DNA, 1310 bp, Cannabis sativa
  modified_base (968)..(975): a, c, t, g, unknown or other
  modified_base (1074)..(1077): a, c, t, g, unknown or other
gaagtctcgtacagacttgggggcgaatgttatccgaatttttgtactatgatgtggcatcacatgatggtgacacgtggaatcaacttcgagtatcttctcggagaggacagtccgaacaggatgcctcataggcatgcctggagcaaagcgatcaacaatccgcatagagcaaccaacatttagtgaattcagatttcgcatcgtgagtcatcaaagaaatccctataacttggggatcagattgtagagatatggcaagctgtccaaatcccacgatctgtgtattctgcatttatcatgcaatctttatgcttatatccatttgaacgagaagggaaatacttcctctccaagctcatagccctataaataatgatgcatgctcactgggcaaagggtctagagattttaccctagaaatattatctaagaattcatattcagagatattattgtaagagctataagaaaaggaacctttctccttgttcttgagtcaatacaaataatgaggattaggctattaccgaacagctcgcggctgaaactctatatatcaattgttataaattacttatcgcttactaaataagacttactgtcgttgggtgaaagcgaggtcaacaaagacttaaggataaatcaattaatccttgctgaataattaataggccatgtgttacttcctagggcaaccaccaagcatttcccttaaatgactaaaataccctttaagcttataacttaagcattttcctagaggggtataaaaaatagtgtcaaattccataaccctgtttaatcccggtattatattttctctgaaatatttcccactaagaaataaggttctaaattaacccatgtgatcaaactagacatccatcgcattttctgttgtcgccgagcaaaaagaaacaaataacataattcacatataaatcaaataatacccctagagtttnnnnnnnnctccagaattgagaaattataactcgaatgcccatttctaacaatgggggtccacaaataattaatttcataaataattataaaaataacagaaattannnntaattgcctttactaatccaatttactaaagcggtcattaaaccttcccagggtgataaaggatctcacaatcataatccttcaccaactccagccagcgtctctgtctcatgttcaggactctcttggtgaagaagtatttcagacttttatgatcaatgtatatctcatacttctcaccatataagtaatgccgccaaatctttagcgcaaatactattgctgcaagttct

SEQ ID NO: 104395 - DNA, 563 bp, Cannabis sativa
atcaccaaaagaattatggatcatatgtgcatgagggggagacatattcatgttgcactcttttttccgtagttcaggttttgtcactaggtttttctagcaaggtttttaacaaggaaactttcaaatagttatgaatatgaaatatatattgcactcttttttccttagctcaggttttgtcccactgggttttcttgacaagatttttaacgaggcaactttaaatcatgttaacatacttgcactttatgaagcaagtagagaatgtgtggaagtaaaatcattgacataacatattcaaaaaaaaatattataaattacactcaataaagaagtatcaatacaagcagtactctatgaagataataatacttgcatcgctcaactaaaaagagggtacattgaaggagattgaattataacacatttcaccaaattcctctttatacatttcaatagtgcatattggtgtccaacatattcaatcgagtatcaatcttgtagacttattcacaaatttatcaccagcatcaacatttgagaatacgacatacaagatt

SEQ ID NO: 104396 - DNA, 553 bp, Cannabis sativa
aattccggttcctacaggcccctctgaattggaattacggttcagtgcaggaaagaccaaaaattgtttaactcttccaaatcaaccccaaacaacacaataacttgccgacctgctatatagaccacaaagaacatatcgcatgcaacaaaactaactaatatgctcagaaacacaaaccaccatcaaagctccaagtttgagttcaaaactcaaaacttggttaaatcaaactaacaaccattaaaacctgcttgaatccacatatctaaacataattaagcgtcagaaaacaacactaaacactaacagcaactacaacaacaaaaaccacaaagcatgcataaatctattttcttaaaattcaagaaaatcaaaaggacaaagtcaaaagcttacctagagcttaagcactcctaaatcttgtagaaactttctggaattgagaggaaatgggagcaaaccctagctggtctagggggttcgaaaaatgagagagagagtttgagaggaaatgtaatttttgtctaaattttgatttttcataaaatga

SEQ ID NO: 104397 - DNA, 2262 bp, Cannabis sativa
  modified_base (113)..(121): a, c, t, g, unknown or other
  modified_base (297)..(301): a, c, t, g, unknown or other
  modified_base (525)..(537): a, c, t, g, unknown or other
aggatatttctaagatcaaggattcatatcatttcaggatagaatgtcaggaatatagtcatctgcaccttttaatttcataagagaaattagaatgacatcataagcaaatnnnnnnnnnaccattcatccaatgatatactacttgagcaaattctaaatgaaaaagctaagagaaaaaattaaaggataattttgaataaaataagaatccaacaatgtctcggtaggcgagagtcaaagttattcttattttataaaattctttattatttcatattgtaaacactagtctannnnntcatctttggatgtacaactagatgttgcatttataaaatacctatctattgagatctaacactattatgtttgtctaacggatgacaatcttttagaatttatcccgttaaaacaataaactaagttagaccaacaatgaagattcaaaattatactacaactaataacagaaaataacatggttcaagataaattcatacacaattcaaaaattattaagcnnnnnnnnnnnnncaaagacatgtgaaaatacaaaactatcatataatagaaactaaaaattaaaattcaataatgaaattaagaattcatgtttcaggttttaaaataacccttaactaaaagaaaactactcaaaactagatattataacgaaaaatcatagtatttagtaaaaatagaaggagaagaaaagaactagaatgaagaacactttgaagccgatctctgtctctttcttgctccctctctaatttatagctttagattgatgcaattcatagtctaagagatcctatttataatgcttgaaaagatagatgaattcctttagaattaggattatatttatagtgcttgaaaagatagatgaatccccttagaattaggattctatttatagtgttggaaaagatagatgaatccccttagaattaggattttttttttaaaaaaaaatgataaatcggcgctttagcgcccatgagatatttcttgaataacccatgtgctgactttttttttgtgtttttttcccgactgggcgctatagcgcccatcacaatttttgttttacacctgattagtattttggtcataacttcttcaatacaacttggaattagacaattcaagatgttccgaaaagttaagaacgagatttaaaacttttatgttgaactctaaatccagttctacttctaaggttgccaaaatttataattaagttctgccttgtaaaatcaagctcgtcggcttctactacttttcaccaaagtacgctaacgtctcttcaagtccaaatgactccaaatgtatgataagtcttcaaaataacctaataaattataattccactaattaataatttaaagaatcaatttaagaatattaatacataaattagctatatttattacatctatatgtgattcaaatatatatatatatatattttgtataccataaagaacactgttttttggtccgcacttaagaatgtattgcctacctggatctgtgggtctgctattagcagggttggatggcaacgggttgggtatattattgttctgggacttaggctccattgtcagcatcttcagtgaaatcttccgtaaataatcagtctgccaccacaaacaaaatgccagttaggagagagcaatcaataaataaacacaaaaatatttcatatgcaagtacacaaaacataacatgtcagcattaaaatgtaagtaatacatataggtgacttaagtaaaaaagaaaaaaggaaaagggtcagaaatacagaagcacctggcttgtggcggtgctgtaaatcttttcttcaaacctttcagcaattttcttcagttcaagcaacccttcttggccagagaaagggagatgcttcttcaatgtatccattctaccagcaaagacattaaattatataagtcagtgaaaatgaacctttcatgtattttatactctaaagataagttctgatactgcatacttcacaaagcaggaaaaaaaaagacgacttctctttgactgtttgccaaaaacaattaaaagaaaagagacattaaaactattctagaaaagtgaagattgccaatcatgttttcaatttttaaatttttttttaggattagagccttttaaatcaaaaaccaaaacaaggtttttacttattttcaatttatgtcaccaatccaattaaacctttaattgtttaaggaacaaatt

SEQ ID NO: 104398 - DNA, 863 bp, Cannabis sativa
ttcctttccagagattcattcaacgcacggcgaacatctctttcttgattccagtcccgggaaccagccgggaggctttgaagagagttgagcttttgttcaagctcttttatggtcacatccatcttcccaaactgggaccggttccagttcaggagggccaccctggtggcgccaattttcttgaaaattcgagcaggggcccaattatgattgactgaactccaagcctgggccacaacaagattacttctagtatcccgagtccaaccctcttcaaatttgaaacatctcttgaacttgggttccaggccctcagagaagagacaaagaggcctatggtccgagttgctagtctgagtagtgcaaagaacagccttaggaaataacttaatccaggccccattcactaggcctttatccaaagcagatttcacatggttcctcccagaccggtggttatcccaggtcagagagtccccctgtatgggcatattgataaggcctctaccctcaataagattagagattaccgggataaatggatcacgaccagatgagccttctctttcacatccacttaagacaaagttagtatctcccaagattagccagggcccaccaaatctatccccaattcttaagaactcagaccagaatttcttcttagcattcagataaggagggccataaacacacgaaaggagccacgggaaagagggggggtccgaatacactaggcccgagatatgattatgcgaacaagagatacattcaaaactaaaacccgacttccaagccagaataattccccccgcattaccgattgacggaacacatatattaaagtaaaagtgtaaaga

SEQ ID NO: 104399 - DNA, 657 bp, Cannabis sativa
aaaaaaaaaaaaaagatgagtttttttttaaaaaaaaaagtaactgacacttgatagttagcaaaagaaaatgttagtgacttctgtatacgcgcgtagtaatttaaataaaaaagtcggcattcatagtgtattaaattattagagtgcattttcataaatattttaaaaaataggtatttttttttttgaaaaatacgtttataaataaaatgaagttagacctcatgatcattacaaaagatattaacaggtatagtagatatctctaccatgcccgtaacattgttggcaaatgcccatttggccacattattggccgcgtagttacagtttctagctatacacaaaaaattacaattagtcataaaagtagagaggagcaatgacgtacatagttctcaatccccccaatagagtcttccccttttaagttcttcataacaatctctgaatcactctccaccagaacaaaaggatgatgcaaagaaactgccgtctccaaggctaaaagacaggccgcaacttctccagtgagtgggtcagagaagtgtagccttttagccagcacccacaaaactgattcgttatggtctctcgcaatcgccacagcacacatagtttcacctccgactttgacatcgcagttgattttaa

SEQ ID NO: 104400 - DNA, 772 bp, Cannabis sativa
  modified_base (390)..(391): a, c, t, g, unknown or other
gaatatgcaaaagtatgcactgtaggggctttcattgtccgaatggacatggaaggttctctgagaattcgttggccctactagctagtggaagaaacctatccttatcacccactggtttttaatataaaatttgattaggtattgatagttgttgagcccaacataaggttttcatgctcaccttaacaaagcatggatgattgatcacaatatgcgaaagtactagattgatcggctacgagatcaccataatcattgatgcaacaacttggttatatggaacaatggaatggaaacggaagtatggaggatttatcagaatatgcaaaagtatgcactgtaggggcttttattgtccgaatagacatggaaggttctctaagaatnngctggccctactagctagtggaagaaacctatccttaacacccagtggttttggatataaaaatcgtttttgttttgatagttgttgagcacaacataaggtgtttttgctcacctttacaaagcatggatgattgatcacaatatgcaaaaatactaaattgatcggcttcgagatcaccataaccattgacgcaacaacttggttatgtggaacaatggaatggacacggaagtatggagggttgatcggaatgtgcaacagtatgcactatagtggcattcatttgtctgaattgacatggaaggttctctaagaattcgatgaccctactagctagtggaagaaacctatcctcaacacccacttgttttggatata

SEQ ID NO: 104401 - DNA, 718 bp, Cannabis sativa
  modified_base (515)..(515): a, c, t, g, unknown or other
tgggtcgggtactaggtcccggtcctagttctgttttccagtttcctatcctgtttctgggtccaagtcctagttattgtgtgggtttgggtctcagtctaggttcgggtttgagtcctagtctcggttcgagtttaggtctctgtctgggttttgttttgggttcgggtttgggtttaggtccttgtcctggtccaagtcctggtctgagtttgggttcaggtctagatttcagtctagatagggtgtgggttcgcgtactgggtcttggtctaggttgggcgtgagttccaagtgccaatctcgatctgagtttggattcagttcttggtgtaagtccttggttttgatccttgtctgggttcgagtttgggtcctgctccaggtctagcttttggtctgattctaggtgtgggtttgagttcgggtctcagtctgtgttggagtttttgtccaggtctggaccccgatctgggtctaggttcgggtgcaggtccaagttggggtcccgagtncgggtccaagtttgggtctgggcccgatctcgctccagatcaaggtcaagcatttcgatcccagtctgggtctcggtccgagtccaggttcgtctctagatccctatcgatgtcgaagtctgtgtttgggatcgggtcccagatttaggtccatgttcgggtctcagtttcagtcttggtagacgaccgtgtccgggcccgag

SEQ ID NO: 104402 - DNA, 1317 bp, Cannabis sativa
acagaacaaaacaaaacaatacttttcagaacccaaccatgtcaatagacaagacatatgtgtgagataccttttagtttattgaagttaaatttaaacatcatattttgtaaacttttcaaacaatgtggcaaaagagaggtccatttgttgggccaagattttatattttagcccaaattgtactattgataccttagcccaaaagcagtactgtgaaagtcccacgtgatttgattacttcatgttctttccttcgtataaataatggaaaaattatggtagtttcaaaatgtgcaacactaataatgatatttttgaattttcgatcatttcaatgaaatttgcttaacttgaatggacgaatgacatattcattagtttatttatacacattgcaaattttcatgaaccattatggctatccactgtgttatatggctcctaatgtggttaagtaggcatttacctatcaccgatttgggcaacttgctatatcgttcattcctatgaatctcttttgtaatgatcgtgaggcttaagcttaattaattaaacgtctattttcaaaaaaaaaaaaaaaactatgtgagagttgttccactcttattttattttatctttttttataacttaaagaggattaggtggtgcacatctcttccccattctttccatcattttaataattttaaagaccatgcatcaattatagagactttatgtatagtctgtcttaattaggtcatttggtaactacttacaacaagctagtttttagaaggaccaagcttttaatcccatttgagagtggctatagtgagtttcaaactcttaactcaaacaatgaattataccaacaagtgagacaatttatatcattatactacacaacatgtagtataaataatattattaagccacatgatatattattacactctattagaatcatctcattggaaataaaataaattaaaaaaatatagaataaaaattgaaccacaattattggggttagagaataagaagttttaaggttaggatgacaaatttttaattacaataaaaatagtttgactggaatcaagcttatggtattattatttttctttttgtaaaatattgaattcatattgtcatttaataaaacagaatagtataattttttaaatagtaaaatactatatatagtaaaaattctatttaataatactctatatttaagaataatttctaatttattatgaaaaattaagttctaattttgataaatataaataaaaataattcttaaattataattagttttatatt

SEQ ID NO: 104403 - DNA, 646 bp, Cannabis sativa
gagagagagagagagagatattttttttctaatttcttatttttgtaaaataaatgaataaaataggttttatctaaataacatcagcctaaaaaaattagattaataattaatttaaaatcactaaaggacaaaactctaattgggcaaaaagaccattttgcccccacttaagccaaaaagtcactaaaccacctaagggtaatttgatcaattctaaaatctcaactaatccttgacattctcaatgtctaactatattgccccactatactaaaaatactaaaatgtgattctaatggccaaacgccgtgttctaatgttgtcggacacaaaacatgcaaaaatataaaatttcatatatgacatatataatgcattctaaattcaaataaatctccgtaaaatgataattcataactaatatgcaagtttcataattaagcgctaattatatgctaatttctaaattaaaattaagtagtctttacactcaggctttactcgctaagcaagcttggagagtttggacaaaccctttctctcttctgtcttgtcttcttagatccagatattttaaacataatgactttctaagtgcttcaaaaggtcattgctcaattgtcacttggagaagccttctttg

SEQ ID NO: 104404 - DNA, 602 bp, Cannabis sativa
aggtcattcaatttatactcaagacgctttacctcctccatacggaccaaaggcgctgaaacactaagaagatcatccaattctttctgagtttctctaacctgtctaggagtagacccatgcttactcttattccacaccaccaactgatcagcacacgagccaaaaatatcaataagactatcttgattagctaaaggataatccgttgacaaccaggtcctactaattatttcttgacattcaggatccttcaaccaatgagtttcaaaccgaaaacacctctttttatcatactttcgccgtctagttacattctccagagttgccacaataggtctatgatctgagtgaaggaagtcaccattaagaaccttaacagaagggaacaattcatgccacctttggttacaaaaataacgatcaagacgttcctgtacttgcgcacccccattccttttattgatccatgtaaaacattgaccctcaaaccccaaatccgccaaagagcatctatccaatgctttttgggactcagtcatagccgacatactgcgatcagaaccaccctttttctcatttatcgaaagaatctcattaaa

SEQ ID NO: 104405 - DNA, 1171 bp, Cannabis sativa
  modified_base (59)..(62): a, c, t, g, unknown or other
aaggaaatgcctcatatttgttaattcttcaagtttaaacaaattttgtcaagtcttgnnnnattttctacttattacaccaggttgtaatagaagtcgaatatataaaccaaaaaacgcgagtacccgtgtactgcgaaaatgttaaacattaattatccccgcgaggatatgaatttgcccaaaataaattgcaaatatgtctaagtacagagtgtgagtacccctgtaccgcataaaaaactaactagcaaattcaaaagaaaaatagttcaaacatagaagagaaaagtcaagcattgggagcagcaggagcagatccatccgcaactttgctgacggcttcattctcgacttcttcagcatctgtagcctcagcctccttgggaagattccctccaccgccttgagtttgtgtgggcgacatggcgcgaaagcctcatccatttcaacggcttctgctccgaggattgagaagtcaaaatctggaattttggaaagagtggtgtaaatatagtcagaaactgcctggtcatactgtttcttcccattctccttctcgacctctaagtcgcgagccatctcctcgatcttcctctgagagttcttggcctcgagctcaacctgctccttagacttgcgaaggtcttcaagctccctgtccttatcagccgcgtcttgtttcagtttctttatgctctcctggagctgggcattttgcctcttcagcagttcagcttccttagaaccagcggcaatggctttcatgaacagagtcatcgactgcaaagccaactccacagagcgcggaacaagctcctcaaaagggatcctctccgccttggatatgaactcctcgcccacaaacttctcctgcatagccagaaaattgcgggctcggatagttggctcgatcatgactttcttccctttgtcttgcacggtcttagccagcttcttggaagaatccacggcaagagtagttataacatcgctcttcctcttttgggaaatgacaggcgatgtcgtcgctgttccactttttagcttgcgattaaggatgagcgcggactttaaaaaagtcatctctgcgaggacaaataaaagataagtgtgaataaatttcaaggcactagtttataacgtgggatatgttacctgaggctggtcg

SEQ ID NO: 104406 - DNA, 1041 bp, Cannabis sativa
  modified_base (50)..(59): a, c, t, g, unknown or other
aaccactgtaaggttcttgagactctatatgtgtttatttcatatcgttnnnnnnnnnnatatttaggatgttaataacatatttgttagtaaatctagatcctagtcaaataatttcaacaaattatttgcttaaagaattttatttttatttttttgttaaggttaaacgttaaaaataatgttgttaaatcaatcaattaattatcctttttttttaaaaaaaaatagttttaaatatctaaatttaatttatttattaacggttaaaactaacaccattaaacaaatcaataaattatttttttgaaaaaaataattttaaatatctaaatttaatttttattacataatcacttaaataagtatttaaaactatcaaaaaaaaattagataattatgtttctttctattaatcttaatttaaatttgaattagaccaattaattaatcatactatataacaaatttattagttatattgtttaaaatatctaaacttatatatttattttattatctaataaattagttagatatatatttcttataaataaatataaaactagattaaattttatatatctaaaaaattataattgaattgcattagatttaattattattatcataatttaaattgttaattaggtaatagcaactctaatacaagtctaagcaaatatgcattccatgttactgatatctagtcttatattaaatgtggcgataaacagaaagtgttgttacttttttaaacattacaatttaaatttaaactcactggacatatttgtaaacatagattatattaacaataaatgtagcattgtaaataatagtttactatttataatcaataaatatatataaaatattaagaacttttacatgattttgcagtttcaaatctacatactaaagagtcaatattactactgagtatttctttttagggtaaatactattttagactatgtgttttgcaaaagttaccaattggaccatctgttttgtaaagacaaaatggaccctgtattt

SEQ ID NO: 104407 - DNA, 894 bp, Cannabis sativa
aaattgatgtaaatatatcacaaatcaattttataattgcagaataacataatacaaaaaattatttataaaaataataaaaattattcataaaaaaaaggaaaaaaaaatagaaaaaagatgatttataaagaaaatgaaaagatcatttatataacaaaaattaaaatcattcataaaaaaataaataaatagaagatataaaaaatgattgataaaataacaaaaaaaaaaaggaaggcacaaagaacaaaaataagtcttttatttttattttttagtgaacatgctttttctattgatgttatagatagtagcatacgaaacacaaaaatttattttgtgtggaaacaaacttttgtctcctaattgttatgcccggatcacagtaaaaatataataactaatttttttagtattttatgtaaaaactctaaaaaaaattaaaatttcaaagaattccattactttcacaaactgtatagactatagttatgaaaaaagaaaaaatctcttcttagttaaaacatcatataagaaagaaaaggaaaactaaaatttaaatattttcattagaatatatattatgattatatgagtagctacaacatttttatttctacacacgatgtaatttatatatatagctagatcttaatacaaatacatagtgatagagagtagtgagggcttcataattatttaagcatagtatatacgtaatattaaatattagacatgatgatgagctattatgggtggtggtggccgtggtgatgattaggagggggatgcggcttgtgtggctcaggagggccgactggcggtgcatggtgacctggcggtggtgcatggtgaactggtggcggcggtgctggatcgggtggcggcggg

SEQ ID NO: 104408 - DNA, 2169 bp, Cannabis sativa
tacaattacaagtagtatactactgttactatgtacggagctcgtttaaccaattctggagttgtctctgccaaacactagcgtggtagcccagttcactgccacgtaaaacctgttcctccagctgatgacacgtgtaagataggcagagcgccaaataaaccagctaaggaagccagcaagggagataccctttgcatcctgccaacaaaaactaatcaaattaaggccaaaaccctctccaaattacatcatacataaactctatgaagattggatatctaataatgatattaccttagactgtcgtagatcaaccagagccttatatcttccaactgtggccatacttccaaggtgtctatacacaaaagggtccccaaatggaatgtcattagcagagaaggccttcccaccattctgcttcccaattttgttaaacaactccacaagaaatttcccctgtcgttctgcaacctgttcagatgaaaacaatgtgaatctggttaaatctaaggcttggattgttgtataatgattcttcaaagttggtcttacaatgatacataagtatccatctcaaaacacctctcactttgcagtattttttagtgatcatttttccaaaatatccaaaccaaaaggccaaattacagtattttcagagtgggactggagacaagaagaatcctaacctgggctaaagctggaagtactggccttcccgtctgttcaaggaaaccagcacagtctcccattgcaaacacatcttccgctgaaggcaccctcaaccactggtccacaccaatcctttaagaatcaacaaagagttagtaacatacttaacatattgattgtaacaactacaagaggatttatggtatatattagtaccttccaccaggggagttgggaagatgaagtgatttcacaaagtttgatggtccaacgcctgttgaccacaccaagagcccataaggaacatcagttccatcgttgagaactatctttttctgatgtacttctttcaccacaccacgcattaggcgaacaccagactgaaaagaaagaaatattccaaatgtcatcatactaaatctcaaagaaatatgatcaagaaagatatcaaggtaattcaaactaacttactttggtcaagtggttcgttgcatattgtcttagccccacatcaaaggacgatagtatttcatttgcctgtggaaggagtataagtcaaggacctcacatttcctgctcttatagtatatatactagtttataaaatataaaagaatgaagtcatgaacattgttaagtacctcaataagggttactttgacgtcgtccttaacatggctatacctctctcgaacatctctcattataaaatcactcaattcaccactaaattccacccccgtaggaccaccaccaatcacaacacagtgaagaagtcttttcttttcctcttcagatattcctgcaatacattaattatgttttaatagaaagaaaagagcttctgatgctagaacagaacaaaaacaaaaacttttaaattattatgtagagatgacagctcacctggattttcagaaagcataaggttcaagaggagcttcttcctaatttcttgagcatgatttacttcacgaaggaaaaaagcatgttcctccacaccattgataccaaatgtcaagggcgcagctcctgaagcaatgacgagcttgtcataagccactttgaaacgataaggctcatttgacaatccaccgttgctaaccgtctcacaatacaccttcaacacacaactccatcaacccttttgatctttatcatacatgacatgatctccatctcaatttatgatacatagtttgaaataacactcactcaactcacctcatgtttttctgtatcaacgccactgcaagaagccaagtaaaaataagaatttggattggaggccaatgcagactgaattcgactaacaggttcagcaaccgagcgaaattccaatgttccaacacatgttgaagcaagcaaaggagtgaaaaccatgtgatttctaggtgatatgcaaacgacatcataaatatttgtgtccagtcctttgaggaatcgacaagccgcccaaccagtgccaaggacaaccaccctcggcttttc

SEQ ID NO: 104409 - DNA, 908 bp, Cannabis sativa
tttaatttcatcgtattagaaaatgcatatttagggtgttaatgaaacatacatgttagtaaatctagatccttgtaaaaataaattccaacagcaccctgaggcacttggtgtgcaaccttcaccctagcaggcacttggtgtgcagtagggttgtacataaatttttgtaaacagtccaaaccgaattacctgcctaaaccaaaccgagataacccgacgaaaaatacaaaccgaaaaacccgacaaaaatataacccgcccaatctttatattgaggggttaaaaataataccaacccgcccaatcaacccgaactaacccgaccaacccgattaagagagtttttttttatataaatttataaattttttattatatatatttatatatcatataatttatatgattattttaaaaaaatataaagtagaaactaatatatttttttattgtggttgatttgaattttaaattcaatctatatatttgtctcattattacaattaactaaaatataacaattgaatgtaaaaatagaaaaataaaaataaaaaaaattagtggttggtttggacgggttaactcgaccaaactgaccaatttcattgggcaggttacaattttttttcttaatttggcaggttgcatttagatttttataactcgatctttacattgggttcaataaaatgtaccataaaccgattaaatcgatcgacgtaaacccctagtgtgcagccttgaccatggcagacacttgttacgtagcttgcatcctaaacaacactacaagttacgaatggggctttaaccacccagtaaaatatttcagaacgaaataaaaaatatttttacaacatatattgcgatttccaaacaaacatcaaataaacacataaaccatc

SEQ ID NO: 104410 - DNA, 670 bp, Cannabis sativa
aagatcccaccaaaggttcgtaattttctttggcgtgctgctgctggaacacttccgacttgcgtcaacctcagaacgaagcatgtagacattccctcactgtgcccggtctgtcatgcttctcctgaaactgtttctcatattcttctgtcgtgtagctttgctacttcttgttggaatcacattggtttgccagccggagtctacttagatcattcctttgccagttggttggatagtctttttactattcttgatgaagaccgtgtgtgttctctctctatggtctgttggtccttatggaaagcaaggaattccattgtttggaaggacaaggtcctcactattgcaaatgtggtaacatcagctcgtattgctcttgatcactggcgaaaagctcaagataacaactctctatctcatatttactctggtaattgtgatgacggaactgagctttggactaaacctgatataaacacaatcaagatcaacgttgatgctgcacttttcactagcgataaccagtatggctatggtatggttgcaaggaatgacactggttctcttattgttgctcaagctcattgttttaatggagctttcgcccctgaggttgtggaagtcatgggaatcaaggaggctctaagctggatcaaacgacaaggat

SEQ ID NO: 104411 - DNA, 2408 bp, Cannabis sativa
  modified_base (1736)..(1743): a, c, t, g, unknown or other
cactacttcctatctattgttgatgattttagtagatgtgtttggacctatttacttaaaaccaaagatgagtgtctagaacaatttaagatatggaaagctttagtggaaaacaaaacaaattcaaaggtcaaggcacttagaaccgataatggtctagaattcatcaatactgagtttgatagattgtgtaatgagcatgggataactaggcataggatagttgtgaaaactccacaacagaatggagttgctgagcgtatgaatagaacccttttgaacaaagttagatgtttacttcttagtttggggttgggaaagccttattggggagaggctttagctactgcttgttaccttgttaataggagtcctaatagagtcatagacttgaagacaccttatgagatgtggtatgggaagataccaaacctaaaacacttgagagtgtttggatgtgcagcatatgtacatcaacctgatgataagcttgatgctagatctgtcaaaggcatgtttctaagatatcctataggcacaaaaggttatagagtctgcataaaccagaatgggaagcctaaggtgattatttctagaaatgttgtgtttaatgaaaatgattttcctcacttgaaagctgagaaaggcaatgtgttacctgatgcagattcatctggcaagagggaagatttggcagagtttgaaattaagctcaaaggatttgaacgagtaagtgagaagaatgacagtacagacacagctccagatgaggctgaggaacaaccagatttgtctgacttccagcttgctagagatagaactagaagagaaatccacatacaaacaaagtttgcaaaagctgatctgattgcctatgctttgtcaatagatcattcctgtgacatactagaatcattgagtatagaagcggctttaaatggaaagtacaagaaggagtggtctcgggatgtggatgatgaattaagctcgcttagaaagaacaagacatgggtattggttccaagacttgaggacaagaaggtaatctcatgcaaatggattctaaagattaaagaatgtgtgacagaagatgagccagtaagatttaaggcaagattagttgccaaaggtttcactcaggtggaagggatagattacaccgaggtgttctcacccgtagtgaagtataagaccattagacttatgttgtcaatggcaactcagcaaggtttagaagtggagcagcttgatgttaaaacttcatgtctaaatggttatctagaagaagagatatacatggagcaaccacttggatttcaggtggaacaagatggaaaggagatggtttgtaagttggaaaagtccttatacggccttaagcaatcaccacaacaatggaacaaacgatttgacagctatgttcaggagattggtttcacaaggtccaagtttgataactgtaagcacctagaagagtcaacaattgtgtatcttctactctatgtagatgatatgctaataatgggtaaagacaaggcagtaatcaaaggaattaaagataaactcaaggcaaaatttgatatgaaagaattgggacaagtaaagaagatacttggtttagaagttcatagatccaagagtgatggagtcatgcatttgaacaaaagaattacattgagaagatcttaacaaagtttaagatgcaagattctaagagcacttcagtacctcttggnnnnnnnnttgtattaaccaaggaagaaagccctatgacaacagaagagaaagaagatatggaagaaattccatatgcaatggctttggggtgtctcatgtatgtcatggttagcacaagacctgacattgctcatgatttaagcatattgagtaggttcatgtcaaatcttgggataaaccattggagggcactcaaatggttgttgagatatttgagagggacatcagatattggattgacttacaaaagagttttagagaaagtaactttgaaaggatatgttgatgctgattatgcatcaagcaaggatactagaaggtctactacatcttatgtgtttcaaactaatggagattgtattagttggaattcacaactccaatccgtagtagcactttcagctatagaggcagaattcatggcgaccacagaggcattcaaagaagcaatatggctacaaggaatttgaaggagttgaagcttctagtaggaaaggcaagggtatattttgacagccaatcctcgattcatttgtgcaagaatccagtgtaacacgagaagacaaaacaaattgatattcggttgttttggataagggagaagatagaagaagaagtaatcgagttggagaaagtgaagtcagaagagaaccctgctgatattggcacta

SEQ ID NO: 104412 - DNA, 2707 bp, Cannabis sativa
  modified_base (272)..(297): a, c, t, g, unknown or other
ttaaggacgtgtttaaaacacgatcattttaacccaataaaagcgggaaaatcacagctatatgattttcaaatcataaaccacatttacattacgtcatatgtaatcaaatcccatgattttagggatgattgttgtaaacatattacggttaactttgtaattaactgtcccctatgtaattataaatagtgacagagaagatcaaaaaagagacgaaaaaactcatacaggggaagccctcaaaaataatcagaaatttgaataagatnnnnnnnnnnnnnnnnnnnnnnnnnnactgcaaaaccacgtaaaaaccctgtgttcatatttttatttttacaacttttattttttctgtgtgaaatcaatactgtgaggctcaaatttggttaacgcaaatctacgttaacagtaaggttgttttaggcttgaatctggtgattttggtgcctaattcttgtgttgagcaagtttgagttcaaaggctaaataatggcattttgtaattttttatgcatttttcttactgttactgcttggagtctattgtttgatgttagtacatgtgttctggaaagtttgagaaaaattggagaaaatttagctgagttttgaagtgttttgggttttcttgtacgaaccggttaaccatattgtaggtactgtagaaccgattaatcgattcactaggcaaaactccagatatctggtttgccgatttgggctatttttggagccttagttttggcgtttcctcaataattaaggtattatcatgctagttattgatgggaaaacttttagttttgagcttagatccctggattagcttttagcaagttctttacctatttacgtgattgtgacataagcatccatccagcatgtgattttctgttcagattggccgacacaatatagcttggaacaaggtaagactagcatagaacatatttatatatgaatatgtgtatgtgtaatatatgtatgctatttgtgatccgtatactaccaacatagtatggttgcaatactgagtgcattggtacagttactaacactagtacggataggtacgtagtgtatgtggtaaaacacttagtggtactcgaggtacagtgcaaaccctaccaacactaatacagtagcagtacgtagtgcatgtggtacagtggacgtaccttagtaaagaacgttcttactcatctgtgaagccttgtggataggtgtatgggcgcctagatacaagtcggtaatatatattacgttacatgcttttcttactaagtttgttgactcacagatattattttcatgtgtagctaaaggaaaggctatggctgaacaacagtgagttcagagcttaagggatgattgtacatgtcaagacagtgcgacctgtagagtttggtctcaggacgacttgggctgtattttttagtcgttgtgcaacatgtttgaaaatattattttgaatgtcaagttaaaaaagggggatcacagtttgatgtaaatatatatgttaataaagtgtaaagtttaaagtttaaatcaaaatttttaatttggcacgattatcaagaaaacctttgattagcaaaggtgggcacagtaattagaaaatcactgtagcgcgccaaagcattaaggcattacaattttggtattacagccactaggttttttaccgaagatcgtgaagacatgtacaatcattgtcagaaataagctcaactcagtgttcagtaagcctttatttgtttagcaattaatgtgattagaaaagcatgttaggaagcataatagtttatgaatatatttgaaagcatttccttaaaatccataagtgcggtacttagagtatatgtgatcgctgtctgacctacctgacttacgggttcccaggctaagtcctattatacggacgcccaacgaaacacgagaagttgtggtaatatggtgagactggaggttgttggggaggtcaaaatcctctgatccctgtggacgcggcagaggccgtggaaggttttagggtgttcgacatgaaaatccaccccaagctcctccgaattgggagaaaaggtttgtagaaatgcaagcccaatttctccaacaagacaaagaaatttagagtctatgataggagggtcctcttgcaatgcctccactacaagtaccggctgctttggttccaacagtgctagtagaacaacctgctattggaaactgctatactcaaaatcggttgccatctcagtggaggacacgtgtcaagataaaagggaatatggattggtgcaatcgctttttatagaataactcattaattacgaaaatatcagagtatatttgtaacatatagactgtaaggtcttaggcgaaaagttaatataaaaactggtacttagcatgttagcgagaaaccatatgtcactcaatgcgaattgcgaggcatcaaggatagtacacattggaagacgaaagcgacatatatcaatttcaaaagcccttagtgtacaaactaagtgtcgaatgggctcgagaccaagtaagcgaggtgctcgtttcgctataacctcatcccgtcaaccctagcgaggctcacaaccctagaaagtcaagaagttaacattcaaatgagcttcgaagaactctttgtaaataagaaccgcgatcgacacaagacatgaatcgtcgacct

SEQ ID NO: 104413 - DNA, 528 bp, Cannabis sativa
atgttgaaaagttctcttgttaaaataaaaaataaaaaataacaacaactttgaagagaaaaaaaattaataatatgaaaaaaaaaaattaatagcaagagataaatttgataggattataactctaattatgtgaacaaaggggtatcaaatgagaaaaaaatattatcaggagaaaaagaaatttatgatgaaggttttgtattttttgattagatttgtaagtttatggtgtgaaactagcctaaatgacattcttatctaccatttacctaagcctaacgttatatgcctataaagtcctttggatctacatgaccttagtttacattagtagagataaattagttatacaagcctatggttatcttgaatattttgtggtaagggaagtctttatgcacatgaattacatgtacatagagttagtagaattgacatatatacattcttaataaaaatataatattggaagttaagtttaaatgggttgaaattctagtcctttgtttgaagtacatattgaat

SEQ ID NO: 104414 - DNA, 547 bp, Cannabis sativa
aatatttgaaaggtacttataaccgttaacaaacagaaagaaaaatggataaaaatctcaaaataaaaaaattaataatcataatgaaacaaaagaaagacaacactctattaaagaatgtatgtttatgtaatattattatgagtaaattgcaccaaaacttcaatagtcacttcgctagcaattaatttctaaaatctaaattttgacggtaaaaactcctaaaccaaaatattgttagcaaaatccaatttctgtttatctcagtgccttatttgcctatgaccaagtgccaggtcaactcctattactatgtcactcaaaatgtaatcaaatggcatttccacgtgtgcaatattgtacacgtggtctacctacattggtctacatactatattaatttaaaaattattttaaattgaaaaataaattataagttttacaaataaaaactaattataaaattaattacaaaatcccactcactcaaatcgtccctgccatgaaacccaactgaaaacactcacaaaaataacaatgctattat

SEQ ID NO: 104415 - DNA, 552 bp, Cannabis sativa
gtgatttttccccattgggttttcgcgtaaaaatcttagtgtctcacttttattctcgatttgtgtattttatattgcttgtgggtgttttggttgatatttgataattccttattgtggtatttgataagtatttcattttgacatacaaagagggaaaatattgtggttaattgcaataggttttcccaacaagtggtatcagagccaaggttgattggtgttgaattcttgtgttgaaaaatggatgagtcggatggaatgataaaattaaacttatcaaactatttcgcttggaagcaattgatgaaagatttgctcaattgtaaatatttgtacaaacctattaaaggtagtgagaagccgtctaagttagatgatgaggaatgggaagttcaacataaaaaagccattgcttatattagacaatggatggatataaatcttcatgagcatatctctaatgaaaccagaactgatgtcgtttggaaaaaagctaaaaaaattctttgcgaagagaacagttggcaataaaatttctctacttagaag

SEQ ID NO: 104416 - DNA, 538 bp, Cannabis sativa
acaaaatagactaaagaacactacaaaattaagtaccttttaaagttagagtaaaaatacaggacatatcacatgatgcaaaaatagactaaagaacaccataaaattaagtaccttttaaacctagagtaactaaagaaagcagaacaatcctaaattctttgaatgggattttagtcatgaagaagatgtaatacatacaaattagtattacacatgtaatctttatttaccaaatcaccaataaataaaaatgacatctattatgagttgaaaattaggtgtacgtattacagtcgaaaatgcttttacttcacaataataattatacttccaccatagactttgatattacaatcctctttagcacctcaaaaccatacctagtactaatgaacccgagttagttcgacaacccaaaggctatacttgaacagaattcctcttacaaaaatgtcgatagagagatcaagtacaccaaaaaattaagtaccttgatataccttaaaagaacaccacaaaatagactaaagaacac

SEQ ID NO: 104417 - DNA, 595 bp, Cannabis sativa
aggatttgcatcaactcttgtacgaggattatcctcgtctttgttccagaccgcccttttcaagcgacgaacgtcttaactcgttcttcccatccagccacaggatgatggctcgcactaaacagacaatgcataaagtcaacgcgtttgaccctcacgtggcccagcatgctaccttacccagtgccgaacaagatccacccgtccaggaggagggggatcatgaaggggacgctaaagtctaggacatagaggaacagggagatgtccgtcctgacagcccttctgaggcggatgaagaggaggaggctgcacctctaaattttggaggatataacgaggtcggggagccggtagatgtggacggtgatgtcctagtttaggaagtggactacgtcactgaggagcttagtgctgcagttcctcaaaggaggaaaagtgccttagaggtggtcctccgtccaaggtcactgaagcacacttatgggatctcgaccagtgcagctatcagggcgagctggaatgttatgttcctgcctcgaacaaccgagcctccaacccaaagaaggggatgtgtgcctggtcgggtgctctt

SEQ ID NO: 104418 - DNA, 1794 bp, Cannabis sativa
tcatttatttttattaaactttatactgtctttatttattatattactattatttaaataataaaaaaataaaaataataatttttatgtatttttttttttaaaaaaataccaaattaatataattaattttttttacttattttacctcatgtatattggagcatattaatataaatagtgacctaaatgtatcacaaatttatagttttttggtgacaaatttagcatagatcttccggacttttacttattttaaagagtcatttatgtgtggttagagctattttttaagtttattcctattttagttaaaaaaaaaaaaaaaaaaagtttgtttcgagggtattttgtaaatttcctttatatttatttatttgttctaaattcttcttttctttattattattattattattttgacaatcttattattattattattattatttaggaaatacattaatatcacaaaaaaattgccaagatgtataaagtcatctaaaagaaagaaaaaaaaaattcgaaaaaactggagtacgtgaaaggtagataacagataaaaaaaatgatttatataaaatattaaaaagatttaaaatttcaaatatcaaagaacttacttagttaaaaagataatatctcacttagaataaggtaagcattataaactttatgtactgctttccttgtatatgtttttttttaatttatttgtattgtaaaatatcagaaaatatagctgagtgatcacttgtttaaacacaccacatatggcggacgaggagagagtggtcgaggaagtaaacgaaaaagagattgaatattcaaggtataatcattacttattttttctctaccaatttattaattatgttattaatttatgtcatgtcaattttaattctctattgtccattctttttatgtagaagaacaggatcaattagaacttccacttggacaaaggaggaggtaacaattaattaattgatcaattttaatatttatattcacacaatttttcaatcacatctttttttttctttcgttgttttctttaccaggatgctattttaactgatctagttaagctctacaatggaaaaaattggaagaaagttggtcagtatgtcaaattgatatgtattatattttttttcgatacattatgatagaattaattccctaaaattgttttatacaagtgtacagattgttttgttatatatgatattttttagttactaatatatatgtatttttattttgcattagcttcacgtcttcctaacaaacaaaattcccagtgcttgcaccgctggcaaaaagttttaaatcctgcactagttaaaggaccttgggaaaaagaggtgcctaaattttcgtttattataaatataaatttttgtttatgttgaagtaataatttagaaatatatataatattactttattaaaatgtaacgtactcgatcgatttttaagggaattaaatccatcctagatatatattttatataaaaagttacgttaagaattagaatatataaatgtttgttcatataggttgaatttttttttttattttttttaggaggataagcaactaattaagctagttggagaatacggtgtcaagagatggtcaactattgctaaatttatcaaaggtcgcatgggaaaacaatgcagggaaaggtatataactatttattccatattatatatcgaatatttgctgcataactttccaaaaattttgagtttgtaacttgtatgaacttagttatt

SEQ ID NO: 104419 - DNA, 544 bp, Cannabis sativa
cttccttttctcccctaacacttctgctgattcccagcttcaatttcgtcaatctcttcaacttcatggggagggatttattagtaagtaccttggtgttcctcattgcgttggcagggttactaattccatgttccattatctccttcaaaaagtctcttccagattaaattcctggaatgaaaaattcttctctcgggctggcaaggaaactttaattaaagcggtggtccaagccattccttcttttgcgatgtcttgcttcaaagtgcccaaatcgatttgccagaaaattcaaagcttgatagcgaggttttggtggggatctcagggcactaaaaaagtccactggaaaaattgggatgttatctctgtctcaaagttctttgggggtctgggttttcgtatcttgtcctctaataatcaagcccttctagctaagcaagcttggcgtgtttggaatgacaggaactcccttctccattctattcttaaagctcggtatttcaaacattctgatttcttgaatgcccctgttggccac

SEQ ID NO: 104420 - DNA, 545 bp, Cannabis sativa
  modified_base (88)..(88): a, c, t, g, unknown or other
aaaaaaaataatttttacaaaaatactatcatacagaatttttttcaaaaatatagttataaagcaatagtagaacacaaaacagaanaactaaaaacaacagtggaacaattaaaaaataaccgtagaacaacagtgagaacttaatacagtaaacagtatttttgaaaaaaaaaaatttgcctcacattgtaaaagtaaaaaagttaaaaattttagtatgtggtttaattattgctatctaaagttcactttcaacttgtactcaaataaaaaaacaaaaagtccactttcaacctataaaatggactcacgcaatcattcccaaatgctactgggctaagcctataggcccaaaagctagtgatcaaaaaaggccacgatagactcaaatgtcaaactaaaacaattgggccaagtgaaactagcttttcccactaaccgtatttactattgggattttttcaataatgtacttaaaatataaactatttacaaaaataacttaataaatctcaattacaataatactttgccacgtcatt

SEQ ID NO: 104421 - DNA, 545 bp, Cannabis sativa
  modified_base (51)..(54): a, c, t, g, unknown or other
acaattaagtatcacattcactctgttattacctattgaacttaaggctannnntttactagtgttaagataggttaccatcaatgagtaaaacactaaaggagttcaggtcccataaacttaaaaactcatgctttaatcttgtacggagattaagtaatttgtataacctctcactattgattccatgtgaatcatgcatgtcaaaatatagttttcaatttgtgactacttttctccttaaatacttaagctttgaaaatttaatcataaaagattaatttcacacaactcaaattctcaataattttgataccaaatatatcaaaattaaacattaatttatgggagtacgggccaagggacagtctcaggtagacagtttctatgggctgtgtaggcctcccaaaaggtaacaaaggcgtgcaaaggtttccttgggccaaacagagattggccctcgagtgcaaaggcagaagggagcttgactgcaagacccacccgtcgagcagggacgaaagtcggccttagtgatccgacggtgc

SEQ ID NO: 104422 - DNA, 515 bp, Cannabis sativa
tatgtaataatttaagggtatatatatgagagggtactctatcagaaacctttaaagccaatctttcttagacagaatattctcaattttaccacttttaccattacacaattgttcttaacactaaaccctttttttccttatgaaaatattttatgcacaatttttttggtaaaaatctattactatcttaaagaaataaattataaaaatattagtctaattttacgtttacaagtgcactaaagaaataataacaatagcaaataatttaaactattttttttacataatataaaaaaataaaaataaaaagaaaaagaagtataacactcaaatatatataaaaaaacaaagtgtacaatttttctttttaacagtactaacgaaaaaaaaaaataaatctacttatatttataattatatatataaacaaaaggaaaagaaaaaaaaatttactacagtttttttttgggagtaaggaaacaatgaaaaaaaacactatataaaaaaaa

SEQ ID NO: 104423 - DNA, 727 bp, Cannabis sativa
tttcttcagcaaaagctaaatttggtcgttcctttttttgtcttccttctttcctccaataaagcttgattcccgccaacactaccaattcgtccaattcgactagccttctctgcaaagtattttttatcatctgattgttaccgaaagtcgacttactccacaacttgatgatttcttttaccatcttcaatttacacatgagcttggtccccgaccatcccaacgccactgcatttttccaccaaacctcaaaaaaattggaggagatgtgatccaaccactagctatcaaactgaaaaggcgtggggccccatttaggaaaattggggtccaggattattgggctgtgatcagagattaatctcaccatcatttcttgtctgacaaaaggaaacatgatcttccaattattactgaataagaatcgatccaatctgctccaaatgggtaccgatctgaagttcgaccaagtgaacctttcagtgattacttttggatccataagcctcaactcttgaactaacttatcaaacattatcatacttttagtactagaagcactattcattttttcttcaaatcttctcaccacattaaaatccccccctaaacaccatgatttgccacattaattacttgtaaattaattaaatccggctcttcgtttctctctatccccactgcccctaatatccatgtaagaatcttcgttgtaatctttttt

SEQ ID NO: 104424 - DNA, 2033 bp, Cannabis sativa
  modified_base (207)..(208): a, c, t, g, unknown or other
ttaatcacataatcttgattacttttcactgtttgatgacacaataaacaagaatatcgatgtaataaggatttggacgaatttattaatcaaataaacatataaatgatcacatgaaccaaataacatactaaataagtaataaaaataaatctgtttctttattgataattgaatagaaaatattacattgaaatagagttttanntagggcacaaagcccaacatattctactatgatcgcaaaataaaaaattgtacaataattatgccctatgtataagtatattgattatggctgttaaatatgttttcccatagttcaggttatttatccatatataacaagatgttagatattgatctagcatcatatcctaaacgggaaggcattcgtgattctcgtcaacttttaaagacagtagtgaaattagattgagaagatgttgagggcaaagagatgaatacactagaccaatgggaattattctaccaaacatattcaaagtggaaaggatttagtgtttggattgaaaagacaagatacaggaaagaccttgttaacattagacactttgtttgttcaaaataaattttttttagacatgctagatcgaaaaaaatgcccaaagaaaatcacatgcgtaggctgcaaagctagaatacgtgtcaataacctggtgggaattaataagtggatatgcaccatttttattgctactcataatcacgaacgagctacccttgattcaatttcattcctacactcacaccgtgaggtccctatgatgtggctgaacacgtaatgatcatgaacaaatgcggggtgaagactacatctattataacacatcttgccctccaagtagaaggctacaaaaatctcaattttcaaaagagagatgtatacaacagcttaaaaattaagaaatgaacaagttttgtcaagtgatgttgagggcgcattggggtacttggactgcctttggacaaaagatctccaattttatggaaactacaagattggtgaccaaaatcgattagcattgctttttagggctgatgggaacaatagaagagactacatgctttttggtgatgttatggcttttgattcaacaaacatgacaaacaaatataacaagccattgacaattcttgtcggtgtcaaccaccattatgagacttgtgtttttggcactacaattctcttggatgagacaggagatgcattttgtgttaagaaaatagattagttaattactgttaattaattagttaatcctgtatttctagtttttgagtttgttacattgtttttagtgtttgcctttttctgttttgagttggtctcccttttaccaacactagggccacatgtatttctcctattagtgcttgtaatccctctttagagtatatatagaaaatgatatctcagcctccatttgagctgagaaaacctttaccatttctgtgtaaaattcaacttcgtatcagagccaagtaaaagcctgcccatgtcgtcgcactctcagactcctcaggcaaccactacggtgcagcaggtgctgcaagctcacccgtacttatttctcaacagaactacacccaaccgttcagtagtctgaattaaccattccccttaaagcttgataggaaaaactatgtccttaaaacaatggtgtccacagtgatacgtggtcatcgtctcgatggatttgtaaatggaactcgtccatgtccaccagagtttatcccagctccaatcaccactgaaggagaaacagggtttggtgtaaccattaacccagatttcgaacactagattgttagtgatcagctactaatgggctggttatatagttcaatgacagagggaattgctaccgaggttatgggctgtgaaacagctgcagcactgtggaaagcacttgaaaatttgtatggagctcactcaaagtcaagaaataacatcattcacaataaatcccctcaacaaccagcaactatttatgctaaatctttagcat

SEQ ID NO: 104425 - DNA, 742 bp, Cannabis sativa
agcccataatgtcatgattcttcaggatcttttgaaaaattacaaaaggaaaaatgtttctcccaggtgcgaattgacattagcaaggcctatgatactgtgagttgggaattcatggaagacttgcttaatgcttttaacatacctttaaggtttgttaagtggattatgggatgtcttcgagctacatcttattctctagtcatgaatggttgagtgcaaggtggctttaaaggggaaaaagggttgaggcagggagacccaatctctcctctcctttttgttctcataatggagtatctcacgagaagtctccaactggcaacctctcacacaagcttcaggtatcatccattatgcaaaggccttaagattataaatctctgttttgctgatgatttaattttgttcagcaaaggttccaaaagctcggttttggtgcttaagcaggttcttggggattttagcttgatttctggcctccatattaactcgagcaaatcccaaatttatttgggaggtgtgaaatccgaggagaagcaagctatcattgatgggtttcacttaatagagggcaccttcccactcaaatacctaggcgttcccttgggaccaacaaagtggaaagtcgaggactgtgggatcatagtggataaaatcaaacagagattacatacttggtcgagcagacatctctcttttgctggtaaggctcaattaattcactctgttttacttggcc

SEQ ID NO: 104426 - DNA, 889 bp, Cannabis sativa
ggttcccaactcacagggtttaacagaacaacacttatcccaatggggaaagtgagacttcccgtcaccttgtgctcggacacccccaagagcacgttcaagtactgtaccttcgtgtggtagtggactgcctaacagcatacaacgcaatcctcggccgaccagccttggtagactttggcgcagtcacatcaatacggcacttgtgcctgaagttcccaacccaggaagctgggatagggacagtgagaggaaatcagggggaggcgaggcaatgctacaacgttgcgacgcacctacccgtgctgatggtccgggaaaccattgagccagaaatggctgaggaagacgagttggacccccgcttggggtccaaaaaaattatggaaccaatggaggacgtcgaggaggtatcagtgtgtgacctcgactccaccaaggtactccggctaggaaagagcctagacccagaggaaaaggaaaaaataataaagacactgaagagcgccattgacattttgcatggtgccaagaggacatgactggtataagtccccacgtcatcacccacgtcctcaacgtcaacccggacatgccgccggtccaacaaaagcgatgacccctcgattcagtgaaggtcgatgccttagagaaagaggtggataagcttaacggaacctggcgagtttgtatagacttcactaatctaaacaaggcttgtctaaaggactgtttccctctgcccaggattgatcagatggtagacgccacttccggactcatgctactgtccttcatggacgcgtacgccgggtacaaccaaataaagatgcacatggcggaccaagagtgcactagctttaggaccgataagggggtatactgctac

SEQ ID NO: 104427 - DNA, 671 bp, Cannabis sativa
ttcaagtcccaggtcccatttctgagtttgggttcggggttgagactggggtatggttctaggtcccgaccttggttctgtgttcctagtctggttcaatgtttgtgtatgaattaaggttcgggttcgggtcccgagtgcaggtttggttgggatccgggtctagctcccgattcgggtctaggtctgatttggagtccgtgtcctggtgcggttacggttctggatctaggtcaaatttcaattatgattcgaagtccaagtcctagttccagtcctggtcaacttctggttttggttccaattttgggtcgaagggtacgggttcaagtccacttttgggtttgggactgggttcaggtgcgggtatgggttcacgtcctgatcaggttcgagtctagggctgggtccaaaatctggacaccgactacgaggtttgtccaagccctgggtcaagatccggatcccaatctagggtcccaatctggttccatttctggtgccgggtcacgagcagggtcctaggttaaagttcgggtctgggtcgggtactaggtctcggtccttgttctatttccaacgtccctatctagattctgggtccaggtcccaattattttgtgggtttgggtcccggtctaggttctggttcaagtcctagtctcggttcg

SEQ ID NO: 104428 - DNA, 568 bp, Cannabis sativa
catagggttaaactatcaaaccctatgtcgtttgattccacaccgcctttaaatggtatactctaattttatacctacagtttttataaaaaaactgcttctaaaggtaaattttcaatatgcgggtattttcagaccctttagcttcccttttttataaaatgggtttaaaaaaggaaagctaaaggcttgttttgtagtaaggaattaatactaatatacatgttatatcacaagaattacatctgtaataataatattaattatttatcttaatatatttaataagtcaaataaaaaattaatatacccactgagttatctcatatattaataaaaagtataacactaaaatatgcagcaaaaaaggatgaaaaaaaaaaaagatcattcaagtaataaaaaaaaatggaaagaattctgtaaatacctgaaatgagatgatttattggattgctgtgatcataatgcagctacaaaaatatataacaaactaaaaataattagtttactatcataagatgtattaattaaaaaaaaagttgcagaaaagagctaaagtagtaaa

SEQ ID NO: 104429 - DNA, 901 bp, Cannabis sativa
aaaaaccctattttcatgtcttcttccttttccgtccttatgagtccatatttgtcttataaatatgattaatttatgtattaatattcttaaattgattctttaaattattaattagtgtgattttaatttattaggctattttaaagactattcatgcattttagagtcttttggagggattttagcatattttggtggaaaatggtggaagcctccgagctcgattttagaaggcggaacttaattacgaattcggacaaccttagaggtataattagacttggagctcaacatgaaagttttatatctcgttcttagctttccataacatattgaatcgtctaattctaaattatattgacagagttatgactaaaaaactatcagacatcgtagtaggaaaatttctgaaaaaaaaaaagatagcgaaaataaagatagcttttcaagtagagttgcgatttttttgtatttttttcaaaagatgagttatcttttcttttagagagatatttcctaatactataaatataatcctaattctaataggattcatctttcttttcaagcactataaatggaatcctagctaattctaataggatttatctatctcttcaagcactactataaataggacctcttagactacaaattgaaagaattcaaaaaagtacaaattagagagagaaactcagagagagaacaaggaagagacagagagcagctttgaagtgttcttcattctagttcttttcttctccttctactcttattctagttctagaatgaagaacacttcgaagtcgctctccgtctcttccttgttctctctgagtttctctctctaatttttagttttttgaattctttcaatttgtaatctaagaggtcctat

SEQ ID NO: 104430 - DNA, 529 bp, Cannabis sativa
atattaaagagttgatattattttttttattgcaattaagttaatattttgttatttttctgttgctttgtagttatatttttgttgttttatttttcacgcatgttgtttcttacagtacaaaaaactgcaacttttagtttcaactttttagtcacaaaaaacaacataattttttgtgactaaatgtgactttcagtcacaacaaaatattatttgtgactaaaatatagtatttagttataatttgtcactaatttagttttagtcacaacaagtattgtgactaaaaatacatttagtgacaataaattgtaatttttgtgactaatacttttagctacggaccttttagtcacaatatagaaataataatttataattagtcacaatttttatacttttagttacaaattttgttgtgactaaaagtaatattttttgtagtattaagttgttctaaggttcttttagttattttttttttttaattttaacagtatttttgtaattttaaaactttaaatat

SEQ ID NO: 104431 - DNA, 910 bp, Cannabis sativa
aaaaggatacaaggagtgggtacacacaaacaggtttgaataaatttctatactatttcactaaaacaatatgcattgaaatcaactaggaaatatagaattgacatggattaattattgaaaactcttattgaaaactcaatctagaaaagaacatgacgctatagcaaaccaattatcaccatattaacatatcatttaatgaaaaaacaaagaaacattgtttagagaacaaagtatcttgcgacaatcctcaatgactaccaggcagttagattcaaactccacctttggccaagactgatccttaatccaactaagagcctacttaattaaagacatttctttataaatgattcaatattttcaaacattttttgtgcaaaagaccacagtctaacatagtgtgcataatgtaaatcaaaaccaaagtactcaccagctaacttgaaagactaaggacacactacatccaataaaaacattattcaaaagccatctaaacacaacaattgcaagttccacaaaaatggggaaattaagccaaattacctgaaagaactcagtagctgcactaacattgccttctttaagctttgccattgctatttcgcgattacttattcttctcctaaaccattcaaatacacaacaatcaaaatcacataaacataaacacaatcaaaatcactgaagtggtttatattgacaacaacatacctatggcggtcttgctcagttgtagatttacaaggtacattaccaccatcaaaaacaaccactggagttatcttatgatgtcgaagtaaattgattctatgcataaagtaatcaatgtatctcaatttcttctcaccatctgagtttaaacacagctccatactacaagaatatgctgccaaaaaaaaaa

SEQ ID NO: 104432 - DNA, 638 bp, Cannabis sativa
aagctcctagtattaagaccaactataagctccttgtattacgtcaagctataagatccttgtattacgacaagctacaagatcgttgtattacgaccaactacaaggtttttgttgtgagatgttgaatgtttatcgaaataacatctcgacaatgctgaaataccttacgtcatgaaccttgtgatccttatttagatgaggtcatctcacaagttgagtccagatttttttttaacatgttgcacaatgtatttgttgcgagaatttattatttaggtcacatggcatacaatttgacttttcatgaaatagtccaaaaaataggtataacaataacataaaatgttttttaattttgcaattcaaatttaaactcattgcacatatctaaatatatatatatatatttttattatcattttttcacacaatccacatatctaaaaaagtatctttctattattattttcttttaaaactacgaaatagaaaaaatgtttatgtttcttaaggaattgttgttacctattgcagttatcaaaaataatatcttcctattattatttaaaaagaaattaaaaaaaaagtgtatgatattttaagaaaataataaatattacagttaaactaaaata

SEQ ID NO: 104433 - DNA, 1105 bp, Cannabis sativa
actagagcggtcattacactttttgtataataaattttaataagttagtagtttctttaaaaataatatagaatagttatatttaaatgaaaaattatttaagttaataattatttatcaaaatttatcaaattaattctaaaataagtaattaattaaaaatattgtatatttttttgaaaaaaaataataaataattaaatatttaataaataacttttattagttaaaataaatgattaataattgaataagtaatgaacttaataattaatagattcttagcaaagtttaatgaataattaaaaaaataaacatatattatattaaataaaaataatttaaataaaataattttgttaaaattttgagatgataaaaaaattatgttaatttaataatttataataagttagtagtttcatttataaaagttaacaagttatattttaaatggacaatgacttatattaatagttattttaaaaaaataatgaaattaattctaaaattaagtaatttatcataaaagaaattttgtatattttttgaaaaataataacacataattataaataactttaattagttgaaaataaacaattcataattgaataagtaatcaatttaataattaataaatccttataataaaaagaattaataaataattagataaataatataatatgtaattaaataaaaaaaatttattatacttacaataaaaatattatcaaattactatttaaaataaaattttaaaaagtttcataaaatgacataagattatccttagttcaactagtacataaaattttcaaatttgtgttacactagtcaatttgattatcattcagtcaacgtaaattttttggtagatgacaatcgataagacttgggtaaccatgagaaatcgtaaagatccaacttactgggaaggtctccaagtgtttatggcacttgcgtctaaacacaaagattgtgacggaagaattttccttccttctgttaatgcaagaataccagattgcatcctttgaatattgtggaggcacacatcttcacaaagggttttgaaagcaattatgagaggtggatttac

SEQ ID NO: 104434 - DNA, 558 bp, Cannabis sativa
  modified_base (66)..(77): a, c, t, g, unknown or other
  modified_base (311)..(323): a, c, t, g, unknown or other
tagtgggaaatattttagagaaaatatatatcaggattgagcgaggttatggaatttgaccatttnnnnnnnnnnnntagaaataccctagttttaagtttgatgggcatattggtaattgtctagggtttggggttaggtggctgccttgtatggtgacacctagcatgataattcagcaagagttaagttgaattaactcatttcattttggaggaaaaataaagaaaaagaaaaaattagaaaaagagagacttttctcttgaattctctctctctctctctgtctctctctgtctctctctctctcnnnnnnnnnnnnnctctctctctctctctctttcgtcggtttgatccaccgtcaccatgaaggtcgtttagatggttcgaaaatcctaaccccgcagctcgagttccctctgctcaatttctccctctcttgtctcctttccagattcaatggaggaatcgccatccccaagctcctcttgcgagaagacgagatctattacaaaagaggccagatctggatatgggtttggtgttggaaattatttt

SEQ ID NO: 104435 - DNA, 703 bp, Cannabis sativa
cgctcggggacaccagagcatcatggacgtctcagggctgtttagtatgctagtacttgaaaaatattgtttccttagttatacaaaataaactatagttaattttatttatttatttgtaggttccttgccaatgcatctaaactgtttggcaagaaaaaagggaagtttctgatgttgtggcttagaaacaaagggagattgagaatttaaaagctgaaatcaaatcccttaaatagaaaaaaaaaataaaaaaaaaatattgcccaacaagagtagaataaggacgaggatgagttagaaggagaggtggctcatcaggcgtatgttccacaataatacgctcacgaggatgagggtcgaccacaaaattatgctcaggagtttgtttccctaaatgagccacctctcatgtacgatttcgatgaacagatggcctacaatcagctagtatatctctgacaatatcgacaacgttgtggcctgagcttatatgtacgaacatgagggtccaatcaaagttcactgcaaagactacgatgattcacatggcctgggttctgattttagaaatgttgtaagaggatgttgaaatcccaatctcaattgacgggtgcgaatatgttaaggaagtagcaaatatgttccttcattggcctaaatacttaattggaacacccgaggtaacttttgttataaatta

SEQ ID NO: 104436 - DNA, 886 bp, Cannabis sativa
atgtactctttaaacaatatagattataccaatgcactctgtaccatttccgtacaagtgttggtagtgtactaatcataacaagcatgcacatatatttcacacatacatatattcgcatatgtatcacatgttccacactattcttacctcatttttgaattcaagtgaattggccgacctgaacggaaagtctcgtactggatggatgccctaatcacataacataactgggtaaatcacacgtcaaatcctaatctgggaaactcgaatctccaacttaaggttctgttattactaattggaactacaatatcctaagaaacagggaatcacccaaccaagacactgaaatggacacgaatcgaggaaatgaattgttcggggaatctaccaaaaccagttttgcaggtcctggcaaactggttaaccagtttgcaccaggtttccccaaacaattcccaacctactcaaaacatgtccaaatcccaccaaacttttgagaacacctataatgaccttccacaatatattccaagcaacagaattcagaaaaatatccagaaaccaaacatgccattgttgagtcaagtgaacttaaacttgctcaacccaagaattaaactctaaaaccaggtaattcagacctagaataaccccaatattcattagaaaacaaacaagcacaaacccttacacaaacagaagcaaaatcacaatttcaatatgcttaagctaactaacaacttaaaaacttcaaaaaggagatctagaactcttacctttaaatttctctacttgatttcagtcaaaaaccctccaaaatcaaagaaaagtgctaaagcttcagttggtacaaggaaagctcgaagagagagagagagag

SEQ ID NO: 104437 - DNA, 500 bp, Cannabis sativa
  modified_base (37)..(51): a, c, t, g, unknown or other
  modified_base (118)..(129): a, c, t, g, unknown or other
aagcttattttgtatatttcattaaatattcctattnnnnnnnnnnnnnnnttatttctaactaatttttttgtcaaattaaatttgaatatattttttgaatttcaaaattaagttnnnnnnnnnnnngaattagttattgaagattcttagaatattttttaagttgaaagtttgttaaattttggatcaacttaaaatggaatatttttcaaattaagtagttacaacttaatttgttatttaattaaattttatttgaaaacagtttaagttaaaattttagttattttagaacaacttaaattagatatttttcaatttttattttattatattttcattatttatttaatttgtaattttatatatataatttttgaaaatttaattaaaattggaattttttttttaaattaaattttttttcagaccaactttaatttataattttcattattaaaattggaataaaataaatgattaaatataatacatat

SEQ ID NO: 104438 - DNA, 617 bp, Cannabis sativa
ttgtccagtccagtccaatcctgcataccaaatggggcctaaaggaactctctaggaaatagttttgggaattatcaaaccttagagttttctagtaatgtgctttttttgataaaaaacttctcttcaatatgcgcaccttagatctctttatatagtgtttaggatatcaccatttgaaattaaattcataagtcataacctacatggatgttatggactcagtaaagaaatgtaactcatgcacaccataaggtccataactcttatagagatgtaacttatgcacacaccataactcctatagcattaaaaattttaaattaagatgtgtaacaccttttacactcttaatgttggtgataatggtgaaagttactcatagtaacaagtaatttcctcaaatattataagaagatgacaattatcatatgttacatattaatttgttacacatatttaatttagggatgtacattaattttcataagccgcccaacccgaataacccgcccaaaccaatccaacaaaaccaataaaaaatacaaaccgacataactcgacaaaattctaaaccgcccaatcagttaattgggcgggttgaaaattgactcaaa

SEQ ID NO: 104439 - DNA, 604 bp, Cannabis sativa
taccatcctgggaaggccaatgttatagttgatgctctgagtaggaaaggtcagaaccagatgaatacaatgaaacatatttacgcagctatcagatgagatggcctgagctaattttgagtttgttgtggggcagttggctaacattaccctacaatctactcttctggaacaatttaaagaagcataattgcaagatccaaagttaatgaaatcctgagataggggttcaactgggaagactaatgactttacagtggataatactaggatgttacagtttatgaactgtgtttgtgtgcctatggatgatgatattaagagggaaattctgaatgagtctcatacgactccttatcatgttcatatggggacaacaaatatgtatcaagatcttaaggccatgttctggtcgcctggaatgaacaacaatatcgtagaatatgttgctaagtgtttaacttgtcaacaagttgaagctgaacaccaaaggctcgctggtttgttgtagccactgaacctcccaaaatggaaataagaagacattgccatggacttcgtggttgaattgcctaggactacgggacagtacaactctgtgtgg

SEQ ID NO: 104440 - DNA, 660 bp, Cannabis sativa
  modified_base (363)..(380): a, c, t, g, unknown or other
aaatattagttatttttaggatatttaattagataaaatattatatttaagctagaaattttaattttagaacaacttaaattagaataattttcaaatatattttatttttctttcttaatcattttcccactaaatttcgaaatgcattgtttaatgcagataattttgaaattctttttgaaaaatagattaaaagttgaaaattaattttagatcaacttaaatgaagtaaatttttcattaatgatttattaaaataaataaactaaaatatattatattttaattagaaaataagttattagtcaatgaaacatctagatagttattttctgtatacttgtggtatttttctagttnnnnnnnnnnnnnnnnnnaattaatatttaagttgatattattcaagatacttaaatatttgatatttttcttatgtttaattaaataggataattatatttgtgttgaaaatttaatttattttggaccatcataaattagattatttttttttttattttatacataaaattcgaaaatgtgtttatttttcaatacattaaatttcaaattttgccttatatatttatagaaaattaaatttgagttgaaaatttattttaattaattttggaccaacttaaaataagtaatttt

SEQ ID NO: 104441 - DNA, 720 bp, Cannabis sativa
  modified_base (261)..(267): a, c, t, g, unknown or other
cctcccattatggcgaggagtcgtgacctttcgaacaggaacattagtggtagatttctcggttgtatcaacttgtattggttcaaccgagggagtgggaatatcttctacttatgtagaagatgatggaacattagatggagttatttctgaaagtatttcctctaatagtactttactttgcggcttgaagttatttatatagtcatcttcaaggaaagtggcgtttgtagaatcgaacactttatcatccttgcgacnnnnnnntagtccacccctagtctctttagacttttggacaaacaagaaaactttaattcgtgcttctagtatgccttatatctttcttaagatatgagtagggcacccccagattctataatagcgtaaactaggtatacaaccattccatagttctttaggtgtcttagtgaccactttagtggaacaacatttaaaatgtcattagccatctaaatagcatatccccagaaggacgttgacagggttaaaaagcttaacatagacctaaccatttccaaaagtgttgtgatttgatttcttttcttctcttcattctgcaactccattttgatgtggagtgttaggagctctatattgcgattcaattcaaagttcaattaaatgatctttgaactgcatatccatatactctccacccctatcagttcataagatttttaatgttttacctaattg

SEQ ID NO: 104442 - DNA, 625 bp, Cannabis sativa
tcttttcttctctattctcttcttttttctaaaattaatatgtgtgaatttgctacaatgaataagagtagctaaacagttctttagggtttagatggagattatttgatattgctttttggttttaatataatttaactttccctcaagtttcatgtattctatttcatttgtacttaattacttttaattgcttgatcaccaattaaatgtctatgattttgatgcgagatttgagaagtgagtgtcgattatgctatagtaaaatataattgaattttgatataggatgagagtacctatatggtttagatagcttacagggtttctgtgtttaatgattgttacatgtttaatttatcacgagagtagaaaatttacatgtaattgaggtttatatatctgagaagactataaattaccttaagaaacctactattgcatagaaattggtaataggaagataataatattaggccataatcaatagatacaattaaaatcgaaatccctaacttttattcactgttaatttcctttattaattacctgctttttactttcgatgtttttcttatttttctaattttaattttctctcaaaattttatttagccaaatagaa

SEQ ID NO: 104443 - DNA, 709 bp, Cannabis sativa
gtattagtatgtttacaagcaaagcctaacaccctatacttcaccaatcttttaacatctctacttataaaagtagaagagtaacacaacaagttgaacacacagctattgctgtttttccaaatccaatacagaatcccagccaagatagcattataaatttgaaattttaagtcaagggcagcattttgaacccagtcttggagctcaacgatgttccttggccaattgaaagccccaaaccatttgctaacatcttgcagcaccaattttgtgaagtggcagtccataaaaagatggttatgggtctccttttcctgatcacaaaccggacagaggttggattgaataggaaagatactctccaaattgtccccggttagaagatgcaaattacaagcttgccaatagataaacctgtgctttggaatgataagtctgagccaaatcgccttagcatacccaacttcctgataatcaacaagagaagcatagaaaagttttgcccgaaacttctcatgcttaacacaattcaacaattcaacttctctagtgtgatcccttattttcaaaatctttttgaaataccagctcatattttgatttttagggacattccagatgctgaattttttgaggtaaatggtactcacccatctaacccataggcaatcttttttccaaaagatagcccaaataaatttggcca

SEQ ID NO: 104444 - DNA, 2518 bp, Cannabis sativa
ggaaatctggaaatctgatcttgacagcatctttatatctttatcattaaatgttatggtgggttcccctgcccatgggacctttcgttttgtctcttccacgcccagtactacttcttcttgctcatgctgtactgttcgggcatacctctcccaagctttgcctgaatctccagctatgtgcaggcctccaataatgacttgcagatgtccatctactggtggttgttgcaagtcttggttattatcgccccgctgactttgatcggccttgacaaacttctgtacgtgcggattatttttccttatcaggaatttgatttcccgcttcagattgttgcagtcattggtgtcgtggctgtaatccccatgaaatcgacaaaactttgtcatatctctcttgctgacatcttttttcatgggtgcgggcttcttctacggggctaatgactgagtagccatataaacactttccatgtcttccatcaagatagtaaatacagtatacttggaaggattctcccagacagcttgtttggtcttgccaatgaactttccctttttcctattcccttgcctattattgttgctggaccgtttaccgtttgagctcgaattacttgggtaatgggggagctggacggatgtcccagtagaaggagcttttgacttgccaggtttttgttcaccttctgctcgctgaatggcctcttcaagtttgataaaaccttctgcacgatcaagaaaatcactcatcgagtctactggtctgttcttctttgagtccttccaaagctcaccaaggacttgaatgcccccagtattgcggacaacttttcgtcctcggttaccagtgcaaccttagtcgcctccgtcatgaatctgttgatgtaggctcggagcggctctcctggtctttgcttcacttcgattatatctcttaggtgcaatggaagttggcgagaggaggagaattgtgcatagaaatctgaggagaaagccttccatgagttgaactttccgggtgccaacttgaaataccattatttggcggtttttgatagggtggcaagaaaaactctgcaacatacatctcctcgtactccttgcaggtccatttgcatctcgaaatacttaaggtgggataagggatcttccttcccagtacacatcttctacgttggcatcttaaacttgtggggaaattccaagatattaatcttgggggagaaaagggttccgcgtgctcggtccaactcgagatcgttgttcctctgaccggccaggcctgggaacatattttctaattcgtccaactatgcctccatggttggactaacctgttcggcctcttggccgatctgagttacatcagcctcattttgagtgggattttgagcacaggttctaggttgcacaattggcgcatcaagctaatcgtccactcctctcgtcctgttcagatcgtttctgagatcatgattcgtccccaacctatcaaatacggaaatgccttgttgtctcagtgaatgattggtttgtccaatttgctgaccgcaccattaaccttgttggaattactagacaaggtctgccgcctaccacttggcctttagatgggacctatgactggcgattttacggctgaccatttatagtctacgaggtattcatcgctggatcttcgtctgttttgcccaaggggatgacagttatgggctgttgcccagcaatttgataggcttttcgtatcagcacactggcttgctgactacgatcgtcaatgactgcttgctgagcccttaacgtttccatctccttgtctctccattcggcaaacatgcgcctctgctcttcaaaagtgaggttcaccggagcaccgagttccacctgatggtgatgtagggtgttggtatgaccctgcatgattccatgagcgtcatggcgattctacattttagtgtcatcttcaatggttgtttgaacattggaagcggccagaacagttgtgctatgaatcccctggttggctgcggaactggtattcccagtctcttgcacaccaggtacgatttcatccacatgagttgtcacaccgtgacccacagttgatggctgtccaggatttacggttggcggaacccttgtgtttcttgggttctggagtgcaggatccaccgtttgtggattcgtcggatcaaccacgcccctacgagtcagcaccacaatcataatagtgattagatttgaaataaagagagatccttgattctcctctcaatgaaagcaccaaaatattgaactcgcctttagccaacgacaatgagtcagatttgtaagcgacaagtggtttaatacgagtatagtgtaattaaagaaaataaagacacttgaattttataggggttcaaccctgagcagttcaatattagcctaatcctcgttatttgtattgacttaagaacaaggagaatggttccttttcttagagctcttacaattatatctctgaatatga

SEQ ID NO: 104445 - DNA, 774 bp, Cannabis sativa
aaacttatgggaaattgaataagatttaaaaccacatatagatcattaaaaatagatgagaattgagagagttattatattttaagtgaaagtacttttttttggaaatatgaataaaaacgaattacaataacagtagaaagatgacaattttcgacatagaataacaccgaattggtgaattgtttcttcataaaaattgtagatcattaaataagctttccaacgatacaaaattcgctagaaacagattaatatcgagagagtatcataattttactaaaacatgtttctctgaaaacgaaaaaaatataataaattcgaatcctagttcaacttctaacattaatggacaaataaattgtttcacacctccaatacttctagatgtttagactaagagacatgagatgaggttgatcgaataagagcacactgagtactatagatttagcaaatttgaagtggtaaggttgaagatgactgaagtttctttaggttgatgagatgaaaagaacgatactaattctagggtaaataatatactgacttctttatttttagattatgaataataataataataataactatatattattcaattaatcaatacctatgatttaaatttgaattgttcaacatttaaagccctatattctctccactcctcacgcactcactcatccctcttatgactgcatatctctctatatatcttttaaatatactactaatataacattcactaaccaactaaatcattatatatac

SEQ ID NO: 104446 - DNA, 657 bp, Cannabis sativa
  modified_base (37)..(58): a, c, t, g, unknown or other
  modified_base (477)..(478): a, c, t, g, unknown or other
  modified_base (617)..(622): a, c, t, g, unknown or other
gtaataaatactatcataaatacacagactcgtggannnnnnnnnnnnnnnnnnnnnnccacgtaaaaatctctctcttaatcctttaaagctctctaaattattcttatattggttgtcgaaaacctcagtcaacattttggtgctttcattgagagctgaaggaagcgtcagaaagtggacagtacattacaacaaaacaacaatggtggagactcgaagcacacgtcaacctcgccctcttcaagaccctcaagatccaaatgatgaggacgtggcctcaagagcaactgtgggttctgaggaagaagaaggaacccctaatgacgactacgaaggaaacttcgacgagaacgcctacgacgaaggcagctactcagagttggtactcttaaggcaaaaggctgtcgatcatgaagctgaaatcgaagcccaaaacgagcaaaaccaaaagatgcaagaggtgatgctggccanncaaaaagccatggaggcagcaggaatccacgtgcatcctaaagccatccctactggacttggaaaggaaccagaggaatcctcgccaagccctataagttatcctgctgaagggagccaaaagaaaaaccctacttctnnnnnngggataaagaaaaaggtgcaggatccgcgaaaggt

SEQ ID NO: 104447 - DNA, 915 bp, Cannabis sativa
  modified_base (506)..(515): a, c, t, g, unknown or other
acactaatctaagttgtcatctttggatgtacaactagatgttgcatttacaaaaatacttatctgtcgagatctaacactattatgtttgtccagtggaagacaatcctttgggatttgtcccattaaaacaacaaactaagttagacaaacaatgaagattcaaaattataccacaattaataatagaaaacaacatggttcaataaattcatacacattcagaagttatcatacaattagcaagtaagaaagacatgtgaaagtacaaaacaagcacgtcttaaataattttcaaggtttccaacaaattgatacagtgtaaagaccgcttagcttaatttggaaattatcagataattagggcttaattatgaaaattatgtattaattttgaattgttaatttatgttgatttatttgaattcagaatgcatttttatgtcatatatagaaatttcataattttgcatgttttgtgttcgacaacattggaacgcggtgtnnnnnnnnnngaatcacatcttagtattttttgtatagcgggaaaatagtttagacattgggaatgtcaggaatggttggtattttagaatttcccaaaatacccctaagtaccccttttatgttgttttagtgtgggaggggcaaaatggtcattttgccccataggtattttgtcctttagtggacttagttttatttaataaattgattcttatgagttatatgttgttcttaatgtgttaataaagcatcatttatccatttcatttacaaaattgaaaatttggaaaaatcaagagaaaagcttttctctctcaaactcactctctctttttcggatcccctagagcagctagggtttggggtgtgattttctgcatttcaagcaagtttcttcaaggattaagt

SEQ ID NO: 104448 - DNA, 586 bp, Cannabis sativa
aaatgcaaccctgtgctcatgtacaaggaaaatattttctcaagtttcattaagctcagtataaatggtgtaaattggcacgtacttatcgtgcttcttttgtatttccttatctttagccgattccatagagtcatcttttctctttgcgctagccttcgtcgagatggtgcttgctaaggcagtgcttggtttatttcctgagccagtctttatcaatttcatctcgttccttgcttcctcttttcgtacgaacacctgagctctttcattgaactcactgatgtttttttacagggcgaccctgtaaatcatcccacagcttgcctccagctgtcgagaggtcaatcgtaatccctgcttgaagagcagtaagctgtatactgtcgttcaagtttctaactctaacagtggttgtgctaaatcgactcaagtatgccttgagtgactcgcctggctactgcttcacattagtgagggaaaacgctttaggtcgcctatctcttgctgcctaaaattatcttttgaaatctttagacagttgttcccaagaggtaatctaatgatgggtgaatttattgaacca

SEQ ID NO: 104449 - DNA, 2186 bp, Cannabis sativa
cttaactgtggagttctttcttgatgggctatcgaaaaacaagatgcaccttattgatataggtagaaccaatcaatccattgaagccctctttaactgtgctgttccatacctacacagtcttagaattatcacacttgaccttccccaggcgatgtgggtttgcacagcttacctggtatttcccattgtgacagtcagtagtctcgtgatccgtaaaggaaataccaggtaagatgtgtaatcccacatcacctggggaaggtcaagtgtgatgattttgagactgtgtaggtatggaactgcacagttgaagagggcttaaatggattaattggtactacctatatcaataaggtgcatcttattttttggtagcccatcgcgaaagaactccatggttaaacgtacttggcctggggcaattttaggatgggcgacctcctaggaagttttcccagaaagcgtgcgattgaggaaaaagtacactgaaaaaataacatgcttgcattatttaataacaagcatactagtcttgagggcacaaaagaagacgaaggaagaagatgcggaggagaatacctgattgaagtctgattaaagtgtagctttgataaaatatcaaattttaagtatccttctcgagctccattgttacagagacaattctctcttccacttcatataacagtcttctatgtctatattttagaagagaaaactctgttctcgtcaatacagagcaagaaaatcatcgactttgtcggattccatgaaatggatttcacttgcattgaatcacttgcactatatttgaggaaggagatgagaaaaagggtttcgttgaattttcaatttagggctttagggatttatgaactgaaatttaattttttttaattaatgcttaactggatctggtcagctccgacccagaaaaaacctaatcggggtggggcgaacgcccgaatagcaatccgattgtaccgagcagaacttccctgtcgggttagggcctcaacccgatccacgaaaaactctaattttccattcctacttaaaaagtatcccataaaaattttaagtattaatattgccattatttattataaataacaaagaactaaaaaaataaagatgttaatatcaatttttttcattaaactcacaagccaacgtaaattaggcacgctctagggaatgaaattctgtaaaacaattcaccattattgatagtcgtcatttttcacaaccactaaataatgatctgcctgtatctctaaccatgccatcaaattttttaggatcatgaataaactcttcttgagcatcatcaagcaattctgtaggataatcatcacaatcattactttcaaaatgatcatcaatctctcacctacctaatggatatgagtcatccttcatcgattcaccatgccaataccatttagtataacttttatcaattccacgacaaaatacacgattatttaatatggtaatattttattttgatatatttgttagacatttatatgcatgatatgaagcaatatgatcatgtataaaatgcgaaattaatcaaacatatatgctctatgaataaaagatcaaaatacctacaaccatcgattatttgagcttcaattccacactagttttgaatttgcaaaagaaaagaaaactgattagtgtgtataatcaggcttcgaagctctctctactctcattagatggatttactgttttcacagaattagtaatgagctcggcgaccgagatcctatatttatataggtcagacctgccattaaagtctctaccacattaattgttataatattttgacaattaattcaagaaagtaaattggaaaatcaaatatttgataaatcgtaatctaaccatatataaaatatcaatcaattaattgtgtccagagtcaattaatataaaatatttatttatctttaattaatttactgattctattactataataaaatttattttaatattctctcacttggtcaatatttagatttaccatttaaacctaacgattatccttgttgtataacaaacatataaatcatgactaggggtgtgcataaatcgatccaatccaatgacaaccgaccgatctaattacaaccgaccgccaaacattggatatccaattgtga

SEQ ID NO: 104450 - DNA, 786 bp, Cannabis sativa
caagtccgtgtctgggtttgggttcgcgtctcgagtcccaatccgagtttttattcgggtccgcatcccggtcttggtctaggtctggttccttatcagatttgagttccaggaccgagatcgggtcttagtcccctggtcttgttctcgggtcccagtccgcttccggttccgcttcaagtttcgggtcacggagtacaagttcgggtctggatctgggtttggttctgagtttgggtctcagtttgagtccaggtatgggtcccagatccaaatatcgacaacgggtcaggtccaagccccgagtctagatcaagatccgtgtctcgggtcccagactagttccacttcgggtcccaggtcctggtccgtgtccaagttcagggtctgggtctcgggttaggtcctcggtctcggtgtcaattccgaagctcgggtaccgggtctaggtcccccatccaggtctgggtcctaggtcccggtccaagtctaggacctggtcggggttcaagtcctagtccgagttcaggtttgggtttttgatcccggtcatggtaaagatctgggttcgagtcctgggtttgggtctagatccaggtccaggtctgagtctccagttccgatccgggtctgggtttcgaggccggggtccaggtctcccatccaggttcgggtcttaggtcccattccgagtccatgtttgtgttcgggtcctagtcccagttttaattttgattccgtgtccgggttcgggttcttgtccaggtctgggtcggggtctgagtc

SEQ ID NO: 104451 - DNA, 569 bp, Cannabis sativa
ctcattgatgttcaatggaactctacatggtttcttcgaggcaaaaaggggaattagacaaggtgacccgatctctcccttgctgtttcttctaggtatggaatacttgtcgagattgatgaagaaagtgggggaaaaagaggggtttcaatttcatggcagatgtgtcagtttgaaactgaatcatctcgcttttgttgatgatgtactattattttatcatggggacttcatgagtatcttatacttgttgcaggctctaaaaaccttctctctctctcttctggattatatctgaatgccagaaaactgctttatactgtagcaccatgcaacctagtgaagtcaatcacattatgcagatattaggattcatcagacaggaaatgccattcacctatctgggtataccaatctgtgggaaaaggatttcagggaaagaatgtgatatattagctgagagaatgactactgaaattaaaagttagagttcaaggaatctctcttttgctgggagaatcaccctcatcaactcagttcttatagctatacaggcctattggagtcaa

SEQ ID NO: 104452 - DNA, 942 bp, Cannabis sativa
  modified_base (125)..(130): a, c, t, g, unknown or other
  modified_base (206)..(211): a, c, t, g, unknown or other
  modified_base (490)..(492): a, c, t, g, unknown or other
  modified_base (599)..(616): a, c, t, g, unknown or other
  modified_base (904)..(917): a, c, t, g, unknown or other
aaatctcttgttattactataccacacttccgttaacttatcataaatatagacacgtggagggttcaaagacattacatttatggtaaattgcggcataaatacctaatgtttcagattttatnnnnnnaaatacctaatgtttatttttagaggtaaaaatacataatattacaattctcttacaccgttactaccacttccgnnnnnncataaatatggacacgtgaaggattcaaaggcattatatttatttttattttattttaaaacttaatatttttaatatcatgaactaaatactacttgtttctaaaaaaaaaaaaatagttctcataacaattttcacttgatattaacacttcaattcgatgatcatatttcatatactgcactggttcactcagctatggtaatttagtaatgcatctctctatttttttaacaagcagtatttagtttttgatattaagaatattaaattttaaannnaaataaataaatgtaatgcatttgtgccttctacgtatctatatttacggaagtggtagtaacggtgtaagagaattataagattaggtatttttgcctccaaaaannnnnnnnnnnnnnnnnngtgtataaaatctaaaacattaagtatttatgccgcaatttacccttacattaagtatttattttattgtggagcagaatttttttcaaaaatactgtataccgtgttaagtttttacggttgttttttgttttaattgttctattttattattttacaatttttttataaaaagatagtatttttataaaaaaattccgagttacagcaaaattgtaaacttacccaaaaatccagttttttgtaaaccctaaaaaaaatgagaaatgaggaaattacactctatannnnnnnnnnnnnntcctcttttatttttaccctctttt

SEQ ID NO: 104453 - DNA, 640 bp, Cannabis sativa
tttttttttttgacttttcttttgaagtcgttagccaggtgcctctattagccaatacagtactgtactctttttaggggtatgtcatatatgcactttggaatttattatattattattattatttttttttttgaaaagatgcactttggaattggatgattgcaatttgaaaaagagttcagcttcagcataagttaggaagagtggtagagtagtctacttttcggcatcggtaacgtccacactttaattcaaataaataaaaaattaaattttattattattattattattatttgtttaacatataatattagactaaaataaattgtgacatgttacatatcaatatgggaatagtatatatttattgtaggttataaatatatataaaatatgatataattaaacatacatttttgtaatatatgttaggttacaattttgaaaatagaactgcaacctatgtatatcttggtaatatgtaattaagagaataattacatatgcagattatgaaattaaatgagaaagtttttagatgttaaaaacggttacaaaacacatctatatcatatgaatgtgtattgagacattagtgcatgagttggctcagagaggaacattgaaactaaaa

SEQ ID NO: 104454 - DNA, 1305 bp, Cannabis sativa
  modified_base (88)..(92): a, c, t, g, unknown or other
ctaaccaattttgaaatagaatttatactagcatatcctaatttcctatgccataacccaagagttatcattcataactgttaaacannnnnttttactatcaaaagagtcaacatcaataacatacacattatccttcctttcttcaagaaaaatactaattgactaatactaagcaagttatgtttaagatcatcaacaagaagcatatttttgatacatgcacaatatacattaccaatatcaccaatttccaagattttctcttttgaattgtctttaaaagtgacaaagccactttcctcgctcttaaagcttgaaaatcttaatgggccaccgatcatatgctttgaacatccactatccaagaaccataagctttgactctttcttgttgattactacaaaaataagttcgtagactagatgattttacaacgaaatttctcaaaaacttttattttctactaggatcatagccaatgccactttttgcaaaatcacatgattgactttctagcataagatcatagccttctttacctccagtaaatgtatgtacgtcattctttaggcttttcacatgagcatttaaatcaacaatttttttcttatatgatgaacatgtagcacattgcgacttaactaaaagttcattttcatttaatttcaaaatctcaatttcttttagtagcatgtgggtcttctctctaagagtttggattttagcaagcaatttaccaaaatcattaaatagctccttaaatgaattagacaactcatcatatggcatatttaagttatcattatcacaatcattttggctagaaatgcttaccccatcatcaagtgccatcatgcacatgtttgccacttcattcttctcctcattttcggagtcctcctcatcactagttagccaatccgccaacattgcccttgctttgtatttgttcttctttctcattggacaatccattttcatgcatctaggcttcttgcattcaaagcaaattgatggattatctttgttctttctttcttttgagtcactccctctttgtggcttcttcccaatgtacttttcgaattttatgaactttttgtgtttcttggagaaaagggccaagtcctccatgtcactacataagctatcctcatcttcttcactaatggcatgggaggaagaagacttgaatgcatcagtcttctttttcttctcaacttcctcttcttctcgagcactcatgaaaatttcatggttcatgagtgaaccaattagttcttccaagggaagtgttgaga

SEQ ID NO: 104455 - DNA, 573 bp, Cannabis sativa
  modified_base (188)..(192): a, c, t, g, unknown or other
  modified_base (248)..(257): a, c, t, g, unknown or other
  modified_base (411)..(413): a, c, t, g, unknown or other
attttctataaatatatatatgactgaattcgaaatccaatgtatttagaataatacattttcaaaattcattaaaataaaataaaataaagctagaaaaagtattctaatttatgttggtctaaaattaaataaattaattttcaacataaatataatttttctatttaattaaatatcttaagaannnnntcaaatatttaagtgtctagaacaaatcaacataaatattaattttctatttaatnnnnnnnnnntagaaaaataccaaaaagtctacccaaaaaatatctatcgagataattcataaattaattacttattttttaattaaaatataatatattttagtctatttatttaataaaatcattaatgaaaaaattgcttgatttaagttgatctaaaatnnnttaataaattaatttttaacttaatctaattttcaaaattaaaaaatttcgaaacatctacattcaaaataaatgcatttcgaaattaatgtaggaaatgattattaaaataaaataaaatatattctaaaaattatttaatttaagttgatctgaaatt

SEQ ID NO: 104456 - DNA, 647 bp, Cannabis sativa
tatcaaaagaaggtgactaagtactttaactcaaacgttaaaagtagaaaattcactattggtgatatggtcttaagaagagtcttccgagccactcaggaacccgaggtgggggtacttgggccaaattgggaaggaccatatgaaatcgaggatgagattggctctgggacctacaagctaaaaagaatggatggaaccatggtaccaagggactggaacgctgatcatctccaaaagtattacaaatagtcaaaaaatgtaaacttaggctttgttaagaaaatttgtaccaaaaagtatatgcaacctctaaatttataaataaagctgagtgccttaaaaacaatgttttcatgccactcagggggtagtaaggcataccacacagacaaatataaaacaagccaaaagaaaaagtttagcaaaatcaagcagcatatgtatctaagcaaaatatatatttaaatgtaaaagatgtcctgacccaaaagcaggtcctaaaaaaatattaagggcctggggacgggccttaaaaactgtctccccttaaacgatataataaattgtctgaaagaaaggaaaagagactgtaaatgtaaaggtaaagagaaaaacaattgtagtggtgaaatggttgaactggt

SEQ ID NO: 104457 - DNA, 783 bp, Cannabis sativa
ttcaatatagaaaaaagtttttaaaatgatccattctcacttaataatattatgttacctaataacaaaataggattccaccaaataacaacatcaaaatttattacaagtataattataccttcactcattgatgaagtctattagaaactctaaaaagcacacaatacgaaatttcacatcataaagttaaaaatgatcaactatgtagcagcaatgatggtgaatccaaaaactgggaaaatcagtgagaaaatctatcgtttcaatttttcatatgtatgagaactgttgtaacacgaaatcaattctctaagactatatatatagattccatggatgtgtttaaagtccgaataatatatttgtgtatatatattatacacagagaatttagtatttaatttaattaatatataaatatattggaaaggaaaaacattatatattctataattcctccacaagaaaactatacataataaagatactttatgcgacagtatgtataagtacatatataatattttctcaaaaactaaaagtgataaacccttgtcttataaattaaaattaacaactcatatatagaatatgtatgtatgtatatattaacaaaatagaggctatagaagttcaaaatcaaagtagtagaaccaaaagatcttcccaccttcatgaatagtgatgaggtcaaaaaagagaaccacatgccaaacgacaaacatatatatatatataatgctacatatatatatacattatggaaccttggagattctc

SEQ ID NO: 104458 - DNA, 1334 bp, Cannabis sativa
  modified_base (612)..(617): a, c, t, g, unknown or other
gaagccacctgggagttagaatcaaacatgagagcccaatatccagagttattcaggttagatttcgagaacgaaatccttttaaggggggatatagttgtagagatcgcttagcttaaatttagaaattagcagataattaaggtttaattatggaaattatttattaattctaaattattaatttatgatgttttatttgaattcagaatgcattttatatgtcatatatagaaatttcataatttttcatttttattgcccgacaacattggaatgcggtgtttggctattgcaatcacatcctagtatttttagtatagcgcggcaatatagttagacattgggaatgtcaggattggttgagattttagagtttcccaaaagtaccccttggtgacctttagtggttattagtatggaagggcaaaattgtcatttggccaatctttcttttgtctttttgtggtaatggagttttatgttaaatttgatttgatttaatgtttaggatcatattatttgaataaacacaacattatctcatttaattttacaaaatatcaagttaagccaaaaattacatttcactctcaactctctctctctctnnnnnnctctctctctctctctcaattttgaacccctagaccagctagggtttgcttcctttttctccaaattcaaacaagtttctgcaagatttaggagtgcttaagctctaggtaagcttttgactttatcctcttgagtttcctgaattttaagaaaatggatatgcatggtgttgtggtttttgttgttgtagctgctgttagggtttgatgttgctttctgggggttaaatatgttgtttaatgttgatttgaacatgttttagtggatgatagaagatttaaccaagttttgagttttagaactcaaacttagagctttaatggtgaaacttgtttcttagcttgtagtagtgttttattgccttgaaaatgttctttaggttgtataaggcaggtctggaaagtttggtttgaattggggttgtttggagtgcattatgaatttttgttggattcctgcacttaaccgaaattcgagttcagagggacctgtaggaactggaattccggttggtccccgtgaaaccccacagaacctgagttcttgttgggaaccgatctaccagttggggcaattttgggaactgtagtttttcccatttttgtgatgtttagggtattgacatgttgtttatcgatatggaaactcttcgtttcaattttaagtcttcggaaagttatttagcgtgtcgcttacctatgttatgattgatgtga

SEQ ID NO: 104459 - DNA, 843 bp, Cannabis sativa
caccaatgaacacctcttggaacctttcacaacggaggatgtcttccaagcaatgaaagccatacacccccaaaaagcgccaggaagcgacggtttgccaggtttattctataggaattattggtctctcattggtcatgaagtcactaaagtttgtttaggaatcctaaatgaagggatgccggtgaaggatataaatgacactctcctttgcctcatcccaaaagttcctaaaccaactcgaatgacagaatttagaccaataagcctatgcaatgtggtctataaaattgttgcaaaatgtctagctggccgaatgaaacaaagccttcaccaagcaatctcggaggaacaaagtgcctttattgggggaagactaatacaagataatgccatcattgggtttgaaagtctccattacatgaaaaccaaacgatttggaaacgggaagaaaatggatctaaaattggacatgtccaaggcatacgatcgagttgaatggaacttcttggttactatgatgagggggctcgggtatgaggaaaaatggatcgaaaaaatcatgcgttgtgtagagagtgtctccttctcagtccttataaatggtgaaaagattgggaaattccaacctactcggggtcttcgccaaggtgattcactttccccttacctttttctactatgctcggagggtctttcttgccttattcacaatgcagaaagggctggggagataaatggggttcagtttgggaaggatagaattaaagtctcccacctcttcttcgccgatgatagttttgtattccttaatgcaaaggacacggaatgtgacaccatgaa

SEQ ID NO: 104460 - DNA, 622 bp, Cannabis sativa
aaagctaaaagcaaaattattcaagtggagttagatattcaaatctccataaaagtcgtacccacctcgtttggttaaaaacttttgattgcatttgatcatgaataaatatctatatataggtctatttcaaaagaaagcaagtactccgaagggtcttgatgatgtggcatctcagagaaataaaataataatcacaaccgtcttttctaaaccctcaataggacaaccaagagtcaccatctcacgacaacaacttgcttgcctctctttgatagtttccctaatgacacagctgtcagttgtgaaactaggggcatgtgttatagtgcgaattttttgcctagaaactcgagatcaatctcctataaaattgacacgtggatttaatcctcaagggatcgatgagttgcaaatcaattactcttcgagggttgacctcgcttgaactaaactcgtgagatgatacgaccttggcaaggtctagtcgcatgttatgctttgcatagtgtaaggcaagtaatattgagagggatttatacaagtcgcgcatatataaaaatatatgcgatgactaagtagccttctcctgcgactaagtacagatcgcctctttaagaaa

SEQ ID NO: 104461 - DNA, 638 bp, Cannabis sativa
tacacataagtagtctatgttggcagttaacagtaaaaaatagatgacaccttaaatttactaacaattcagtcgtttataggattttattttactactaaaatttaagcttggaagattaagtacaaataaactaataattgaaaatactaaaaaaaaaaatacctctttcaacttactcatcactttctttcttattttttatattttttttatgaaaatataacttattttatcttaaagaagaatgactattaaattgagtacaaaaataatatatttggctgaatagccaaagaatttgtttttttttttaaaaaaataaataagtattatttaattatctttgttagcagccttaggataataaatcaattagtgagccaatttaatagcgaatgaatgcaggaccacgcatgcgtgacttcatcggggtccttttcatatatatatatatatatgggaaaatataggcgagtctacttttatatgacataaataaataatataaaaaaaatatgaaattaaaaaataattaaagtttaaaatatgagaaaaaaataataaaaaattttaataaaacttgtaataataagttttgccagaaaagttgctggtgccgaaaatgtcgtcgaaaa

SEQ ID NO: 104462 - DNA, 1111 bp, Cannabis sativa
tcttctgagaggataaaaccttaatgattagatttggaaaaacaagtttaaaggttggctttttacctcttcggaatgaaacaatctggttcagaatttgggaggccaaatcagttgaagctccagaggtgatgcgatataagaatgaagccacatcttgagacactacggtcttgttggagtttggaacccaattgctaagagcaaactgcataagagatgcatgagcaaatgtgagatgggtgattcaaagactctctcctgatttcaattcagaccgtgcacctgtgagttcagagagcatcaattcatgatccattgacatcactgcattggagacattctcgggaagttgcaaagcttgagcaatgtccttttcagaaaatgaaatccaatgtcccctaacatatactctccgaaatagtctagaattctcatcaagaaaatcatcagtgagattagcatagaaatccttaacaatgtttacaatgaacccattgaaaccagtgagagtgttttcccattgatgaaattgaataaacttaacaataccatagacccgatgagcatgcaaatcatagttcctctcacattcaaacttacgggttgcatataaattccagtcacgttcattatcacgataataaaatcgagggcagtgagaaagagttgaaggaacattaccagaagaaggctcttccattggctgcttgcctttggcagtagcagaagcctttgctgcaggcgcagattttgtcaaatgaggctctagctcagtgtcctcactgtcagacgaaacacccatgtcctctggattctccttctcggaatggagagaaactaatttgtcaacggaaacttccattggatcttcttcttctgagcttgaagaaactgaaggaggattgtacttaagcttcttcttggatggaggaactggcttatcacgactttgagaagctcgaagttccttctcagcagaggcttgctgggctcgagttcgcgtagaaggactggttggagtggtggcaggaactgatgcagcaggaggaggaattgctaacggtggaggagattccttcgaagattcagacgaagaagtccaggttcg

SEQ ID NO: 104463 - DNA, 694 bp, Cannabis sativa
gagaaggatccttcatttgaaaaataaaatataataagtaaatgattttaaataatacatttccactgtgatttatcaactgcttaaaataaaactaaggcaccaccaccgttctagatcgttttcccttccatagccggtcacagtttacgtaccagaactcaccctgctcactatacgtacttccctgtctaatacctgtagggggaagtaagggggtgagctaaaagctcagtatgaaaatgcttatcatacaataccatacaatatcacacatactattaatgtatttattaagtgttagcaatatcatagaccttattttataaccataaccaaataactgtacacatggagacctttatcatataggtccatactaattgttcacaccatacacatgtacagagatcataattccaatatcatactcataacataatcatatcaatactataaaataatcatttcattaccataacattggcatacaatagccattacttacataacctgagcctaacctagccctacaatatcctaagtctaatctacccatatattaacctagacccatgcaaccctaccattattataggataggatatttatatattcaacagtaacatcactatatcataccccaccataaaaatatcatacatgactcagtaaaatgcaaggtagggtatct

SEQ ID NO: 104464 - DNA, 548 bp, Cannabis sativa
  modified_base (68)..(75): a, c, t, g, unknown or other
aacgtaaagaaggattgttccttgttaaaatgttaacttcttgttacaatttcttaattaatttttannnnnnnnaaaatatgttagaatattttcttttacttttttcacggcggtgtttgttacacttacaacatcatttttgtaaatttttgaaaaatttcaaatagtttattgtgtcgaaaatacgtttgaacacgcgtggtaaattggaatttgaggaactcttttttttgtaactttaatgaataccgctatgaaaaaatatttcgacatgtaatttcgaacgtgaaaattgactaaaaaattataatatgagattataattagtacttttttaaaattgaaatactaaagatcaccagtggtgtctaacacctcttatgtgttaatattactattgattaaattaagtatcaggtctcatataatttaatgtaatagtttttagggagtatcgctacgggtgctcaataacaatgctcattttaaaattatatagtggagagtaaagaggataattgatgacgtgtctctctctcaacaaa

SEQ ID NO: 104465 - DNA, 515 bp, Cannabis sativa
tctgttttataattctttaagtgccaaaaatagaaaatgcccttgtgctagaagtaaaaataatatttaatttttacctataattctacctatatattactatgtatttgttagaatttgggataaggtgaatggggttccatctcaaaatcaattggctatgggaggagtagcccattcctcttatatattctattatctttccacacattagcaattcgggactctttgacatctccctcaagatggtggctattttatatactcaccatcttggacaactcgatcataagcgactcttttttggctcactatccctgatcacaagtggctcttttttctctactttttggatcggtatttttggtggctctttttatttttggctcactatccccaaatcacaagtggctttttttgactttgctcatggatcaatttttttgggtttttggcggctcttttctttcggctctacttcaatcggtttatttttttttaggttggatagtcgc

SEQ ID NO: 104466 - DNA, 598 bp, Cannabis sativa
  modified_base (61)..(66): a, c, t, g, unknown or other
atatactgaactatataataatataattcctcaattattcataattatctaattagggttnnnnnnatccatttcttaattccgggtattacagcaccacaccgcacgatttaggaaaaattcaaatcgcgaccgcaccacaaagaatttcaaactgcattttttttttgcagtgcggtgtagtgcaggtggtttgagcggtttgatgaacacccctatctcatgtaactcaaggtcaaaatgagcaacaagtgccaatattatcctaaaagaatctttcgatgaaacaggagagaaagtctctgtataagaaatgtcttattttttagtatagccttatgctacaagacgtgccttaaatcttaccacattaccatattcatccttcttgattttaaatatccatttacaaccaattggttttacacctgctggtaatgggacaacttcccaaaacttaatgtcttgcatagacttattctcttggcatggtgtattatggggcagtaccacattcctctaggaattcaacaaatggtcctagacgttgttcacctgagccatcatacctgcgatagtactcaccaccatgatcaga

SEQ ID NO: 104467 - DNA, 1266 bp, Cannabis sativa
  modified_base (616)..(631): a, c, t, g, unknown or other
  modified_base (845)..(850): a, c, t, g, unknown or other
tttgtgcttttattatatacatcttccggttgtaattaatggtgtagaattgcaattgtgttttgaattgatatcggtattagaatagaattttcatagctatatttctaccttaccaagttctttatctgatcaactttctcacctcattatttttaattcattccaatgtctatctttttctatttatactaatctttagtggtaatttgcctccctgtggatacgacatagcccgtttactaccgcgaccgcagtgtaactaattgggcgacatcaatcatgcgctattaaattatcacatagagcttttaccatgtccgccaagcgattaatctcttctggaaatgatagtatattctcatcttcttcaattggttggggtgagtttggacaataaggagggtattggtgactccaatcctgaagtgatggatcccaatgccaatcataatcaaaatctgtcatatcattcaacagatctattgcttcatgacctctccttaacaaaggctctccagttacctctgctccataatccacccaactttttgtttcatcattaagtccattgtaaaagaatagaataaaacacccacttgagaaattgggatannnnnnnnnnnnnnnntccttaaatctcccccaagcagaatagaatgactcactgtgttgttggacaaaattcacaaggtatagcatttcgatttaccttgcaggtcaaacacataagtaaaacattagtaaaatcaaaacaaaaaaactaaattagaatagaattcaactatattgatattaactaaaacagtccccgacaacggtgccaaaaacttgttgtgataaannnnnnacgcaagtatacgtatcgttttaacaagtactactcagggaagtgagatcgtttctacgaggactgcagttaagtaccaatcaattaaattcttgtttctatttggcaatcgaatgaataaattttaaactaaataaactaagcaaaattaaataaaataaacaaataaaaggtttaacaatggatgtgaaattaggcatatgatttcaattacttttattatccaattgttaacactaattaaccattcttcttcctcctatgtgatgacatattataaattaacctaaactcttttcagatcatgtcctaaattacatgccaactactgcatctctgagatagaacaacatacaattcgcattaagtaataatctaaaagccacataagctatgtgaatactctcgtttcacat

SEQ ID NO: 104468 - DNA, 2393 bp, Cannabis sativa
  modified_base (655)..(657): a, c, t, g, unknown or other
  modified_base (758)..(759): a, c, t, g, unknown or other
  modified_base (929)..(929): a, c, t, g, unknown or other
tttttagtgttttattttcgtcaagtttttaatattatcacggtttttaataattaattattctactagtattaaactagtttataaaatcacacacatggcgaccctatagattaggcgttacaacttggtatcagagcagccatggttttaaaggtcctgaagactggtcgaatatgtacatttactgcgaggacaggtcgactcatggtatatagtaagtatttatattatttgctattggattacctacctacgttattataaagtatgttgggaaaagtagcatagtgatgattgtgataagaatatgtttatggtatatgcatattgatattgatatccgtccaagttttaaatggttagaagatgtgtactaaatgtgtgataagttatgcaataagggcaatcgaatagtctaattaacgagctatttaggcttggggtaaacggtagggaagagaatcctttattgttgtaataatggaaacatgtaaattctgctatgcaggatatgaatagacaacaaggataaatagatatgagatctgagagaacaataggctcatcttgtgtctgttcttgtactactgacacttccaattgtactactagatgtggtgaaatatatgaagccaacttactagtagaccannnagcaaaaactaaatgaaccaccaattatgggacagaacaaaaaggttacatggtgatcatgatagcggtaaaggtgagaataagaaatggtgaccttatcnngagtgttcaagatgcaaaaaggcgccatttgagccaatgtagagccagatcttgttttattgtgggggtagtgggtcatctgaaaagaacctgcctacagttaagaaagattgatgttaaagaagaaaaatgtacaggtcatgcccaagtgccaattatgattcaagggnacttggatattggtcctttgaccgactcaagttagaatttatgggcaatattataattgctatttcgatttatattggtatgaaatattgtactctcaatggggagacatcaaaagatctaaatggattgtgtttgtatgttatttagtggtagttcatctgacagggtggatagattcgaaaaattaaattatgagttaaatttgctagtattcccaagtggaatataggtcgtaagttgttaatggaggcataggtctaattgatcaaataacaaaatcttttgtttagaagtgatctagcattaccaaaggtgggacaatttatgagtattgtctgaaatcctagatgaattgaaggcaacgattgtgtagtaattttgagattatgtaggcgtgggactacctatgctagtaagaagatcttgttttggtaaatcaccatgaaggaactcgatggttgagtgttcttgactcggggtggttttatttaggaaatttccccatgaagcgtgcgagtcagagcaaagcatgttagaaacatttggattggcccgtgggactagtcgttagtccatgaaatagctagagtgatgcactcgtgtataagagccatcattctgtgggaataagggcccaatggaggcttgaagcggggacgttatcggggtagcgtataaaataacatcatgaagaatagtggtatcactaaggtgaagaagattacttgaattacttaaggtgacatggtaatgatggagagtactttataattgactggatagtcaatgtggtttataaggagaccattgaaattttaggaaaggattactttattaagcaattatagaaatgcatactcacccacaatgggaaaaagcttatgaattgagattcaatttaatggacatgtatttgagttggtgaatgttggatcacaaagtaggttgtttattaaacaaaaagctatataattgagtgtaaaatacgttttagagtggttaaccaagtatgaagatagtgatgattgcaagaaagcaatggtagcgtatgaattagggagtaaaaccttagtggtattgatggaaaaaagaacacgagagtctcagatgttgatgaatcaacatcatcaacgggagactcactataagttagtatggtaatttgtaccaatgcgttatcaatataatggagaatatacttgaggtatgtatatttctgggtgtgttgaaaagatcatcaagatctctaccaaacacaaaaaagaaatttcaagatcacagaatgatctttgattaattgttattagttgagaattcgggaaatgtgtaattccagtctagttatgggtaccttgtatgatcaatgttgcctctactgtataagttacattaattcactttataacggtagttaactgtaagtgattgggaaattttaaagttgtgccagttcaagagaaatt

SEQ ID NO: 104469 - DNA, 514 bp, Cannabis sativa
taagaagttggttgaacatattgattaattccattgtatgaagtgctagaataatctcccgattgttgattgtatttgtaagtgtcattgtagggattatactgatacacttgtggcgaggtataataaggatcatagtattgttgattgtacatcgccatgtttctaaaggaagatctgaaaattaaaaccacaactagaagaacaagttagtaacaaaaattaaatatgaataataaaacaatcttttttttctaatttttcaataattttttttttaaaaaaataaaaataaaaatactaaacactaaatatgaataataaaataatagtccccggcaacggcgccaaaaatttgatgcgtgtcgtaagccacaacaaatttactattttttttttattccaatacttcttattattttagtataatcgtaagtaagggtcgatcccacgaggactatgtttattcaattattcacaaattagtaacaagaattaggaaaaggggagtttt

SEQ ID NO: 104470 - DNA, 1193 bp, Cannabis sativa
aaagagaaatactaaagggtactagtggtgtctagcactctcttatgtgttagtatcgcactctcttatgtgttagtatcgctattagtctaattaagtattgtatcccaaaatcaaatatttttaaaacttcatcacaattaaaaaaggagtattttcaataatctagtatcctaaagtgaaatttgataaataaaattggatcactttaaccaaactatcatgtctatatatactaagtagaaattaaatttgtttaaaaaacatatttaaataagtttaatttcaaattaaagggtaccaaatatgtattataatgtactaaatctttattttaataaaacacaagatgatatacaagtacgaactcttaaaaaatatatttatttcataagtatatacggcttttagtttttttttttttacaaaaatatagattgttggtttttttttttgggataaaaaaataaatgaacaagctgtaaaaaaaaatagaatcccttaaagaaaaaaaaaactcttaatatatatatatctatatattttatttaaaaaataactataagtgtgttataccctttttttaggaatattaatgaaaaagtcatttgtatttgtatatcacatgacataaataatgatccaaataatgattcttgcaaatatattgcgaaataggtcgaataaacttaggactcaacttgtgaggcgaactcatttaaataaggatcacaaggtttatgaagagagatatttcaatattgttgggatgtcatttcgataaaacattcaacatctcgtagtacaaaaatcttgtagctgattgtgatgaattatctcgtaatatacagtgatgcatcacctcgtaatacacagccagtgatgcatcaccttgtagtacacagtcagtgatgaatcaccttgtattacacagtgatattcacctcgtattacacagcagtgatgaatcatctcgtaataaaaatgtcaatgatgaatcacctcgtattacacagtagtgattaatcacctcgtattatacaatagtgatgaatcacctcgtatgacacaacagtgatgaatcacctcgtattacataaaagtgatgaattacctcgtattacacaataatgatgaatcacaatgcacagtcaatgatacatcacctcgtaatatacagtcagtgatgcatc

SEQ ID NO: 104471 - DNA, 669 bp, Cannabis sativa
tttttgacatggtgaacagagtcaaacatgattaacaaagcaacaaaccacactctgtagtgcaatcttctcgaaccaggatagctcattgtctaaccgaagggtatgttttgccaaaccatgagctggagaattcttattgcgagccacatgggacaaaactgtccccaaaaagttagacaataaatctataacttcttcaatcagcaccccatcatatgaaaaacacattcccaataataatagttgtcaccaaagctagcgaaactgaaaaaatattgcaagccaaactaaaaaatacagtaatattagaatgacaatcttcaaaataaaattaataaataaactcaaaatttaacacacaacccatatcattagcttaactttactaaaaaaactaaaaaactaacaaaatttataagtaaaactagccaaaggtattaccctttggttagcaacaacaaactagcaccctaatcaaaactgctgaaaatccatattaaatagattaaatttaaaattaaacttatcagtaaattctctgtaattgtaggagacaacctacaaaataacaaaaataaaactctattgctacacaatataatagaaaaaatataatgtgaaagaacgatgctaaatcaatccatattaactataaggactcaaaaa

SEQ ID NO: 104472 - DNA, 664 bp, Cannabis sativa
aagatcttttcttggaagaaacgcacccttcgattctggcagttgtatggtttcaagggtcattatgagtcatctcttcatattctgcccttctctcaaccgttggatttctcaatacttagctttcttgtcactggactttgtgtataaaagggcggctcaagcttattatttttcacaaacctctagctttttagtgagatccattttcagaatggattatctctttcttactagaatgtcccttctgagttcagaagttcactctcctaaactcataataccaggatgcaccaaccattttccattcgttcccaagaacttcaagcctcaattggaactgaaaatgatggattccaaggccgaggagcttccgaccaatccaaactaggggaaccccatagcccgctatgagagatcctcacaagtgatccttgaaggcatagatcttgtgagcgatcttaaaggtcctcctcaggctgataaggaattccagaggaaagttggcatggtttcagatgaatcttggaaggaagttggcgtggtttctattagagaatccatccaacccaagacccaaacctaggccagaaaacctttgcgccaacctccatctggtatcgaggaatttcttgaggctaagaggtctcggcttcaagaaatg

SEQ ID NO: 104473 - DNA, 611 bp, Cannabis sativa
caattaaaatctaaatgaattctgcaaaagcctaaatttattaatttttcatctaatttccagaaaaaatacttttagaatgaaactaaaaaaatttatcgtcaaaaaaattataatttacatataatcatcaaatatgtacataaaccaacatgaccacattcaaatcaacacaataaataaattcatcgtttaaaatttatattacatgaaagtaaatcattacgatggctctgaggccagttgttgggataattttatcagtatctagatttactaacaagtatgttgaattaacaccctaaatatgaatatctctaaaataataaaataaaacacataagagtttagaaaaccttacattgattgtagcggaatattatgattcattctgcttagatttctaaccattattcttttcagtcacagagtattatcaaaatctgagcctggatctctttctctccttcgggtttggttaccaccatcttccgcactatgattgagtacttgacttgctatgcgtgggcatgacactctatcactataggctcgagtatgaagaataatgaaggagacttgaaaaatgtatagaaggtgtctctcatcta

SEQ ID NO: 104474 - DNA, 1107 bp, Cannabis sativa
gacatcaatgttttgaaggcggtgtgttgcaaatagtggtcttgtgccttgtacctgtgtcttgttttaggtggtcccgaattgtaggagtagtggttcttatacatccttggttgggatgtcaggccttgcaagtgtggtgccttcgctacttgtacctttttgccctcagaatttgtaggagacgtggttgtactcaccctacatgcatgccttgtctttgtggtcgtatccccgttgttttcctctttaatacttaggaaaatattctctaactatcgttatgttgttgagaagagcatgtcaagtaactcatggcgtgagccgagtgacatttcaccaagtgcatgacgagtgacatgatcaattttatggtcgagtggccttcattctaaggtttggccgagtgggtttaaccttgttggaagttattttactaggattcagatttactaacaagtatgttgattataatctataatctaacaccctaaacatgaattcctaaaacaatgaattaaacacatataaagttgtagaaaaccttaaattggtggcagcaaaataatatggctccttccactaagatctctaagccttgttcttttctgtcacagagtaataacaagatctgagcttggatctccttcaagtgttggattcttcacaatcttctacactatgattgagtacttgacttgatatgagtgggcatgtactctatcactatagggatgaaattttgatgaagaaaaagaagagaactcaaaaattagagagaagagcctctcttttcaattttctaacaaaatagactaatgatgagttatcacgttacgagtctgtcatgttctatttaaactttcatctagggctaggtttaaattatatgaattaaaaaaattaaatggctaaaatcaccttaagtggccagccacttagtgtggaccccactagttataattttgttattttatttcataattcatccttttctttcacaaatgtcttattttaactttaaaccttttaaataccaaatctatttatttaataatcaaaattaattataaaataaaattgctatttaacttatttattaattag

SEQ ID NO: 104475 - DNA, 1195 bp, Cannabis sativa
  modified_base (971)..(973): a, c, t, g, unknown or other
tctaatcttcctaaatccttgtggactgaagctttaaagacatccgtatacatattaaaccgagttccaacaaaggcagtctcaaaaactccttttgaattattataagttggaaaccaagtttaaaccatgtacgcatttggggatgtccatctgaagtcaaaatatataatccacaagagaagaaattggacccaaggaccataagtggattctttataggatacgctgaaaagtctaaaggttccaagttttattgtccgtctcacagcacaagaattttggaatcaaggaatgcaaaatttcttgaaaatggcttgatcagtgggaatgatcaatcaaagggcttaggtcctaagaaatatccttcagaaccttccacttcaagagcaagattgataatggtcaacacccatgtagttcaaacagatgttgaacaatcattaccaatcactgaagatccacaagttggtaatgatactctagtagatcaagatgttcaagagttgcctgtaactattgaacaacctgctgaacctgctgaaccagctgctgctccccaagagcctgttattgaagtcttaagaagatctactagacctatcaaaccaaagatttacaaaggctatgttgtgtatatattagaatctgatattggagttaaaaatgatccagaaacgtttttacaagctatgaacagtagagaatcaaaactgtggtacaatgtcatggatgatgaaatgaattctatgaagtgcaataaagtctgggaacttgtaaagttacctgatggggcgagagccattggatgtaaataggtctataaaactaaaaatgactcattaggcaacactgagagatacaaagcgagacttgttgctaaaggattcactcaagaagaaggaattgactatacaaagaccttttctcctgtatcaaagaaagattccctcagagtcatcttggcattnnntgctcattttgatttagagctggaacagatggatgtaaaaactatttttttgaatggtgatctagaggaggaggtatacatgaaacaaccagaaggattctcctctactgacagtcaggaatggtatgcaagcttaagaagtccatctatggattaaaacaagcatcccgccaatggtatttaaaatttcatgatgtcatctcttcctttggatttgaagag

SEQ ID NO: 104476 - DNA, 505 bp, Cannabis sativa
  modified_base (111)..(111): a, c, t, g, unknown or other
agctctatgtgattttatgaattttaaataccatgtaagtattttatgaatgtgaaatcaggggttaaccctaactgtgaaaatctcaaattgtgtgactaggattaccgncacctggtcaggaacacccggggatttggaatctctgcttttgcaggacaacaggtaaaatagtagtatgcatgtagagttaagcgcagtggcgctcatattgaatagtgtgattgtgatcaattaagaactgggattagggttattaccctaaaatgagcagttgtttggtctagggttattaccctagtaagtaaaagatgttgaatattataccatgataaatatgttggaataaagaattatgcgtctaaggcatgattaagctaaactcggtaaactagtactttgagttaattttaatatggtctaggattattaccctagaatattataaaagtaaggaagcaataatgtatgattatgttgttaattaaatgaaggcataagttag

SEQ ID NO: 104477 - DNA, 711 bp, Cannabis sativa
caatgatgattcacctcgtaatacacaacaatgatgattcacctcgtaatacacaacaatgatgattcaccttgtaatacacatgcaaccatgtattgccttgtattacacaatagtagtgcacctgctctcaaataacatgatctgaccaagtcaaataccacttcaaagaccacttttttatattttaaatatgaaaaagttatttatacttatccaaatactcagttatatgttaaacttgagtagtaaccacccatcaattgtaacttttcactaagataagattgagtaaccaccatcttattcctataaataggggttcactcgaaggaaaaaggggagaacaattttgatttacaaaaactttgccaaactgtaaacataacccaaactcagaaataagatggacttgtagagtatgtagattttaactacaaaatcacgtaaaaatatctagtgttcatttattatttttgtctcttcttttcttgaattaataatcttctaacattaagttgacaaaaaattacgtcaacagtttaattgttatacctattttttggactatttaatgaaaaagtcaaattgaatgccatgtggcataaataatgaattctcacaataaatacattatgagataggtcaaaaaaagtaaggactcaacctgtgaggtggttgttgggttttatgccataaataaaactcatt

SEQ ID NO: 104478 - DNA, 1244 bp, Cannabis sativa
  modified_base (222)..(230): a, c, t, g, unknown or other
  modified_base (676)..(676): a, c, t, g, unknown or other
catattcttaagtttttgtaaaaaaagccatattttgtacatttaagtttttatgccatatatatcaaaactcacatttgttttcccatatttttgtaaatagccctttaattaacggttttttccaattttaacaaaaaaaaaataacaatattacaaaaatactttcagttggccaaataaacaaatatacatcacaaataaaaaaattacacaaatacnnnnnnnnnacaccttcaacccaggatccatgctttctgggcaactatcgcgcaaccatcgcgcaaccacaccgcaacccaacgcaaccgaaacaaaaattcaaccagaaagagaaccatcattaaatccggcaacttcacctaagaagacaactagaatcaatcaaaatatgggttgtttcgaattcataaaaaaaatgtagaaaaactactacgaaactaaaattcaactaaaaatctaatttaatttgcataaaactaatgtcctgacttcaattttcaaatccatgaaaggcatatctcaaaaagttgatctagaattcccaaacaatccaactcaagtataatccaaaaaaaaatatatcaatactatagtaaaatatttatcctggtgtattttcgttattttctaaatttcaaatggtaaatttgttcatattaaatcataaagaganatgtagatagagttacgtatgtggaaatattgttctgatttttaatgtttcacaatagttgcattacagttacataaatattttgctaacagttatttcgtctgattgaaaccttcgcctaatacaatattcgaccaaccacccagaaactttcgtatgattaaaaccttcgtctgatgcaaccttcggccaaccacccaacaaccaccctgcaaccatcgtctgattgaaacattcgtctgatgcaaccaccgcgcaaccacgcagcaaccaccatgcaaccattgtctgatagtgtaagtggtatttttgtaattaaaatcatataaaaggtataaatattgtccacaccttacagaagtatttttgtaaataaagtgtcaatttatattttctatgtaataattcctttaattaattgtataagtggtatcaaataatattaagaaatttgcaggtttagaaactatctaaataaaattaccatatttggagttttacaactccgattgaggtgattttagtggcgttagaaggataattcaaaaatctataaattttgtagaaa

SEQ ID NO: 104479 - DNA, 544 bp, Cannabis sativa
tcctagaaggaatttgtcatgctcgattagtccctttatttttattttctttttgatttgaaacgagttattatattatatttgattttttatgaatttattttgactttttttccaatgcagcatttggatgtttgtttttactacttgaggaaggagataaagtacaatgagagtgtaaactcttctgttaatactactgactttttttttgttgcccagatttttaagatgtataatgagtttgttaagaatgattctaacattgaatctgttaagaaggacaacaaagcttctgcatacatagctggttttggtatgtattgcagtaaaaaatggattgaattagataatgtcttaatgcctattaatatgattgatttggctcactggattatgtgcagtttttacatacgtttgagatgtcttaaagtgtgcaattctatgaggtttgggaggtacaagaactcagaaaaattggttcatgcttttcctgtcatgttgcctattttgttgtcacatgtaaacttttatgatgaaagga

SEQ ID NO: 104480 - DNA, 538 bp, Cannabis sativa
atatctatattacgtattaaattaaccacaataaagaatagtttctttttctatttaattaaccaaaaaataaccaaattttataaataaaaaaaatttaatatgcaaactaaattcatgagttactaaaatatactttcttattcatattcaaaagttattatatgataactaattagtttttacaataaattaaggttatcaaaatgtatcttaaataatattaggatactgtgatgtaactttaaaataactaattagttattaatttggatgtctaaatattttactaataaattatgtgatttattttactttattgtaacacgttagttttttcaataagattgaaggtaacataaatgttacacaaaaataacataaaagtatatatcttaaataatgtaatataaactaataataacatatagttttaaaagtaactaatctaaaagtcaagttatctatatgagatatttttattttaaaatgtatagatcgttttatgaaaagtaaccaattggtatcttatcgaaat

SEQ ID NO: 104481 - DNA, 555 bp, Cannabis sativa
attatatcacttaataagtacaatatatatacatatatatgtgtatgaaaaaattataaaatttagacaacaccgcgcaaagtgcggcttagtttcctagttataacataatgtaaaactaaagaaaaaaaaatataataaagtataaaattattaataaaatcacataattaatgggcttaataaatttaaataaatgtcatttcaaactaccaaatttaaatatctttataaaatatgcatataaattaattataataattaattaattaaattatcaaaactaaaaaactcaaaatacgaaatcaatttatcatgtaataaaataatttattaataattatatatagataactcttatatgttttgaaaagtgataattattagtcaataaaataattaaatttaaatcaataaaataattagaattcaatatatattaggaaaatttgatctttcatgctaaaaaataacacatggtgttattttgaaccaaaaaactacacattgtgtaaatatgcctattttgtcattagtaaccccaaaatgccctcc

SEQ ID NO: 104482 - DNA, 596 bp, Cannabis sativa
tcatcaaagaaacaaacagttgttgctagaagtagcacaaagtctaaatatagagctttggctcaactagttgtagagatgtcttggctacaagagctgttgagagaactcatgttcaaatgttcctctgttcctgttatttggtgtgataacttgagtgcaagcgcactggctgccagcccaatgtatcatgctcagacaaaacacattgaacttaatgtgcattttgcgaggaacaaaattctaaagaagagtttggaggtcagatatgtaccctctcatgatcagataattgacagcttaacaaaaggactcactctaactcgaattcagtttctaatcaacaaactcaatgtgactatatcaccttctcgtttgaggggtggtgttagagatattgattcccaatcatgagctggcagaggagtggtgagcgtattgaatgagagaatcccaatactaattttgtaatcattacctcatttttccttgtaataaacttttctgctaggccttgtattctgtgccctttctctgtcacgtgtaatgcctatattggtttttcattttatcgcttgtattcactttttgctata

SEQ ID NO: 104483 - DNA, 992 bp, Cannabis sativa
tggaaatttgatatattgattattcgtaccttaaaaattctccttcttcttctgacatggttctttagttttttttattagtcttgtcttttgacgtagttttttagtcttttccttttagttttttatagttcgagtcttgtcttctggcatgggttgtgtagctcagaatcatcatagtattatggtagaagcattcaagaaggagaagattggatgtgttcaacccgaaattactgagataataggcattaaagaagcattgagttggattgcaactcatgcgtgagatagagtcatgttggatacagatagcttaatgtgtgtccaagcgattcagagcggtatttttatgtcttcacagtttggtcttattgttcaagatgttcgaaatttccttttggctttatcttttgttgatttgtgttttgtataacaatctgcaaataagttggctcagcttggcaagagactcttgtttttctacaggtcgtgtgcttcagttggaggactgttcctctgaagtacgtcctattgttttgaacgaatttattaattaatagatcttataatttttattcaaaaaaaaaaatattgttggaaatttcatcagtcaaatattatcgaaatgtgttattgctactagaaaagtcatcaaaacttgtcatcattgttgaaaaaattagtagaattttttaacaccgtcaaaaatgttatcagagttgttattactaccgaaaaaatcacatgaaaaatcaacggagttatcatcgtcatcagagttaaatgtcgtaattggatattagaatttaacacaaagaaactaattacgtttatcaactagttaaaaatttaagacaaaaaactagttttataaagtaaccaaaataaaactattacacaaaaatcaattatttaaaataacaaaatcatgctttggttatgttaaaaaaattaacaaaaattgagttcatattaccattttaaaaaat

SEQ ID NO: 104484 - DNA, 1489 bp, Cannabis sativa
aagtgaccgagaagacttttcaacgaagtttttcaataatttcttcttctctatttttttcttatgttcttaattaatttgtgtcaaattattacgatgaacaagagtagctaaaaagttattagggtattgatggatattgtttatatttttatagttttaatataatttaattattcccctaattttctatgtgttctatttcattcgttcttaattcttttaattgcctgacgatcaattaaatatttgtgattttaatacgagatctgagaagtgaatgtcaattgtactatatatagtaaaatgagaataaatttcaacatatgacgagagtatctatgtggtttggatagcttatagggtttctgtgtttaatgccttttgcatgtttaaatttatcacgaaagtaaaagatttgcatgtaattgagatttatatatcttagtcgactataaattacccgactaaacttgttattgcataaaaattggtaatatgaattgaattgtattatgccataatagatagatatacaattaaaatcaataaccctagctctaatcattgttaattcacatattaatttaattattttctgtttttattgcttttagctttaattttcttttaaaaatttgatattggccaaataaaaataaaagtttaattttaacgtacttaactacaatttatgtgagtttaactttacctctgtgtgtaaatacttgcaatagatacatatgcttggatgtttaaaatatccacaacaacttaaattcataatttccttccacttaatattttaaattaggtggattttttttttttttttttatttgttgtgtcatttgctacataatataattatttaaaagttagaaactatatgaacttaagtggggtttggttagagttaataaaatggaatgaaatagaaaggaaataatttttatttcattcctttgttttgcattttgaagtattggaatatcattctaatgaaatgacttttttattattttagtagaatgactatttcattttgaaatgaaaggaataaccattttaatgcaagatgagaaattttttaataatgttatcaatttttttatgcattttaaatttgattcttatttttatttttattcctatttttattcttctcaatcaattttcactttaaataaaccttgattatttcccctcgaaagataatggtcaattttcttaatttttatttaaaaatgtatactataaagtataattttaaaacttttgcttgaagaggatggctaagctgccacttaaaaaagttgtttgttttggtttattgtctatttctttccatcattattatttatcatttttttctcactttttttttactgaatatcattgctattagataaaatcgatgtggaataacaatattataagatgacatcttacaagtaagagattgtttagagtagtgtcctttagcatt

SEQ ID NO: 104485 - DNA, 1087 bp, Cannabis sativa
  modified_base (1029)..(1048): a, c, t, g, unknown or other
agagggtatttttgtcataatcccttttgaaattatggatgcctttgattttggcagttttatggttccaatgcacatcaatagcattaatggattgtctttttcacttttcttctattttcatccattagatcttctatattatgatctgatggttgttaaagttagagtataatatggtaagaatccaactttctaccattttcatcttcttcaaaaaacttaagctttctgaaacttccactcgagcttcctgaatccatgcatgccatccttatctttgacattcttcctgcgaatttactcggacttgctcttggactcccggtgctcgaaaaactcattcggctggccgccacgtctccattcgcagaattttctagcactcggtttttttgacttcacacagtaagtacctcttcctccctttttttattcgatttatgattgtcttacattttattacttcattcggtttaacaactagggttcatattttctgggtgatttttagggtttagacataggttaggtttatcatattccttaagcctatggtttgataaatttcatccagaaattgggattgtttttcttttttagaaatgtcccaatctggtttagaagtttattctccagaatttgtagcaccagaatatcccaaacatctagcctccccatataaacccagaaatttcaaacctcagtccaaattggaagttaatgataccaggattagagaccatctgattaagtcgaaccaagaagagactacaagtcgttataggtgaatcctacaagaaatttccgagggcaagcgtcatttcttgcgagacacggcctggcctgaacccacgatattaacctctattccactcgcaagaccaatgtttttacccaatgtcactgttgcttttgaaccaggtgaccttgagtttgaaatcatgtctcataagccccgcaaatcaaagacaccacaggaccccaatgttaccttcgaggcagaacttattgttgggttttatgccnnnnnnnnnnnnnnnnnnnntataatcagatttacttataaataaagatcagaaataac

SEQ ID NO: 104486 - DNA, 535 bp, Cannabis sativa
atcaaggctacaatcagtaaggtgaatccggatttggtggtgttacaagaagtgaagaagacagctgttgacaggaagttcattggcagtatttggagatcccgttttaaagcatggattttgatgcctgccataggaagatcaggaggtacgttgttagtatgggatactagacgtatcaaggttttgaagtccatggtcggcgaattttcaatttcagtattgattgaagcagaaggtcgaagaccgtggtggttctctggggtctatggtccatgttcatacaaagataggttagctttttgggatgaaatggctggcctaagtgcaatttgtggtgatatgtggtgtttaggaggggattttaatgtggttaggaggctgcaagagaaactaaatagtaactcttggactaagagtatgaagatgttcgatcaattggtgcgagaattgaagctaatggacccaaatttgaataatggaaagtttacttggtcgaactttcgaagtaagccgatctgttgtaggctggaca

SEQ ID NO: 104487 - DNA, 841 bp, Cannabis sativa
ccttatttaggtaaattttgaggatgaaatttttaaaaagaggggattgttgtaagatcccaataaacctaatggtaagtaataaggatttataattatattatgggttaatcatgtaataagtgggactatcatcctactaatctagttcaacataaattttaaatttgttattagtgagcatgtaagtataatttataacttacgaaaatttatatagcatgtgtgaatgtaacactatatggggaataataatattttcaggtttggcgaccttggagactcgatcgggagccaaaaatgtcataatggatttaattgatagaattgatagaaatattgtgataagttgataatataaatattgggttaattaggagtttgtggaatttgacttagcaccctagaagtataaattttgtagtgactaagaaatgataagataagtatgaataataaaattactattaatattattattattatattatttattttatatatatataaaacttatcgtagaacttttaggaccaaataaattatatttctagttgagaggttataactaaatagagttacactagaaaaaattaaaatactataaaatatcaatttaacaattataataataaacaatcattaatattaaatcgtaatagaattattttagagtaaatataatatttacacattcttagatcgaggttctactgtatatattaaacttattgttaagataattatgaataataaaatttttattaatattattattatattattatttattttatatgtataaaatatatcattaatatatatattaaacttatggctg

SEQ ID NO: 104488 - DNA, 524 bp, Cannabis sativa
  modified_base (313)..(317): a, c, t, g, unknown or other
acatatatttttaatagttttcaatactatttttaattttgcagtcatatgtgacaaaaatctcaatattaaaatagttataagatcagaatcaaaaatcttaatgatctccaaaatcttctaagttctgattagtgaacatgtaatcttttgttatctatataacccatttgactgcataccaaaattttttttataaggttactgaaatatctatcaaacattcttaatatgtatattaagtacaaatacatacatgcttgagcatatattagattaacttttatatttcttgaattctaaggttgctttnnnnncaatgacttagataacttattttctttagctacaagcctatcacctggtatagcatctttcatgctaaattttttgaatactttattgatatatctcttttgttataattcaagaatatctcaagaacattcttaacatatcttgaattcttaatataaaatgagtatatcatttatggcaagtaattttttaccaatataataaca

SEQ ID NO: 104489 - DNA, 743 bp, Cannabis sativa
tgcctacgctggctacaaccagattaagatgcacatcgcaaatcaagaatgcactagcttcaggaccgataagggggtatactgctacatggtcatgcccttcaggctacaaaatgctggtgcaacgtatcagagaatggttaactggatgtttaaaggccttctaggacgaaacatggaggtttacgtggacgacatgttggtcaaatcaaaggcatgtggaagtcatgcagacgacctcgcggaatgctttgaagtggtccggaggtatgaaatgaaacttaacccaaagaagtgcactttcggggtcaaatcaggaaagtttctgggatttatcattagccaaagggggatagaggcaaacccaaaaaaaattcaagccctcctgaacatgccttctcccaagacgcacaaagatgtgcaaagcctaaccgaaaaagttgttgccctgagtcgattcatttaccgatccacagaccagtgcgttcccttcttcaacattctaaagaaatgccaaaaatttgaatggaccgaagaatgcgaggaggcattcaaaaaattaaaagaacacatggccaaagccagttcttagagaggacttgttaaaggtaacttggccatctccgagaatgcggtaagcgcagccttagtccaagaagaggaaaaaactcaacaccccgtgtactatgtcagcaagcgtatgataagggcggagatacggtacccagtgattgaaaagctag

SEQ ID NO: 104490 - DNA, 669 bp, Cannabis sativa
  modified_base (177)..(188): a, c, t, g, unknown or other
  modified_base (534)..(534): a, c, t, g, unknown or other
gggctacctatatgcatctaagccaaaaacaaacatataggctcacacaggcacattgatttggatggatcctatcatgttactcggtttacacacagaagaaagaagaatgcaaaacttacatgttacaaattatttgtttgacctattgacaattgaactatgggttaaaatcannnnnnnnnnnntgtcaacaagttaatcatggcaatttagatcaaacaataacaggttttataaaaagtttaataattaacaatatataaaacacataaacatgtaactagttggatagttggatataggatttatttaaatttaaattaattaattaatttatcaatttcgaaaaaaaaatatttttttttcagtaataaaattaaaatatatgaattaaaaaagaagctaatttaaaattaaacctataaatttgaaaaattaggttttaactaacctaaatatctatttaaaaaaaatgctaacaacttttcaaatttcatgttattaaattaaaattaaatattcaataaaatnaaatgataaataaatatcatttttaaataaaataacaaaatttaaaagttaacaaaatattttacttcaacttaaaattttatgattaaaataatcttattttaaatttcaaatatggtcattttactaaaaaaa

SEQ ID NO: 104491 - DNA, 595 bp, Cannabis sativa
tatatttgtgtgcttaaaatgggatcattttcgatgatcgagagatgaaattgatgacggttcacaaattgaggaatgagcaaataagctgctcgcacgtaaagtaggaaattaactacttaacgtcgaaagaaaggacaatcaatggaaacccctaataagctttatgcatgtaatagtttatattgtgaataaaacgcaagtaaacatccgcataataaagttcatacttaaaagtgtgaggcattaaaaaaaaagcaaagttggctgtccaaccttgcaaatatgtctttacaaaaaaaaggagataaataaacgaagtctacatgctgggagacttggacagagtttcttcttcttcctcaacctcgtcgtcttcttccatcttggtctttttgcagagagctaaagtttcctcttccttctcctccaagaagctagtatccatgttagggttccaaagccaggcccggtatacagcgcgaaaactaactttattgcaccattctacggtctctattactttctcggcaagtttctcagcaagcttctcctcaaactcatcagcttggactttgagggccttctcggcctc

SEQ ID NO: 104492 - DNA, 526 bp, Cannabis sativa
aaaaatgtgacaaatcttgaccaagtacttcattctctatgatatatttgaaacactcatccttatcagcccaccgagaaacgatattatgtatctgttctaatggagtccgtgtctgctgtgttagacgatctattagaggtcgtttctctagtggtggtggttgtgttaaaggagttggtggcctttgtaattgacctccacttgttgtttcatgataagcctatgtatacaactaattaaattaacacttagtgtataagaaataaacactaataataagtataacataatgatataagtatgtgatatgaaaaattacttgttgatgtacatcattagttataattactaaatgacgaggctaagggatcggtgtcccaatactttgatcaacataaaggatgtccaaactaggacatggaataggggcaagaatcattctcttcaaaactttaataaccatgactgtcatgtagtttgagtttggtatccctttgtaaatgactataccagacgcaacaat

SEQ ID NO: 104493 - DNA, 603 bp, Cannabis sativa
agatatatttaataatgatagatggagattcagtttaaaattctttgcggtgcggtcgcggtttaaatttttcctaaacagcgcggtgtggtttgtggttttgaattgttaataaccgcaccgcatattataaaaataccatttttttatatttatttaagtccaatatgtgaaggtccaacccaaagcccactatattatagttaaattatttagtaaccatcaatgggcactataaaaaatcttacttttaattacaacaaaatttatgattaaaagtaagaaagttgtgactaattataaattttcattcctacgttgtgactaaaaagttcgtggttaattaaaagtattaatcacaaaaattacaatttattgtgactaaatgtggttttagtcacaatacttattgtgactaaaactaaattagtagcaacttgtaactaaatattatatttagtcacaaataattttttttttatgactaaaagttatatttagtcacaaattttttttgttataactaattaaaaaattgtcactaaaaataatatttgttgtagagaggtataatacccattaaaaattatttcatgcatatat

SEQ ID NO: 104494 - DNA, 1224 bp, Cannabis sativa
aaatcggctacatctgcatcgctgctaagtctattttgaagtactcgcgacgctcttaactctctaacatcttgttctctatcgatgagaatatccataaattttacataagaaataagcatataatgttttttaaagaacttctcataaagaagaagattatgtagcttttcctttatccacctatcaataattaatggaggaagtttaagatgtcctttgaggttaaaacattttccattgaatgatatggttgccaagcaagagctagtaggctttaactctatccctgttgatttaagttcctcaacattgcgaaaaaacccttttggatcgttgaaattcggtctttgcctgcgaaaacaagaacaagatattgtactacaacatctaagaatattattttcttcattttttttgttggtagagacaatatttccatcactagatgtgattagcaagtagagaatgtgcaggagatgaacatgtttatgattttcgattcgaataatgtcatcccattgtttaaggaggaaattgttggagcttggaattggcaaatcctttgtgatattgttaatgtaaatgaatttaacaatatcttccttcaattgatttgggttattagttaagttaaccaacaactcaatcactctaaatgggatttgattatcaaacctaaacaaatcttcttgtatctttcttgctttagcattatgaataccaaacaactcatctaattcattaagaaaatagctatgtatgaattgtaaaattgtgcacccactcaaaaaaagtgacttaatcatcaaacctttgttaccattctcatcatgatatgataactttagtagatctttggtatttgtagtgaagtcttggagtaaactctttccaatcttgtcattgctgaaggatttgatgaaatttgcagctatttttcttggcaagtcatgaggcagaattatcaagtttaatctataaacgaaatcgatttcttgtgatggattatcaccattgttttggctgataagatctaacaaccattgagtatcagactcagaaagaatgagttgaggttgatgaggatgatgatgatgatgatcaacaacatgttggatttcgttttggtctatcattgcatgatccacattcacacaatgttcttcagccatcttttactctttactacaaaaatacaataaaattagctagaagaaaaaa

SEQ ID NO: 104495 - DNA, 788 bp, Cannabis sativa
atcaatcaattataattctaaaattagaatatgtcttatttaagaattttcactaagcaaggacttaattgtgaagaaaagagattttgggtttggtaattaagagactttgcatggtctaactaataaattacataaatgacaattttatttagaaattaattataattattaaataaatagttttggcatttataaggtttgaattggaaaatatggtattattaaaatgaagaataaattgttgaaataaagtggcaaaattgtaattagaaagtggtccattgtagtggacggcacttaagtatttttgcccaatatttgttttttttaatccatataattcaaccctaaactctagttgaaacactataaaaagaacatgatgctctcatctcatccgattgacactttgtcaaattaatatcatcttgactattgtcttagagataattcttgaagctatttctatgagagtcttagagatagagaaaaataaacttttagataaaagtgcaataccgtagtaatccctactaatctaaactcaaagttataaataagtgtatatatatatattcttcatattatatatattgtatttcatacatttcttatattaatatttatataatcaatcttttattttaattcttgtattatttttacaatgaattataatttagggaaatttgaaattctatgcttaaaataccatttaatttttcccctaaatgcatagttattaaaattggtcttatatgacaactttcctaattttcctaaga

SEQ ID NO: 104496 - DNA, 1050 bp, Cannabis sativa
cggttagatgcggctaagcattctcggatttgtctattttccaattccaataatggtacatgcctagttagattatatgcatcctcacttctaggcacatatcttgtagatttattggtatcttcgttctttccttccgggttttgatagttacatatcctgtagaattattggtatcgtcattcattccttttggatcttgattatcacaaccataaattctccttgaacgtgatgttctagtagtatggggtctttaaggacccattggctctttcccacggtgatgtgtggtttttgcagggcaatttctatcgttttgattgttatccaccttagaagtatggatagatttctatttgtaaggagggacttttctgatttttatcacgaaggctctcaatgaaagtaccaaattgttaacgcaaatttttgtttaaccaaaattataagtcttttcgtaataaatacttcacaaaaatactaataaaaaatttagaaatatatttacgtggttttacagttaaaatctccctactcaatgagtcttttttattaatgatattttttaagtacataatatcaaatgatagtatttttctcttaaaattctcgtctttttttttttttttgtggaatctgcccctatttataggaataagggttgtcagttattttcttgggattagtttaaatgtaactgttcatgaaacgtggacaattctcacgtttaagttaattgcatgtgggataatattagataactgctcaactgccttttatttttatcctttagatggttaatactgatttggacggttgtatctcgcttaacatgagttatcctccttgtccatcttaatgaggaaaaaatgcaaagtgttagtaggtggttcgtctcgttatgtctctttatttgagttcagattgcaaggtgactgtcttcgctaaatgtaatcctaggttgttgtaatgccctattctatagggatgccacgtgtgtgattttataaactagtttaatactaatagaataattaattattaaaa

SEQ ID NO: 104497 - DNA, 1172 bp, Cannabis sativa
cttcggaaggatataagaaagaaccggccggtagactcaatgagtgactttcttgatcgtgctgaaggcttcatcaagcttgaagaagccattcaacgagcgtaaggtgagcaaaagcctggcaagtcaaaggctccttctattggaacatccacccaacttccccactacccaagtaattcgagctcaggtggtaagcgttttagcaacaaccacaaggaaggaaatgtgaagaaaggaaggttcactggaaaatccaaacaagctccccggaagaatcatgccaagtacaccgcattcactatattgtttgaaaatatagaaagtgtatacatggaaactcagtcgctggccccatataagaagcccgggcccatgaggaaagatgccagcaagagggacatgacaaagttttgtcgattccacggagactacgaccacgacactaatgaatgctacaacttgaagcgggaaattgaattcgtgataaggaaaaacaatccaccccacaaaagtatgttaagaccgatcaaggtcagtggaacgacaacaaccaagatttgctacctccaccggtagacgaacatctgcaagtcattgttggaggctcgcacattgctggagattcgagcaaagctagggagaggtatgcccgaacagcgcagcacgagcaagaagaagttattctggtcgttgaagaaaggaagcccaaagttccacgagaaggagagccgaccataaccttcaacgatgaagacgctgtcaaaattaaatttccacacaacgacctgctggtcgtggaagtccagatagctaataaaatggtggccagaaccatgatcgatgatggagcctcttctaatatcttgttcaaaactgcttatgaaaaaatgggactccagctaaagtgtctaaccccatgcctccagcctgtttatggttttttcggtcaaggagtcgcacctctgggacaaattctcctacccctcacttttggacaagctccgacgagcatgagtatcatggcacaattcctgatattagatgtgccttcagcttttaacgtaatgctaggccgagtggccttgtatgacttaaaggatgtcacatcaatatttcactcgtgccggaagttcccaacaaagaatgtggtagggtgtctaagaggaaac

SEQ ID NO: 104498 - DNA, 588 bp, Cannabis sativa
aatatgatttaaaattgctaaaaagaaaaaataacctcatggtatcttaaataattaaataacataatataacctaaacgttaaaaagtaaaatcataattttaaagtaactcgtcaaaaaaggtaaacaaatgtgtattagaaaaaaaaaatatcttgaaataatttttttaataaaaagtaactaagtggtatattatttacatcaaaagcaaccaagatgttactttttttaaaacttgcaaaatactgaaatatctgaaagcgagatttttaaagttttctccactttcggtaattattttaaatttcggtagttgtgctgacgtggcacaccggtatttatgcaaataattttcttaaaagtatttttataaataaaaataattttaagtataatattgaaaagaccccattttttttatttaagctgtatatttatttatttggccagttggaagtatttttgtgatattattacttttttttggttacaactgaaaaaaaaaccctgaaataaatatgaaagtaagattatttttttctagtggatatttttcttccaatttgtttatatatatatatata

SEQ ID NO: 104499 - DNA, 2634 bp, Cannabis sativa
agtgtaaatttatggtctcaaaactacaattttagtcgttttatggtgggtaaatagacatagttactcaaagttttaagtttgtaaacgacataaattcaagatttatttttagcgacataagtactaaatgtttgtaaaactgtaatttttcttcggttttgttagactcttttttgaattgttagaagaacatttggaagtaagtgatactatgtaatgtgtctagacccaatgatctagcaactgattttatatgtgccctatttaagataataattagaaaaaaattacaattttacaaatattgactacttatgtggctaaaaataaatattgggtttttaacacctactaacttaaaattttgagtacttgtacaactatttacccttttatggtcaaacattgtaattttttggaaatttaatttacttatgaattttttcataaacattcattgaatagtgaaagtgactgaagattttgtgcccgtttatgttgttgaattgttttgcagtttaatactgaatgatttttgtgtattcttagtggctaagtttagaatatgttctataaacaacaagaagtttaaaagggtcttttttattttggtccttagagccatacctaaacttgttcattgtgaattcaggaattaatcactgtgtttttgtctttggtgtgtttgttacattatagtattatagctgtttccttgtggaattaaggaaagaagtaattgaactttaatatgtagaatttgaatataggagttggttttgttccattaggatgcatctagttcaccctcctaacacgttagatcaaatatcaatagtcgggttgatcaactggtcattggtttgcttccacaaggtttgaggtttgagtccctactatgtacccatatattatagggttaggcggggatcctagtttcgaaaaaggaaaaaatagttgggtttgatcgaacggttgctaattattaaaagagtgttaaataagtgagagattttttttttattttttgcaaataacttgggcatctagaaagttgtttatcatagatagagtacttaacaccaagaaaacaagtaatggaaagcaaaatagtacacttatcatccgcgaggttgcacattcggtctttaggtgaatttgaaggatagagttgaacatttaaaataggctacaatgacttctagctgagctgttttttgatagttcttcagaaaacagttgtagagatgatttagcttttacagctttctgttttcttcaattctagtttggattgaatgagaattatttaatgaaaaccaagtaactaaggaaaacaattattcatttgttacttcgttttataaatgactaaatgaatcgaattgaaaggacataaaatagcacctgtgcatgcattcaccaacccacacgcaaacactctcacttgaaattatagtctgtaagattctcagattttcgtgccactggatgctgatagaagcacagtctttatattcttttcctaaaatttcttgagctttaattgattagcccgcgtattagcgggtggcaacatgatgggcaggttgaagcggagtcaataaatcgaataaatgtgcttgaggaaatgcgtgagaaactggaattaagaaaattggtgctggaaaatttgtcaaagtgccataataaagccgcagagactgttaaaaagaaagaggagcagcttaatgatgatgttagtgcactattatatggtgggactactctttctactattcgtaaccggttgcaggtaatgggctgtttctactttctacatgaatctccattgattctctttcacttgtccttctagactcgtactgttgtagactctagagtgagttttggtaacaatattttcagtttttttctgcttttcaacaggcttggttatttttcctttttattttagtgataacaaaatcgtctatgcaattttcttaaaggtttgaattttcttctgtatgtgctttgttatggtttgagtagttagtaggccattatatatgtgttggtggactacaagctcttatattgtgcgattattacaggaatcgaatgagtttcttgctggaggaaaagggtatattcggcttaaaaaagtggaaaagaagctaagaatgagagaacagtatatggtgtcacaagttgcattgctctatcctgtaaaaatatctgcaggagctgcacatgaccaggagcttgaatcgtttccgagcagtagcaaattaggtatatgtgttgccactctcaacaaattcggtgacctttatcatgaaaaacagtttttaaaagcgaaaagctattttcattgggaaatccaatcaaacactgcaaagtgcttttaaaacactaatgactaaattgctcaatctataatctgtgaactctgttttagccattgccactagcataacgttatgtgcctgctttgattttgttaccagggaattcagctggatgtaagcctgtgaatccgggatctttgacaattttgggtcatcagttgacaatggctccttttaaaacaatgtctcttttctcagacaagaaagaggctcagaagacttcaagtgctcttggata

SEQ ID NO: 104500 - DNA, 931 bp, Cannabis sativa
ttgtaggatattgagatgagactcaaggtgtcttattctatagtcatcaagagaataaagtatatgtgtcaataaatgttacttttcttgaatatgactatatgaaaagtcacaagtcacgtagtcaagtggttatcgaggaaattagaaatgagatttctgaaccaaagatttcagcaccattagttgaagaactgacagtggttaccacagttccaaaaaaggaaaccccagtacatcgtcgtagtgggagggttataagacaacatgtccgctacaaacatgaagcacatgttcttgtttctgacacagacaagaatgatctgttgacttacaaagaagcaatggatgaccttgacacagacaaatggaacaatacgatggattcagagatggatggactccatgcacaccaacaagatcttgaggacattacacccatagggtctatgtggattttcaaaaggaagaataatgctgaagggaaggtagagacctttaaagctaggcttgtggccaaatgatacacatagcgtgaaggcatcgactatgaagataccttctctcttatggcaatgattaaatccattcgcattcttctttccctagctgtctcatatgattatgagatatggcaaatagacgttaagaccgcttttctaaatggcaatcttgatgaaaccacatatatatatggaacaaccagattggtatgtattaccaagggaagattgaaaggtgtgcaagttacttaaatctatttatggattgaagcaagcctctaaatcatggaatatcacctttaataagactattaaagagtatggctttgaacaaaacgaagaagaagcctatgtatacaaataaagtaagggtaatgtagtggtattccttattctttatgttcatgacattctacttattgggaata

SEQ ID NO: 104501 - DNA, 4317 bp, Cannabis sativa
ttacaataaaaatgtaaccattagaacctcctccaaatatatatatatataatcacatctaaatggcacaccaatgtaaccgtacaatagctaaaaaaatcttcgaaaatcaaaatcacaaacctcatttcaaaaattaaaaaaaaaaaatacattacttaactaaaaaaaattaaacatagatatattacacttaacattaacctaatatatataaaataattctatggtagtgactatatttttattcatatactatacatacacttttttaaccattaatctatatgacttttaaaagtcaagattgtataagatgtatttgtttataggttattaaaatttctttctttgaaaaaaaaatttgacactcaattaaaaaaaattaacaaccaatcagaattaattttttttttcttttgaaaaaccattatttaatcttcatcctctcatataacctaatttatcctttctcctttttcatagtcgcatcattgactgtactcttgaacaaccattgtgatccattagtaatgaaattcaacgcttcattctcaaatttgaaaacatcaaaattgagctttgcattgtaacgaagtgcacctgttgttggatcaacatatatgattcgagtatcgaccatagaagataagctcacgataatatacacttcagtagtacaaaaaactgataagtgtgtaaatttgagctcacaattacaacttaaaaacattaaaatggcttcgttggtagagtctagtccgtactaggctattttgagggattgttttccctaagagtcccttttggatttctgtctgggcttttacaacgattatttttttttctcgtatagttgtgttttctcctttctttctttgaggctatggcggcgagaggtaaagaaaaagaaacaatggatgtccatattgttacaagtgatacaagcattgctcaacttttggaacgggatagtgcaatagagatagaaatgttgaaactttttgaagacattactcttgaagatgtagttgcttgtaaggcatgtgtggcaatggttgtgggctgtaaagacatgcccctctgttgtgaagaaaattttgatgggggtgtggaacaggctgggtttttggagaatgaagaaatgcggtgatggggtcatgggcttcttctttgaatctgaggaggactgtcgttatgtgcttgataaaaggccatggcttattaatggtgtcctactcaatttaaagccatggccagtggaaggggaatgagacttgcagagtttgaggtagcacgcttttgggttcagtttcacgggctgcccaccagatgcttgtccgtttaaaatgctctgatcattgctaagaaagtgggtaactttgttaaggcaaaggaaaaatcgaagttataattggttagaagaggttatttgaaatgctgggtagatatttggatgacacatcctatatcctctgtgttctttctgagaatggaagggaaagaagaaacttggatacagttcaagtatgaaaagtttccactattgtgtttcacctgtggaaagttggcacattttgagaaagcttgccatgccccaatggcgatggtgtacccaaaggaggggcctacgactagaatgtatggtccataaataaaaagtgacacagaccgcagtagctacttctccatagctcgtaagggagagatgcgtttgaagctggatattgagtatactccctggggaaaacagaggatcaagggcatgtggaaatgacgcttaaatgaccgtcataaggcagacaatgtcagacctctagccgatgacaaaaaagcttcagatagcatctctggagataaacgtggagaaccgagattggaggacagaggacattgtacgaaagaggatcgtgggtggaaacaaggcaatacgagtacggagaatgagaatgtggagatacgtacaagcactggcagtaaggaggagggaaattcaaataataaaaacgtgggattttacagaatttgggcctacctacaatagactcttgtggtattataccatacattgggccctaaattgctcaatctttggacataccacatttgtggatttgtgcttctcgcaggccccacgattttcctgaacccactcccctgggatggcctacaaatagccctgagaagcaacaactctttctgcaattgtatgggcctgaggtggtggacaagttcaaagcccaaccatctctgatttataatccaccaaatgtctcagaaatgattgttcacttacttgggttccgtaagctcaaggtgcacacatggtataatctcattcctaatcctcatcttttttttgttattgaaaaattgaatggtgtgagtagggatacagtggagacatcacagtttgtacagactactaccaagggaagttcgacaatttacgaggtagatgttgaggtgaccaaggggggaatggaattgacattgatgataatgtaacctttagttgagggtattttgtggagggggaatgctcgaattcaggcaaaaaagagaggaaaaggagggcaagaggcagtgaaaggaaaagcactgtaagcatgaaatcgtcaggtgttaagacacgtcagagaaggaaattggctaaatctgatggcagagagaatacgggcaacatttgtgatctattggaaatttatgtggacataccggttacttttgtgaaaaattttggtggtggcaaggaggcggccgaaagcatgccctcacctccccaatgaggtgcctttcctagaactgtcgggggttgcacagacccgtgacagaacgaacccttcggggtttgatccgtgaggaggatgtagattgtgtttttctctcagagacgaaggtgggcacggatgtgatggagcaagtttctcataggttagggctcctaaattgttgttgtacccctgcttatggcacgacttggggtttgtgtttggcttggaggaatggaatacacattaaagtggtagatgtgtttgcatctagttttaaagcagaggtattgctagcctcgggacataatgggtggattcttttttgtgtgtacgacacaccatatcaatcgcaaaaacatgctttgtgggagtggtttactggtattgtcacaaatttccatgaacctaggatggttatgggcaatcttaatgttattttaaacaaatatgagaaagaagggggatgtcaatttgtggataaagagggtgattacttaaataattttccttttgaaactggtgggattgatcttggattcgttggggcgccatgtacgtggcatattgccaggagggttgatcaaagggttcgaaaaatactcgatagggcagtggctgattcgcaatggtgcgtggattttccgaatgcaaagatatttaattgccctacttatggctcagaccatgtgcctcttctggttaagctttgggaagacactgcaaaattgagattccctttccgtatcctggaggtgtggacatcgagcccataatgtggggaggttgtcaatggagcgtggcatatggttccccataataatcacacttattttttcttaaatataggctaaatccgagacaagggaacttccaactactatggacacttttcaaaagttccaccataaagacaacacttagcacaaagaacatgcgctgagtttacatttatattaatttataaatatttctttcaatttgttttgtattcaaattaattatttaatttatttaattttttaggagcaaatagttgaattggttgcaaatcaactaatgctcactagggattagcgtgatgagactgctatagatcccacccagtaccctgagactttgcctgttatgatgcaagtactaggtgagagatctcgacatttgagaggcttcggtcatctctcaaaattgaaggcagttgaggccaaaagatcacctgtcacgacttcttctgcctcacagattgttactatggaagtacgaggccttacaaaaaaaaatggaggacgcagagcaggaaactcggtattcgaggcagcatcatgaaacacaacaactttacctcaagcgattccaagatcagtttgagtatctcttttgggttgtgcctggtttcaacttacgtcatagggatcttctaccattctctacttctcctagtgctagatcgtcattgcatcctcccgtgactcagaacaacaacgatgatgacattatccatctttagaacaatacatattttataatgggatattggcggctaaac

SEQ ID NO: 104502 - DNA, 1395 bp, Cannabis sativa
atattattacatatatttggtgttctcaaattttacgcgacaacaacatgatagtaaaacttcgaagccaataaaaatatgtcacgtatacacatgtgtacatagtagtaattcaattgatatttaacggtgaaatttgactggcaactcaaatttgcgaaaaaaaagtaaagttaagggagtttttccacctaaaaaagattagaagttaagtgtataaaatttaaacataaaggagtttcaccaataattattatcaaagaacacccggtggtaaatctaaccaccatatccaaagataaggcaagtttagaaagattgttagctaaagagttcgcagaataattacaaaagagaaagattgttagctaaagagttagctatatctatatatctatataaagttaaatgttaaagtgatgatgtggaattctatagtattcgtaatctatttaaaatgtacatcacttatttttttcacatgtaatggcaaacaaaagtcccacattgttgaaaatttattttataaaatttaacgtagtatataaataaagctgatattttttaaacattagtctctaattttatttatatattatatgtataaatttgaaaagttattttaaaaatttaatttttcattagttatttagtagtaatttttgtaataattacttctaaattaatttacgttgataggttattttcatgattttttatttttagttaataatttcgcaataattatttaaaataataatttttatattatatttatttgtaaattaccctttatattttaatttttattcacttatgtcaaatgttaactaggattgtacacatgtgtacacgtgacagtaaaattttgaagccaataaaaatatgtcacgtatacacatgtgtacacagtaataatccagttggtatttaacgatgatatttcactggtaactcaaatttgtaaaaaaaaaaaaagtgaagttaagagagtttttccacccacaaaagatcaggggttaagcgtagaaaattaaaatataagtggatttcaacacgaattatcaaagaacacccggtaaacccgaccaccacactcttgccatatctgaagacaatgcaagtttaaaaagattgttagctaaagagttcgctaaacgattacaaaagagaaacttagaaacattaacacggttacaaatatcatcaatatctttaaaaattaggccaaactcagccaagaacaaatttctcttccgtaggatatggataaaacgttgacaatctgattcgatctccacattgttgaagccaagatgcgaacatagaagtaatttatatattaatttcattatctttagtatttgtcagaaacaatatcactatctttctata

SEQ ID NO: 104503 - DNA, 6608 bp, Cannabis sativa
taacactaaaaaattatagtagtaatttatgaaaagtacgggcgttacattgatgcaattgatgaaggacctacaccaatttacagattatgcagtgtcgctttattgtgataattagtcagcaatctgtgtagtagagaatctagtgtttcatgctcgaaagaagcatgtgaaggtgcattaccattttcttagagagaaagttctacgagaagaattagagatgcaccaagtaaagagcgaagaccaagtagcagacttgctcactaaaagactcaacacaacaagatttcagaagctcagagaacaactcaatatgaagagtcggtgttgaggaggtgttaaagagtcatcactcactctaacttcaaacatttctagatgtttctattatttagccatcaattatcatctagaagttgctacaaacatgtagcattaataggaaaagaaattaactaaacttttctagtttttagaccaatacattatgataattgctagaattttctagcaaattgaaatggctacatgaggcactataaataaacccttgatctcatggatgtaggtgcaaaaagaaagtttcaagtgtccatccaaaaagtgtcccaaatttgtctaaactttaaagtgttcttaaagtatgtaaatatttaaatagttaaaatgagtgtcaagttaaaatataagaataagagtttcgtatgcattgtggtcaagttaaggtcttgaagtcttggtgtaattatttataataataaaataattacattttcatgtgttgtgatgttcctccttacgactgcatgcataatatgctattataagcatgtgctaccacttaatgacttaccaattcagggatacatcaaataagcagaagcggtaattttaatttgaataagaaacagaagtctacacaaatttcaaatcatcttgtggtgcaggtgtaagaaattactactagtactagtataacttgagaatatattttcaatagcttaataagacaacacaagacttcgataaaacattcaaagcgtaacacagtccaatatttgaactcacacaacacaatagagatacaaattttatgtaagcacacttcaaagttcaaaagaaagaacatcctcctataagttagaatagagaataggaggtttttatcaactcagaatttacatataaagagcttcaagagagttagttaagcttagcctgtattcctcatcccagctgcaattccatttatggtgatcagcagtgcatctctgagcttatggttatgatcgtcgcatctcagcctctttagtatctcaacctgtaacatgttaatgggattaagataaggaagcctgctctcaatcagcctccttaagctccggttgttctcagatagcttctcgtgtccactgaccaccaacacaaacttctctgtggccaagagctcctttctaagatcagaaccaagctcacgccgctccttcgatacaaggacttcgtcatagtgtttggctataggaatgtcagccttccctaaaaccatctctataaggtcaatggtgcattgaaagaaaggccattctttgtatatcgctctcaagtcttctgtgtgtcctttctcacaaacgccctttaaacctgcaccaacaccaagccaagcaggaagaacaaatcttgtttgagtccatgcaaacacccatggtatagcccgaaggtgtccaattcctttcgaactctttcttcttgtggggcgacttcctatgttaaggaagccaagctcagcctgaggtgtagcttcatggaagtaggcaagaaaatctgggttttcataaactatgctccggtaattctggcaactgatattagagatttcttccataagattacgccatttttcttccttaggtggctgtggaggacgtagtgttgcaatcagcacggcggtggtatatatttctagctgtctaacagctgtttgcggcagcccaaatttcgcctgtaccatctctccttgttcggttgaccgtagggtaccctaaaaaatttaccatacaagttatagatgatcaatcataaggtttcttatagccaaaaactatcaaacccaagaaagaaagacattgcaatttacagtaatacgaaaatgcaaaaagcagttgcaagcctattaattaataaaaccttgcaaatgtacttggagaaaattaccattacagaaccaggcggttgtgactgaatagctaagtatgtagggccacctccacgcccaatacttcccccacgcccatggaacaatgtgacttttataccataatcattgcaggcactcacaacatcctcttgggctttgtagagttcccacgcagcggtaaagcgcccagcatctttaccagaatcagaatatcccaccatcacctattaaaacttggtatgcttcatatgttgatagggactttatattttctatgaaaaatggaaaggatgtctagactattattacctcttgatgcccattatggttcttaataatgtgctctctgtaccaatcaattgataacaatttcctgatgacggagccagctcctcttaagtccttcacagtttcaaatagtggaaccacccggagcctatgtaaatatatttgttaaactagcatctaacatacggtgttacattggaatttggaagtggcgtgcatcagtacatgttaagataataaatatttacatacccagttcataatgataattagcatcttatcctatcattatgcagttctaattatttacagctcactttgaatgtgtataacgagtttagttctgtttgataaagtaagggaatgtaagcccctctctcaaagtagtcattctatcaccttatgaaggatgacaagcttaaaacattagggaatttaaaatgataatggatgaaagaaaagatttccgtgtctcccaaaacaactcatcacaatgtgcaatagccaagttctgaaatgagaaagaaaaaataatacacatccaacttatatgggatttcatggacttacgttccaccaggacatggtcttcctaactccccactaacagctagtcgtgcatctttctgtaaaagctcaactgcaaggacatcggtggcctgaaagaaccaggtagttagaaagaattagtaaatttaaaaatagagagagctctatgtaacgcattcagcaagaaaaatgttaagcttcaaaagagagacaaaaagctcatgtttgcaacatgtatcatacatttgatgccatggaaatcacatatgctccaagtgaatcactccctagctcagcagcaacacggaaggtgtccaatacttctttaacatcggaaagaacctgaaagttaaacaacaagaggaagacattaaagaggtagaaagcaaaagctgctttaaaaaatgcactcgatataagtaatggtttcaggtaaaaccaataaacatatagaaatttcttcggcatcaatagcagtttcattttcttttagcacacaaaaccagatactgtgattaaagtagccaacaaacactggagcataagataacaaggctgaggtcatttccaattcattcacttatgcttctacaaagacacgataccaagacaagtttctgattttagatggataaacataaattttcatgaattacttgcagcagataaaaatagaaagaaggtaatagagtatcacattgaaccaaactgcaatgcaaattcagtcaatatcattctagaagtataattcttaaaagatggtcaatcctaaaatggcaagcgcacattcgagtgagcttgattgcttcaagtattcaaggttacttagtctcctacagtatgcgatcctaggtaaaataactacctgtaaagggagtgtcattattagattttcttatcattttacaatattacaataaatgttatattaatagactacagagtcacccagttatagaaaataacacagcaacagacaagcaatagaagtttgaacatttgacaaaaagaatagatttcatttctaacataatgattgaattttcggcttttcaatttttatctcgcaatatttgtgaagatcacgagtcatatcctacttttcactctatctagacgcctacctttatactctggggaactagtggcctcttccctttcaattctcttgttaaaaattctagtttcttctcttcatcccactcgctatatgcacccatatccaaataattggtaattgcatctagagtctcagcgtgtctggcagattcctgtcacaattgcaaacttgggttaaaatggttcgttgaaaacaagtagtgtaatataaaatacagaaaagtgttacaagtaagttatttcaaattaaacttcaaaatgaaagctaacctggcgtaggtccagcttcattagaaccatcccgaaagtagcaactcttcgtatcaggtcagcaagccgaccttcggctagcactccagacccacatgaatgctgtaaaagttatcataaatgttacaaaagactagtataaaagttgttgtaaatgttacaaaagactgttttggtattcttgagaaagcgagaataccagagactcgtagcacagaagtaggggttccaaaagttgatcagatgtctcatagtaatcccaaggttcatactcacatggaagatcctcaagaagaagctccagtcgcctccgtgtcctcacaagctgaacaacaggacataacaggtatatttacagtcttattgtgactatagaattcagtacttatttttctatgatattcgcgcatgaacataataattttgtaaatatacgtttcaaatagtttgcatggtaggagatcatgcacataattagcgcaataggaaatacgtttacaaattctgtaatgaaacttatacgctattataattttcataaccatctggctgccagtgcctttacaattcattactattctcaagttaaaaactgtttgaaaagaaacattcagaaaatatcaagtattgtcaacatctgacatcattgtatctaataccatcagtgaccccatttcttctagttaccacaaatcccacaaacctacatggtaattaggtgttcaaatttgggcacttagcaaaaactacacagaaatttcccataccattcggaagcaaacaataggcctcacagtcaatcaagttaaatttcttataattaaagggtcttaaagataacacagtacagtaccttctctttgacatttccaagaacaattctataaggagcaatgccagattgctgaggaggcctaggctctaaaagcttttggaaactggaccttccaatctgagactctgcgtataatttcctttgagcaacaacttgattgccattgaaagaagcagaccttgatgctgccgcagactttccattactagaagcaactgaagatccattagacaaaatacgtggattgagacttgaatcatggtaggaacaagtctgaccatcctgagaaacaataaagaaaaaaataaagataaattgatataatatgtagaaccaaaaacattagaaattgattttctagtcgaaagtaaaggttgttttacctggcgattcaacggcttaaagtcagtaccaggaaattctattcttgggtactgcgatccatcatcactgcattctatatgaaaaggtaattacaaaaagaatatcaactaggactgacaagactcagatattatattatacgcaagactgtccagtgaaggcctaaattcaatgaatacaaacataaatgagatacaatgcccaacaggtatacatcaagtgcgggtcaaaaaacatgactctagtaattaattacatctacagttaagaatgcaaggatttgtttggaccaatttaggcaatgccagaaataataaaactatggtattaaaataaacgaaatctttaaatatctaaatgcactgttagcaatgatcacatagttaccagtgcaagatggttgatcagctctatgtggaagttgtgatggaagggatgaggcctgtatctttagttgacttttagttgaagactggttccaactctcatgccgatcctcagatgaattttctaaaaaaaatttggagttattgcccaataagatgtaaactcaagtgcaagtgatgtttaaatacaaaatatgtatcttcaacaaatccaactaagatgatcactacatacattaattttgtggataacgtaaataagagttaagcacaaaccttatattctagtttgatatgtgcataccaattaagacacattctatcaatttaccctgctcatgtttaagtatctctcttgagtccatttgcatgcatgttcaaaaccagatatttcaatacgtcaatgcttttctcaaggtagaggtgtaggaaaatcagtttatatatattagaaataaatcttgtgaagttgtaatatagggttttaggaaagagcattgctattagccaccagtggtgcctagcaccttctcgacatgtcgcgttgcgattggcaagcgatactccctaaaagctatta

SEQ ID NO: 104504 - DNA, 946 bp, Cannabis sativa
ttctacttttgttgttcttagccaataaaacaacagttgaattgtcatagaacattcttaatgacattgatatggaatcaacaactctaagacctgaaataaaactctttatccatacatcatgtcatgtagcctcaaaacatgaaacgaactcagcctctatagtagaagtcactatcaaggtttgtttgttactcctccatgacacagctccaccagcaaacataaacacgtaactagataatgatatttacatgaaacatataactagcaaaatctaaatttgagtagccaactacttttagattatcgggttcgttttaacataagtttgtaatccttagtatcctgaaggtactacaaaagctagtcacccaggcatgaatctagaacatcaacaaatggcgaccattgaatgcaaatagttacaacaacatggtttaatagagtcaacttcctcaccatgtgtatatcatgtattttatgttaataatcgatcagagaaagttcaagaaaagcaaaggttggtcatcaactacaagcccctaaatgagttcttagcagatgataaatttccaataccaaataataatttattgtttgccaatttatccaaagcccatatttttttgaaattcgatctaaaagcggaattttggcaattaggcatcaaaccaaatgactggcccaaaacagccttttgcattctaaatcatcatttttaatggatcgtcctgccttttaggctcaaaactgccccttctttattccaaaaggctatgaccaaggtatatggctcgatattggaaaaagactctaatctatatgacaatattttactattgtctcctgatgaaaaagcccatcaatcgttattggcccagtttgcttctatcactaaagcccatggtatcatgttgtttgaaaagaaaatgattattggaca

SEQ ID NO: 104505 - DNA, 710 bp, Cannabis sativa
tggtatggaagtagctcgatcgaaagaaggaattgttatatctcaacgaaagtatatcctagatcttctaaaggaaactggaatgattgggagcaagccggttgacactcccatggatccaaacttgaaagctaatcgaagagaggattcaactccagtagagagggggagctatcagagattagtaggaaaactaatctatctctctcatactagaccagatatcgcctttcctgtcagtgttgttagtcaacatatgcacaatccttgtgaggaacatttggaagcggtgtatcgtattctaaggtatctgaaaatgacaccaggtctaggtttgcacttcagaaaatacaacaatcgagacttggaagtttacacagactctagttgggctggagagctgactgacagacgatcaaccagtggttattgcacttatgtatggggtaatttagttacctggcgcagcaaaaagcagtctgtagtctcaaggagtagcgcagagtcagaatatcgggctttggccttaggtatttgtgaagggatgtggatcaaaaggcttatgaatgaattaaggtttgaatctcccgagtcctttaaaatgtatagtgatagtcaagctgcaattagcattgctaaaaatccagttcaccacgacagaactaaacatgttgagatagacagacacttcatttcggaaaaggtgaatt

SEQ ID NO: 104506 - DNA, 723 bp, Cannabis sativa
ttagatctatagttatacacttataattatatgtaatatgtttatctatagaattgaattttattgttgcatattttatgagtgatataaaatctaacactaacatatagttgcgccaacatataagtacgtacctcaaactcgaaaccatattaattaaacagacgaaatgaaaactcataatatataatatgtttcaaatataagccgtgctttcaataactcataacacatagattcttactcttactcccagcccccctagtactgatttctttacccaatatatcttctttaagctagtaaaatcctacgtacgtaagaattaatattaattagtacaatctgagaaaataaattataattaattaaatagttagaaaagtagagagagaaggcaaggcaaaggtatcggcctacacaaaagtcaaatgttcttctaataattaataatacaaatatttctaattagaatatatattatcatgtaaaagtcaattaacaaaagaaatcaacaaaagttcacctatataagggcccgtggatttcatattaaaccatcatatatttatattatgtatattccctaggattggaatgatctaattcagaattaattagctacccacctcatgaatatggacactataaatacatgacatcttcttttctttgctacaacacaaattaataacacttcctttcttaatcatttgtgtttat

SEQ ID NO: 104507 - DNA, 816 bp, Cannabis sativa
  modified_base (283)..(286): a, c, t, g, unknown or other
taaatgataacatgaaccaaatgaaacacaaatcggtgatgaaaatacttctttttctttattgatatataaaggataaagattacattgaaatagagttctattaagggcgtaaaacccaacactcaacccatcgtgcatgtctcctattgagcttgtgttgccccttcaattgtttaagggattcatgatctgtgtgaatcacaaattctttgggccacaaatagtgttgccatgtttctaaagctcgcaccaaggcataaaactctttatcataggtggnnnnattaagtgcagccccacctagcttttcactaaagtatgcaaggggtctcccttcctgcataagaacagtgccaatacctacaccagaagcatcacattcaatttcaaatgtgttagaagaataaggtaaaacgagtactggggcatgggtaagcttgtgtttaagcagttgaaatgcctcctcttgtgtttcaccccattcaaaagaaacattctttttgataacttctgtaatcggtgctgcgatggtgctgaaatccttgtcaaaccttctataaaaactagcaaggccatgaaaactttgaacatgacctatagttgagggctccggctagctgctcattcacctcagggacagaccgagtcatgtagtgggtgagtatatctttgcctctcttagtctctggatgcagcactggaggtgggggaggggccctgatctgctcggatccgcttctgacaagctcggatccgctcttcgactgctcaggcttttccgagctccctcctcgggagtctttagacttagtc

SEQ ID NO: 104508 - DNA, 808 bp, Cannabis sativa
aatacctcataccaaacgcccccttaggtatatgaccgttaaatattaagtcattatttacgtgtcatttttttattggtacatttaaattatttaaaaaaaaataatgacccagaccaatcagagattgccacgtaaaaatttatttaacacttaacaggtagctacagaagttctataattataatttaagtattattactgtcaacaattaaacttaaatatttatttgcaaacgtgaattaaacttaagtatttatactgcaaattactcttttttataataatattattattttaaagtatttactaaaataaaacctaatttatttattagaaatactatattaaatatatatatatatttttcaaaacactatttcttttgaagttttgggtaagtccatagtttaaagaatagcaaatggtctcaaattataaggctaagactatgctagtaaatgtcttcatttcaaaacttgtaaagaaatagcctttttagactatattatcttttgccacataaaaaaaaaatcaatattttttttcatatattttattcaaaattagaagcaaattacttaaagattatggtatatttatattagttttttaaaatcttttttatttgaaagtaatattaatttttttaaaaaaaaaaaatttatgacttggttgttggtatataaattttgttgtacaacatatttctattttgttgtatggtatattattatgtttagatgatatttattatttattttgctttgtatatataattttgatagcataatacaaatattttaat

SEQ ID NO: 104509 - DNA, 618 bp, Cannabis sativa
ttatccacgcacatagttacctccgtatcggccagttcccttgacgattcaagtatctgcatagaaggacaaatatgattagtggctccaaaatcaacaatctataaagattttttatcttccactaagttagcttcaagaatgaataaatcatatttacctttcttaagcttggagagatacttgttacagtttctcttccagtgttccattacgccacaatagaaacactcgcctttagtcttcttatccttggacttgcagctagctttgttcttcatggccttaggtgacttcttgcctttgagcttgccaccactgttgtccttactgttggttttatagtattaaatcaggtctgcaacggaaaagtttgtattatatgattatcattgtaccatagcccctaggatctccagatgtgtgtacattaaatcaaaataataaaaattataaatttagagtatacctattgaagcctatcagggtatcttcgaaacttctcgtaagttgtatctctttgttgctactaaaatcgcccaatatacgtggaccagtcaggaagggacacgtggatcaaattacttgagaagaactgctaagtctttaaatggcacc

SEQ ID NO: 104510 - DNA, 508 bp, Cannabis sativa
aggattagtattttattgaattaattaggttaagttgatatagaattattttattgtattaattaggttaattaaattgttgttttgttcaactgatagaagtttcgaaatggatagagattggatgagtgcgaataggttaacggtaaaatatagggaaggtgttgatttctttttggagttttctgcaaagaatgcggataatcctgatttggttcattgcccatgtctcaaatgtggtaacatggagcgtatgaaaattttccaaataagagaacatttgtttaagaatggtatagacaagagttataagatttggtatcaccacggagaaaaaattagaagatcgggcgagggaccctctagaaaggataagtttgttaataatgtggagtataaagatgattacattgcagagatgattaacgaagtagagtttgaatctcaaacggtacattccgcctgcaaagacacaattattgtctggactttcagagattgtgaagaa

SEQ ID NO: 104511 - DNA, 1242 bp, Cannabis sativa
taataataataataagggacttttttatttttacattttaaaacagtttttttttttgtatttttacagaattccacacaaaaacccgtatagcaactaactaagcaacctaaatcgcaaccaaaatccatataacaacccacatagaaattaccggagaaacctaaaccataaatttggaaaaaaaaaagttaaaaaatagtatatgaggcaattttcctaataataataataaatttaaactgcggtttattgttaaaaaaatgatatgcgttatatatattaggtagatgttacgtgtcgagctccatattgttagttttacttgaggttttaattatgaaatttaacaggtagagtatcgtgttaaatttcatgtgttaatatttttccctattcagcgaccttggaggaaacaggcatggtgtcttcgatttcctcaaaactgcttgccatcgtcgatatctacatggtgatgtcatcactgagtcccagctgcgctctaccatcgccacaaaacagtcacaaaaccaagcattccaatattaaatttatttctatactattcccatcacagaccacaaattacaaatagaaaaaatgagttgggttggacaggttgattggtttggcccaaattttgtgcacccctatttgaaattcttttagtggaacttgataattggagtctttttcgaaacttatttcattacgtttaagaaagttataatgtcatggttgtggccataaacttatttcaatcaaatcattcaaacatatgctcttgggaaaatatacacacaaactaaaataaaaaaaaaaatataggatattagcggcaaaactacccgaactttatcttttttaacacttaaccacaaaaactgatttttttttttatggaaaaacttaccaaactcacattctgttttgctcattacacttccatttaaaaccctcagttaagtgccacagtggactgcctacgtgtacacaagagtacacatagtaaattttagtggttcacgtaattttaattttaaatataataaaaattataaaaaaaattattcataaaaaattaaaaaaaaagaaagaagaaggtagttttctattagtgcttaataatatgataagagacacaaaatacatatgaacacattgtatttgtatgtaccagttgttggacattattttaccaggatcttagatctactcccaagtatgttgtttaacacccta

SEQ ID NO: 104512 - DNA, 654 bp, Cannabis sativa
ttactgccttggcttgtcatgggagactttaatgagattatttcccactcagataaattaggaggccccataaaaaatgattctcaaattgatgatttccgaaataccattgatgcaagtggattacaagaattgatatttgagggtgagagatttacttggcacaacaacaatacttgtggttccaatgtgaaggaacgattggattatggattcattaactctccttggattcaggtctttaaggttccaattgtttcccatcttgatttttttcagtccgatcacagggccataatggttactgctcagcctctttcgtccattcctgcacagaaattcaaatctagatttagatttgaaaggctatggctccatgaagatgattgttctaccaccattattgcaaataactggcatacttccttctttggcaaacccgacttcacaactgctgcaaaattgcagattgtgccaccaacttgcaatcttggcatagagctaaatttggagacttaccaaaaaagatcaagatctctcaagacaaagttgctgcccttcacaaccaactcatatgacactagtagatctcattttgaagaactcaaatcaagtgaacacatcctagatgaattgctctctcaagaagaagaa

SEQ ID NO: 104513 - DNA, 510 bp, Cannabis sativa
  modified_base (27)..(38): a, c, t, g, unknown or other
  modified_base (344)..(346): a, c, t, g, unknown or other
aagtttaagaaaccttacattgattgnnnnnnnnnnnnatgactccttccatttagatctcttgcccttgattcctttctgcagtggagcattacgaagacctgaacttggatctctttctctccttcgggtttggttaccaccgtcttactcattatgattgagtacttgacttgctatgtgtggacatgccactctttcactaagggttcgaatatggtgaagaataatgaaggaggctgaaatcactatggaaggaactctatcatgtaggttgaaggcaatagttaaattgtcaaaaatggatgagtgagagcatcgtgttccttttatagtgtttcaannngggcttagggctgaattatatgggttaaaaaagtataaaatattggtgaaaaaacacttaatggttgtgcactataatggaccactttctagttacaattttgccactttatttcaacaacttattcttctttcaaaaataccatattttccaattcaatccta

SEQ ID NO: 104514 - DNA, 1051 bp, Cannabis sativa
aaaaaatctaccaaaaccggttaaacggttttacaggtactggcaaacctgttaaccagtttgcaccaatttttcccaaacaattcataaccctctcaaaacttaaatgtaccaaaccttccagagtacctatattgaccttccacaatataattcaatcaacaaaacccaaaaaaatgcacaaatacaaaatatgccatggatgaaccaaactcaagcttgtgcatccatcacccaaaacaattaaaccagctacaaaaagctatttccaactcaaattaaacttagaaattgaaccacacataaaccaaaccctcacagcccctaaaatcccaaaatcacatatctaaaccaacatcaaagcttgaaaacaaagagcaaatgatctagaggttacctcaacttgaattctactttaatccttgctaaattctagaaataaaagaagaaatcggttggttgcttctggtttggtggttcacgagcaaggagagagagagagagaaagaaaagggttttctcttaatttcttgatttttcctcttttcctaatttttcaaaaatgtatttcataatacaatactcagcatagaatgaaggggcagctgtcagacacacacacagccacctaatccccttatttataatgactacaatgccccttggtgcttaatcttaagctatttcaagcctaggggtaaaatggtcaaaaaccttaaccttgctcaacctcggtattctaatttctccaatatacatcccactaaaaaataaggttctagacttatccatgtgattaaaatagacatccatcgcattttccgttgttgccgagcaaaaatggtaaaaatagcataattcttaaataattcataaaaatacacctagagtttagtaaaatctccgaaattgagaaattataactctaatgcccacttttaataatgagacccaccattaaataaattcacaattaattataaaaatatagataattagtgttaattgcctttactaatccatactataaatgtggtcattacaattattc

SEQ ID NO: 104515 - DNA, 508 bp, Cannabis sativa
aaaaagttctttttaatgaaaagtactttttaaatgattacagagggtatttttgtcataatcccttttgaaattatgcatgcctttgattttggcggttttatgtttccaatgcacatcaataacattaatggattgtcttttccacttctcttctattttcatccattagatcttccatattatgatctgatggttgtaaaatttagagtataaaatggttagaatcaaactttctaccatcttcatcttctccaaaaaacttaagctttctgaagcttccactcgagctttcttaatctctgcatgccatccctatctttgacattcttcctgcgaatttactcggacttgattttcgactctcggtgctcgaaaaactcattacgccggtagtcacgtctccactcgtagaagtttcctgcatccagcttttcgacttcacacagtaagtatctcatcctccctttgctattattctggttaggatttatcttacatttcattg

SEQ ID NO: 104516 - DNA, 1340 bp, Cannabis sativa
taagatttattatttattctactagtaaataataattgattagtttttattaatctcttatttcataaggattaaaataaacattattttctttaaaataatatatttctctctttaatattatttaataataatattatatttaactaattaatatagttttattcaataaaactaaatagttaaatactattaattatacaattcataattgtcataattaatcaaaataataatttcataaattattattttgcccttaaaaatttatttctcaagaaaatcaattctcacttgaaatccattcatcaaataaagtcttcccttatacagtgctgtatagaggtgacttgaagaccattgacctatattttaaagcttcaataaacccaagattaccatcaatctcattgatatatttatttgatttattaattctattattactccactataaatatgaaattgtacttttttataagatagaactatatttacagaattcttacttgtagtccattgatatagtcaatataagtagtttgcccttcaattattagttcataattagagttggtcaaaatattttttttaccattctaattatctcttgaatccttatgtaccattaattcaatgtgaacagttaatctataacttgttatagatttggatctaactgttagcacttccaaaattaacactataagggaactaatattcgatgcgttaggaaaatttggattccactattgtataacattttcccactcatattattaagctcccaaaatagaagttgtaagaatcatcttctctgagaaatgttaactagtgaatcaaaggactcaatgaacacaaacaagagttcatgtatactgagcatttaggctaatctactaatgatcatcttctctgagaaatgttaacgagtgaatcaaaggactcaatgaacacaaacaagagttcatgtatactgggcatttaggctaatctactagtcatgcataatctaataatacacagtacctttactacatgtctatctatatatgtgatccgaattaaaatcacacacgcaagaagcatagggtatagtaaaccgtacttagtagttctatattaaagattctcaatactttaatacactaccgatttattttattcatatcgtataatcttaattctcttgtacattcttacaagattataccttctttttttttttttttgatatttaataattatactcttataattaatatatcatttatcttataattgtaatatatatatttctaatatattatccattaattacttgcttttagagcataaat

SEQ ID NO: 104517 - DNA, 633 bp, Cannabis sativa
tgattcataaaatgactaattaatctattatttactatatagcctagttgtggttgtagaacaacaagaacaagtttgttcatgttgttagatagaaagatattgagtttgtgttttttgttgtgaaatttattagtttgtgtatttcagagggctggtttgcttgtgtgaaatttattagtttggtttgcttgtctctggttaagttttgctgctctaagggtccttggcataattgacattatgctaagtgatttaaatctattatgttgatattgcagaaactggttttgttatgatttcacaagttttgctatgatttttcatagggtcaaaactggtttcacaaggttcacaagtttgaaacttgtttcacgggttttgagggttctgtaatgaggtttaaaacttgttttcacacctatattttgtttttagattattgttgtgtattgtgtgttgctttgattatattaatttgtgatcaatattttttattttttgtatatgtgtgtgaaatttttttttttcttatttggtttctaatgaaattagtttcagttaacttttattgtttatcatttatgtttttgttatgatttttcatatagtcgaaactggtttcacatggtt

SEQ ID NO: 104518 - DNA, 594 bp, Cannabis sativa
ttaaattcaatcaagatagaataattgctcgcttaaaggcccgtcttgttgccaagggttatgctcaaacctatggagtggactattgtgatactttttaacatgatgctaaactcacatctttcgactgatcatttccatggtagctgctcataattggtctttgcatcagcttgatattaaaaatacttttcttcatggagatcttgaggaagaagtgtatatggagcaacctcctgggtttgttgctcagggggagttagggtgagtttgtcgtcttcgcaaatctttatatggattgaaacaaagccttcgtgcttggtttggtaaatttagtcaggttgttgagaaatttggtatgttgaaaagtaagtcaggtcattctgtgttttataaaagatcaactactggtatcattttgttagtggtgtatgttgatgacatcgttattactagaaatgatactgaaggcatctcatcccttaagtctttcattcatacccagtttcacacaaaagatttaggggagctcaagtatttattgggtcttgaagttactcggagtaaataaggtatttttctgtctcaaagaaa

SEQ ID NO: 104519 - DNA, 652 bp, Cannabis sativa
  modified_base (26)..(27): a, c, t, g, unknown or other
ctattgttgtaggagaattcaattannggcaagtacttactccatgaaccttcaaagtccatgacacaggctcgtagtccatgagccatccctatcgtactttggtagttgttgtcagtgcatctgccacaacattggctttcccgaggtgatacagaattttgcaaatgtaatcttttacaaattccagccactgtctctgcctcatatttaaatcaatctgggtgaaaaagtacttgagactcttatgatcagtgtaaatctcgcatttttcaccatagacgtagtgtcgccatatttttatagcaaatactacagcagcaagctctaaatcatgcgttagatagcgctggtcataattcttcagtttacgggaggcatagaatataactttgttagcttgcatcagaacacatcccagaccctgtctggatgcatcactataaacaatgaacttttctcgatctgatggtaaagctagcactggtgctattattaatcattgttttaactcctgaaaaacttgcttcacacttgtctgaccatatgaaccattgattcttcttagttaactcggttagcaacatagagatcttaaagaatcctgtgataaaacgtcgataataccctgctaaactgaggaaacttcaaa

SEQ ID NO: 104520 - DNA, 2688 bp, Cannabis sativa
gtttaacgttaacagtctgttaagttaatcgtgtaatcgttaaactaagaatcgttaaaccaagaattaccgttagatagacacttttaatatataaagatataaagatacctctttgcactatggaaaaatctcaaacagagcaactcaatgggttgcactcctcaattattaatcatacaactttctttgtatcctaattttgattttaattataaatcataactctaaagaagaaaagggagacatgatatcagtgtagctcttgaaaatgacctcttatttagaagagtaacgaaaaataactcttattatatgttaatcattgcatatatattttagttttaaaagatggttactaaaaggagaattaataataagaaattcctcaccaattatctcttgttaaacctgtaatcaaatacagagacatgtcaattgtaatccttgatagccttgaaggttttccatctttttttgcttctttgcacataatgttcttcattccacacttgcaacctatcataaatgaaatgaaaaaaaaaactatccctaaaatttccactgaatcattattataagatcgaaaatattcaaatttaaccataaaaataataatcgattcaatcaaatagaaaaagcaaaacttttaagaaaaaaaaaactttattattgaatatatgtataaataaagattttacttttaatttaagactataaaattaaagagacattacatataattgaacgacggaagagggtcgtggtggtggtcggtaatgatggagttgctggaatgttctgcttcttacaaaactatgacagcgatgctacgatttcttgggtactcggttgcggtcacttgttctgcgaggtttatctccttgaactctcccaacgcttcccttaaaccattcaatgccctcaaggcccttctgttctccccaagaacattgatctcctctctctttgtaactcccaaaatcctatccccaatattattacctccgatgatccccattgataatattaattttccttctctgttcttcctccattaggcttacaattttaggggttatgtgggtggagggggaatacttgtctctggatcgattttgatatgcctttgctttaaagtcttcgtcacacagaagagaaaaataataataaatcaatttgaatttaaattggaatttgagagttttagagaggcaaaagatcctgataagactaattcatatgctatagagttagggttttaatttaacaggagagttaacttcaatgttaagtttaactgataaaaagaaaacaatctttaaactaagaattgtcgttatatagccacttttaatatataaagatatgaaaaaataaaataaaaatcatattgtaataggaacatttcatttaatatacttaaaaaaaatctcaatttcaaaaaaatacccctttaattaatttatataatacaatcctctcactttatttaaagaaacccttaccatttatttttttcaaaacttaaaaaaacctaaaaaaaaaaaattaatctctctcgacagccccatcagccactcgctaccttctagccccaatctgtgtaactcggccacaatctgatcccactctgcccactcgcgcgaagaataaaggacccatcggcgcgaaggtcccatccgtcgaagaccccttcccaactgtccgtccatccttctccttgtacgaaagactcgtccgcccgtgcgaaggacctgtctgagcctgttgttggtcgttcctccgccgtcagagcccgtcctgtcccatccgattcgcctcccatcccattggatctgcctcattctttaagaagaaaggtattgttcataaaaagaaagtttgttgttagtttttttttttttttgtggttgaaatacccttagttttgatgaatttttcttaattttcggtcagttttgaatggtggttatggtgtttttcgatccagtgtggtggtcgttgaggaaaataaaaaacgatgtatgttctcgattatttattaaaggattctcgacgggttattgataagatttagcttttggtgatggtcattaagtttagctattgtcaacatgttatcgatatgttgtctataggttcttgatcgataaagcattgaaaaaaatttgtaatttcgttttttaattgattcttgcttgatgggttttcgataagggtgatagtcattaaatttagctactaacgaaatgttcccgacagttgaatcttacaaaagaaattgtaattttaattttttattgattcttgcttggatatcaattgattttgatattgacgggttgtcgataggctatcagtacaattgagaatttttttttgttaagttggttatcattaatggcactacaagaaaacccactttatgtgccggcaaaagtacactgaatgcgtcggtgaagctttgccggcgcaatactgtgccggcaaaacatgtctgagaatcttgatcggtaaaggattttttaccggcgcatagacgaaatacgccggtaaaacacaattttactggcgagaaatagcaccggcaaaagtgaaacaccggtgttaaaggatacccttatctgctatgaagatgctttgataagcttttgccggtaaaacggtgcgccgacaaaaaggttc

SEQ ID NO: 104521 - DNA, 712 bp, Cannabis sativa
atgagttgactaccctattcaatggatgatatatttgattctcgccgaaacgggacactgtattagtttgttgaaaaccttggaaaatttgaaatatgttttattttggtatttttataaacatatttgctatacttgttattttcaaaacttgtgtatgaatttatagaaccaaatgatttatttctgtttattgatattcgtagtgtcaaaatggacaacccacaccccaaccctctcctagtaaatgcctttgcaaatgaattctatagtgtgaaaatgcttcctagtaagagcattaattcacacttgttgatgatgaatctgaagttccagaaagaaaatttgttgggaattgatttatctagagaacaatgagttctattcattcttaatagtcttcctcctgagcgtaatggatttgttgtatcttatatgaccaacaattttaactcatccgacatggacaagctagaagctgatttgcgagcttatgaacagagcttacatgcatggaggccaccctccagttttgtagaactaaataagaggaaaagaattaagtatgaaacttctaacaatgttgtttctttaagtacaaattgtgaaacaattgatagtagtacacttcaatgttcaaattgtaatgagaagagacatcaggaagaacgatgtcccagacttctaaataattcgaatgaaggtaatgctt
